United States Patent Application Publication US 2007/0214517 A1 - sequence listing, part 9

SEQ ID NO: 11129 - protein, 161 aa, Zea mays subsp. mays
  peptide (1)..(161): Ceres Seq. ID no. 13494721
  misc_feature (1)..(145): Pfam Name: Endonuclease/Exonuclease/phosphatase family Pfam Description: Endonuclease/Exonuclease/phosphatase family
  misc_feature (1)..(159): Homolog of NCBI NO: 18481705 NR Description: putative T29H11.60 protein [Sorghum bicolor]
  misc_feature (1)..(156): Homolog of NCBI NO: 7487536 NR Description: hypothetical protein T29H11.60 - Arabidopsis >gi|4678346|emb|CAB41156.1| putative protein [Arabidopsis
  misc_feature (1)..(156): Homolog of NCBI NO: 18408629 NR Description: endonuclease/exonuclease/phosphatase family
  misc_feature (1)..(78): Homolog of NCBI NO: 14578320 NR Description: PV1H14200_P [Plasmodium vivax]
  misc_feature (83)..(156): Homolog of NCBI NO: 14578320 NR Description: PV1H14200_P [Plasmodium vivax]
  misc_feature (1)..(147): Homolog of NCBI NO: 23490314 NR Description: putative AP endonuclease-related [Plasmodium
  misc_feature (1)..(145): Homolog of NCBI NO: 23957727 NR Description: AP endonuclease (DNA-(apurinic or apyrimidinic lyase), putative [Plasmodium falciparum 3D7]
  misc_feature (1)..(131): Homolog of NCBI NO: 4106095 NR Description: apurinic/apyrimidinic endonuclease [Cricetulus
  misc_feature (1)..(131): Homolog of NCBI NO: 6980804 NR Description: Chain B, Human ApurinicAPYRIMIDINIC (Ape1) Bound To Abasic Dna >gi|6980805|pdb|1DE8|A Chain A, Human
  misc_feature (1)..(131): Homolog of NCBI NO: 6980832 NR Description: Chain A, Crystal Structure Of Human Ape1 Bound To Dna >gi|6980833|pdb|1DEW|B Chain B, Crystal Structure Of Human
  misc_feature (161)..(161): Xaa is any aa, unknown or other
MLEFVQHVDKPLIWCGDLNVSHEEIDVSHPDFFSSAKLNGYTPPNKEDCGQPGFTPAERRRFGNILFQGKLVDAYRHLHKEKDIDGGFSWSGHPIGKYRGKRMRIDYFLVSEQLKDRIVSCEMHGRGIELDGFYGSDHCPVSLELSEAVAEEAPGQPKPSX

SEQ ID NO: 11130 - protein, 143 aa, Zea mays subsp. mays
  peptide (1)..(143): Ceres Seq. ID no. 13494722
  misc_feature (54)..(133): Pfam Name: Endonuclease/Exonuclease/phosphatase family Pfam Description: Endonuclease/Exonuclease/phosphatase family
  misc_feature (1)..(25): Homolog of NCBI NO: 18481705 NR Description: putative T29H11.60 protein [Sorghum bicolor]
  misc_feature (54)..(133): Homolog of NCBI NO: 18481705 NR Description: putative T29H11.60 protein [Sorghum bicolor]
  misc_feature (1)..(133): Homolog of NCBI NO: 7487536 NR Description: hypothetical protein T29H11.60 - Arabidopsis >gi|4678346|emb|CAB41156.1| putative protein [Arabidopsis
  misc_feature (1)..(54): Homolog of NCBI NO: 18408629 NR Description: endonuclease/exonuclease/phosphatase family
  misc_feature (43)..(133): Homolog of NCBI NO: 18408629 NR Description: endonuclease/exonuclease/phosphatase family
  misc_feature (1)..(120): Homolog of NCBI NO: 14578320 NR Description: PV1H14200_P [Plasmodium vivax]
  misc_feature (1)..(38): Homolog of NCBI NO: 23490314 NR Description: putative AP endonuclease-related [Plasmodium
  misc_feature (1)..(120): Homolog of NCBI NO: 23957727 NR Description: AP endonuclease (DNA-(apurinic or apyrimidinic lyase), putative [Plasmodium falciparum 3D7]
  misc_feature (31)..(120): Homolog of NCBI NO: 23490314 NR Description: putative AP endonuclease-related [Plasmodium
MKSDWPAFSQLVARLDPDVICVQEVRMPAAGSKGAPKNPSELKDDTSLSRDEKQVVLRALSASPFKDYRVWWSLSDSKYAGTAMFIKKKFEPKKVSFNLDRTSSKHEADGRVIIAEFESFLFTEHLFSKQWMEGGGKCISKKT

SEQ ID NO: 11131 - DNA, 1090 bp, Zea mays subsp. mays
  misc_feature (1)..(1090): Ceres Seq. ID no. 12413685
  misc_feature: MA Experiment ID: 108504 Result: Up-regulated in Transcription
  misc_feature: MA Experiment 108504 PARAMETER Experiment Name: Zm_Drought_P Parameter: Age (day) Value: 8
  misc_feature: MA Experiment 108504 PARAMETER Experiment Name: Zm_Drought_P Parameter: Organism Value: Zea mays
  misc_feature: MA Experiment 108504 PARAMETER Experiment Name: Zm_Drought_P Parameter: Plant Line Value: 35A19
  misc_feature: MA Experiment 108504 PARAMETER Experiment Name: Zm_Drought_P Parameter: Timepoint (hr) Value: 12
  misc_feature: MA Experiment 108504 PARAMETER Experiment Name: Zm_Drought_P Parameter: Tissue Value: Aerial
  misc_feature: MA Experiment 108504 PARAMETER Experiment Name: Zm_Drought_P Parameter: Treatment Value: Drought vs. No Drought
  misc_feature: MA Experiment ID: 108522 Result: Up-regulated in Transcription
  misc_feature: MA Experiment 108522 PARAMETER Experiment Name: Zm_42deg_Heat_P Parameter: Age (day) Value: 8
  misc_feature: MA Experiment 108522 PARAMETER Experiment Name: Zm_42deg_Heat_P Parameter: Organism Value: Zea mays
  misc_feature: MA Experiment 108522 PARAMETER Experiment Name: Zm_42deg_Heat_P Parameter: Plant Line Value: 35A19
  misc_feature: MA Experiment 108522 PARAMETER Experiment Name: Zm_42deg_Heat_P Parameter: Temperature (deg C) Value: 42 vs. 22
  misc_feature: MA Experiment 108522 PARAMETER Experiment Name: Zm_42deg_Heat_P Parameter: Timepoint (hr) Value: 1
  misc_feature: MA Experiment 108522 PARAMETER Experiment Name: Zm_42deg_Heat_P Parameter: Tissue Value: Aerial
  misc_feature: MA Experiment ID: 108523 Result: Up-regulated in Transcription
  misc_feature: MA Experiment 108523 PARAMETER Experiment Name: Zm_42deg_Heat_P Parameter: Age (day) Value: 8
  misc_feature: MA Experiment 108523 PARAMETER Experiment Name: Zm_42deg_Heat_P Parameter: Organism Value: Zea mays
  misc_feature: MA Experiment 108523 PARAMETER Experiment Name: Zm_42deg_Heat_P Parameter: Plant Line Value: 35A19
  misc_feature: MA Experiment 108523 PARAMETER Experiment Name: Zm_42deg_Heat_P Parameter: Temperature (deg C) Value: 42 vs. 22
  misc_feature: MA Experiment 108523 PARAMETER Experiment Name: Zm_42deg_Heat_P Parameter: Timepoint (hr) Value: 6
  misc_feature: MA Experiment 108523 PARAMETER Experiment Name: Zm_42deg_Heat_P Parameter: Tissue Value: Aerial
  misc_feature: MA Experiment ID: 108526 Result: Up-regulated in Transcription
  misc_feature: MA Experiment 108526 PARAMETER Experiment Name: Zm_5mM_NO_P Parameter: Age (day) Value: 8
  misc_feature: MA Experiment 108526 PARAMETER Experiment Name: Zm_5mM_NO_P Parameter: Organism Value: Zea mays
  misc_feature: MA Experiment 108526 PARAMETER Experiment Name: Zm_5mM_NO_P Parameter: Plant Line Value: 35A19
  misc_feature: MA Experiment 108526 PARAMETER Experiment Name: Zm_5mM_NO_P Parameter: Timepoint (hr) Value: 1
  misc_feature: MA Experiment 108526 PARAMETER Experiment Name: Zm_5mM_NO_P Parameter: Tissue Value: Aerial
  misc_feature: MA Experiment 108526 PARAMETER Experiment Name: Zm_5mM_NO_P Parameter: Treatment Value: 5mM NO vs. No Treatment
  misc_feature: MA Experiment ID: 108527 Result: Up-regulated in Transcription
  misc_feature: MA Experiment 108527 PARAMETER Experiment Name: Zm_5mM_NO_P Parameter: Age (day) Value: 8
  misc_feature: MA Experiment 108527 PARAMETER Experiment Name: Zm_5mM_NO_P Parameter: Organism Value: Zea mays
  misc_feature: MA Experiment 108527 PARAMETER Experiment Name: Zm_5mM_NO_P Parameter: Plant Line Value: 35A19
  misc_feature: MA Experiment 108527 PARAMETER Experiment Name: Zm_5mM_NO_P Parameter: Timepoint (hr) Value: 6
  misc_feature: MA Experiment 108527 PARAMETER Experiment Name: Zm_5mM_NO_P Parameter: Tissue Value: Aerial
  misc_feature: MA Experiment 108527 PARAMETER Experiment Name: Zm_5mM_NO_P Parameter: Treatment Value: 5mM NO vs. No Treatment
  misc_feature: MA Experiment ID: 108533 Result: Up-regulated in Transcription
  misc_feature: MA Experiment 108533 PARAMETER Experiment Name: Zm_4deg_Cold_P Parameter: Age (hr) Value: 8
  misc_feature: MA Experiment 108533 PARAMETER Experiment Name: Zm_4deg_Cold_P Parameter: Organism Value: Zea mays
  misc_feature: MA Experiment 108533 PARAMETER Experiment Name: Zm_4deg_Cold_P Parameter: Plant Line Value: 35A19
  misc_feature: MA Experiment 108533 PARAMETER Experiment Name: Zm_4deg_Cold_P Parameter: Temperature (deg C) Value: 4 vs. 22
  misc_feature: MA Experiment 108533 PARAMETER Experiment Name: Zm_4deg_Cold_P Parameter: Timepoint (hr) Value: 1
  misc_feature: MA Experiment 108533 PARAMETER Experiment Name: Zm_4deg_Cold_P Parameter: Tissue Value: Aerial
  misc_feature: MA Experiment ID: 108534 Result: Up-regulated in Transcription
  misc_feature: MA Experiment 108534 PARAMETER Experiment Name: Zm_4deg_Cold_P Parameter: Age (hr) Value: 8
  misc_feature: MA Experiment 108534 PARAMETER Experiment Name: Zm_4deg_Cold_P Parameter: Organism Value: Zea mays
  misc_feature: MA Experiment 108534 PARAMETER Experiment Name: Zm_4deg_Cold_P Parameter: Plant Line Value: 35A19
  misc_feature: MA Experiment 108534 PARAMETER Experiment Name: Zm_4deg_Cold_P Parameter: Temperature (deg C) Value: 4 vs. 22
  misc_feature: MA Experiment 108534 PARAMETER Experiment Name: Zm_4deg_Cold_P Parameter: Timepoint (hr) Value: 6
  misc_feature: MA Experiment 108534 PARAMETER Experiment Name: Zm_4deg_Cold_P Parameter: Tissue Value: Aerial
  misc_feature: MA Experiment ID: 108535 Result: Down-regulated in Transcription
  misc_feature: MA Experiment 108535 PARAMETER Experiment Name: Zm_Meristem_P Parameter: Age (day) Value: 8
  misc_feature: MA Experiment 108535 PARAMETER Experiment Name: Zm_Meristem_P Parameter: Organism Value: Zea mays
  misc_feature: MA Experiment 108535 PARAMETER Experiment Name: Zm_Meristem_P Parameter: Plant Line Value: 35A19
  misc_feature: MA Experiment 108535 PARAMETER Experiment Name: Zm_Meristem_P Parameter: Tissue Value: Root Meristem vs. Above Root Meristem
  misc_feature: MA Experiment ID: 108539 Result: Up-regulated in Transcription
  misc_feature: MA Experiment 108539 PARAMETER Experiment Name: Zm_20percent_PEG_P Parameter: Age (day) Value: 8
  misc_feature: MA Experiment 108539 PARAMETER Experiment Name: Zm_20percent_PEG_P Parameter: Organism Value: Zea mays
  misc_feature: MA Experiment 108539 PARAMETER Experiment Name: Zm_20percent_PEG_P Parameter: Plant Line Value: 35A19
  misc_feature: MA Experiment 108539 PARAMETER Experiment Name: Zm_20percent_PEG_P Parameter: Timepoint (hr) Value: 1
  misc_feature: MA Experiment 108539 PARAMETER Experiment Name: Zm_20percent_PEG_P Parameter: Tissue Value: Aerial
  misc_feature: MA Experiment 108539 PARAMETER Experiment Name: Zm_20percent_PEG_P Parameter: Treatment Value: 20percent PEG vs. No Treatment
  misc_feature: MA Experiment ID: 108544 Result: Down-regulated in Transcription
  misc_feature: MA Experiment ID: 20000478 Result: Up-regulated in Transcription
  misc_feature: MA Experiment 20000478 PARAMETER Experiment Name: Zm_5mM_SA_P Parameter: Age (day) Value: 11
  misc_feature: MA Experiment 20000478 PARAMETER Experiment Name: Zm_5mM_SA_P Parameter: Organism Value: Zea mays
  misc_feature: MA Experiment 20000478 PARAMETER Experiment Name: Zm_5mM_SA_P Parameter: Plant Line Value: 35A19
  misc_feature: MA Experiment 20000478 PARAMETER Experiment Name: Zm_5mM_SA_P Parameter: Timepoint (hr) Value: 72
  misc_feature: MA Experiment 20000478 PARAMETER Experiment Name: Zm_5mM_SA_P Parameter: Tissue Value: Aerial
  misc_feature: MA Experiment 20000478 PARAMETER Experiment Name: Zm_5mM_SA_P Parameter: Treatment Value: 5mM SA vs. No Treatment
  misc_feature: MA Experiment ID: 20000480 Result: Up-regulated in Transcription
  misc_feature: MA Experiment 20000480 PARAMETER Experiment Name: Zm_Drought_P Parameter: Age (day) Value: 11
  misc_feature: MA Experiment 20000480 PARAMETER Experiment Name: Zm_Drought_P Parameter: Organism Value: Zea mays
  misc_feature: MA Experiment 20000480 PARAMETER Experiment Name: Zm_Drought_P Parameter: Plant Line Value: 35A19
  misc_feature: MA Experiment 20000480 PARAMETER Experiment Name: Zm_Drought_P Parameter: Timepoint (hr) Value: 72
  misc_feature: MA Experiment 20000480 PARAMETER Experiment Name: Zm_Drought_P Parameter: Tissue Value: Aerial
  misc_feature: MA Experiment 20000480 PARAMETER Experiment Name: Zm_Drought_P Parameter: Treatment Value: Drought vs. No Drought
  misc_feature: MA Experiment ID: 20000629 Result: Down-regulated in Transcription
  misc_feature: MA Experiment 20000629 PARAMETER Experiment Name: Zm_Herbicide-Treatments_P Parameter: Timepoint (hr) Value: 12
  misc_feature: MA Experiment 20000629 PARAMETER Experiment Name: Zm_Herbicide-Treatments_P Parameter: Tissue Value: Aerial
  misc_feature: MA Experiment 20000629 PARAMETER Experiment Name: Zm_Herbicide-Treatments_P Parameter: Treatment Value: Trimec vs. No Treatment
  misc_feature: MA Experiment ID: 20000630 Result: Up-regulated in Transcription
  misc_feature: MA Experiment 20000630 PARAMETER Experiment Name: Zm_Herbicide-Treatments_P Parameter: Timepoint (hr) Value: 4
  misc_feature: MA Experiment 20000630 PARAMETER Experiment Name: Zm_Herbicide-Treatments_P Parameter: Tissue Value: Aerial
  misc_feature: MA Experiment 20000630 PARAMETER Experiment Name: Zm_Herbicide-Treatments_P Parameter: Treatment Value: Roundup vs. No Treatment
aattttacctccaaggtttgggtcttcttcctcccgcattagccgcaggtttggttgcttagcatcagggggaaacatcgcaggttgttgttttgtttgaacactatcgagaggaagaggaagaagaggaggaggcggagttttgggttgagagcggcagaatagataatcggacttccggctggataagtgatccttttttttgaatcgccagacgcggagagcaggagggattatagctagcaacaggtgaaatggcaattggacagggcgacgagaagaagggctcccttgccaggagcttgagctgctcaaactgcgggagcggcgcaataatttttgggcggaagagagtcgccgtctcgccgactccgggctcccggagcccgcactcgccgacgcgcaccctgcgcaagcagcgcagcgtccggttccacatggaggacgacggcgtcaacctcttcaaccagctgtcgctagatgtactggttatgatcttttacaaggtgaaccacagtgatctgaggaacctcctcctgatatcgaaatcggtcaaagatgcgaccatccttgctagggagcagcatttcaagttctcgacgccgccggcgaagtccggttttagagacgaggaaaccgccggcggcgacgacgacgacgagggccccggcgcgcccaagcaacacagggttgcgaggtcgcacctgggggacacgaacctgtcgagcatcgccgtcaacctgtcggcgtcgttcgatcagatgtaaagtatatatatatatggcgccacaggttttcagttcgcgcttctgttggcgcgcgtgtatctagtagcttcaggttagaaggttttaagtgcctctcgtagcgcacgccatagagattaggtagtgagaaacagtatactcgtatgcgtcattactagtcctaagttaagtataatgtataaagtttttcaatgctgtggttgaagaacacacgccatgtcgtcttctccgatctgtaagttatttggcatagaagagatgtcttctctcttatgtgtatgctctaagtctatgatgctggatgcttcttctgttttgaagtc

SEQ ID NO: 11132 - protein, 170 aa, Zea mays subsp. mays
  peptide (1)..(170): Ceres Seq. ID no. 12413686
  misc_feature (1)..(163): Homolog of NCBI NO: 7485710 NR Description: hypothetical protein F18E5.130 - Arabidopsis >gi|3080395|emb|CAA18715.1| hypothetical protein [Arabidopsis >gi|7268948|emb|CAB81258.1| hypothetical protein [Arabidopsis
  misc_feature (29)..(163): Homolog of NCBI NO: 15219910 NR Description: late embryogenesis abundant protein, putative; id: At1g61340.1 [Arabidopsis thaliana]
  misc_feature (29)..(163): Homolog of NCBI NO: 28372904 NR Description: At1g61340 [Arabidopsis thaliana]
  misc_feature (1)..(163): Homolog of NCBI NO: 18415709 NR Description: expressed protein; protein id: At4g21510.1,
  misc_feature (30)..(163): Homolog of NCBI NO: 18412772 NR Description: hypothetical protein; protein id: At4g05010.1
  misc_feature (1)..(168): Homolog of NCBI NO: 34393368 NR Description: unknown protein [Oryza sativa (japonica
MAIGQGDEKKGSLARSLSCSNCGSGAIIFGRKRVAVSPTPGSRSPHSPTRTLRKQRSVRFHMEDDGVNLFNQLSLDVLVMIFYKVNHSDLRNLLLISKSVKDATILAREQHFKFSTPPAKSGFRDEETAGGDDDDEGPGAPKQHRVARSHLGDTNLSSIAVNLSASFDQM

SEQ ID NO: 11133 - protein, 109 aa, Zea mays subsp. mays
  peptide (1)..(109): Ceres Seq. ID no. 12413687
  misc_feature (1)..(107): Homolog of NCBI NO: 34393368 NR Description: unknown protein [Oryza sativa (japonica
  misc_feature (1)..(102): Homolog of NCBI NO: 7485710 NR Description: hypothetical protein F18E5.130 - Arabidopsis >gi|3080395|emb|CAA18715.1| hypothetical protein [Arabidopsis >gi|7268948|emb|CAB81258.1| hypothetical protein [Arabidopsis
  misc_feature (1)..(102): Homolog of NCBI NO: 15219910 NR Description: late embryogenesis abundant protein, putative; id: At1g61340.1 [Arabidopsis thaliana]
  misc_feature (1)..(102): Homolog of NCBI NO: 28372904 NR Description: At1g61340 [Arabidopsis thaliana]
  misc_feature (1)..(102): Homolog of NCBI NO: 18415709 NR Description: expressed protein; protein id: At4g21510.1,
  misc_feature (1)..(102): Homolog of NCBI NO: 18412772 NR Description: hypothetical protein; protein id: At4g05010.1
MEDDGVNLFNQLSLDVLVMIFYKVNHSDLRNLLLISKSVKDATILAREQHFKFSTPPAKSGFRDEETAGGDDDDEGPGAPKQHRVARSHLGDTNLSSIAVNLSASFDQM

SEQ ID NO: 11134 - protein, 91 aa, Zea mays subsp. mays
  peptide (1)..(91): Ceres Seq. ID no. 12413688
  misc_feature (1)..(89): Homolog of NCBI NO: 34393368 NR Description: unknown protein [Oryza sativa (japonica
  misc_feature (1)..(84): Homolog of NCBI NO: 7485710 NR Description: hypothetical protein F18E5.130 - Arabidopsis >gi|3080395|emb|CAA18715.1| hypothetical protein [Arabidopsis >gi|7268948|emb|CAB81258.1| hypothetical protein [Arabidopsis
  misc_feature (1)..(84): Homolog of NCBI NO: 15219910 NR Description: late embryogenesis abundant protein, putative; id: At1g61340.1 [Arabidopsis thaliana]
  misc_feature (1)..(84): Homolog of NCBI NO: 28372904 NR Description: At1g61340 [Arabidopsis thaliana]
  misc_feature (1)..(84): Homolog of NCBI NO: 18415709 NR Description: expressed protein; protein id: At4g21510.1,
  misc_feature (1)..(84): Homolog of NCBI NO: 18412772 NR Description: hypothetical protein; protein id: At4g05010.1
MIFYKVNHSDLRNLLLISKSVKDATILAREQHFKFSTPPAKSGFRDEETAGGDDDDEGPGAPKQHRVARSHLGDTNLSSIAVNLSASFDQM

SEQ ID NO: 11135 - DNA, 1674 bp, Zea mays subsp. mays
  misc_feature (1)..(1674): Ceres Seq. ID no. 13573191
  misc_feature: MA Experiment ID: 108504 Result: Up-regulated in Transcription
  misc_feature: MA Experiment 108504 PARAMETER Experiment Name: Zm_Drought_P Parameter: Age (day) Value: 8
  misc_feature: MA Experiment 108504 PARAMETER Experiment Name: Zm_Drought_P Parameter: Organism Value: Zea mays
  misc_feature: MA Experiment 108504 PARAMETER Experiment Name: Zm_Drought_P Parameter: Plant Line Value: 35A19
  misc_feature: MA Experiment 108504 PARAMETER Experiment Name: Zm_Drought_P Parameter: Timepoint (hr) Value: 12
  misc_feature: MA Experiment 108504 PARAMETER Experiment Name: Zm_Drought_P Parameter: Tissue Value: Aerial
  misc_feature: MA Experiment 108504 PARAMETER Experiment Name: Zm_Drought_P Parameter: Treatment Value: Drought vs. No Drought
  misc_feature: MA Experiment ID: 108522 Result: Up-regulated in Transcription
  misc_feature: MA Experiment 108522 PARAMETER Experiment Name: Zm_42deg_Heat_P Parameter: Age (day) Value: 8
  misc_feature: MA Experiment 108522 PARAMETER Experiment Name: Zm_42deg_Heat_P Parameter: Organism Value: Zea mays
  misc_feature: MA Experiment 108522 PARAMETER Experiment Name: Zm_42deg_Heat_P Parameter: Plant Line Value: 35A19
  misc_feature: MA Experiment 108522 PARAMETER Experiment Name: Zm_42deg_Heat_P Parameter: Temperature (deg C) Value: 42 vs. 22
  misc_feature: MA Experiment 108522 PARAMETER Experiment Name: Zm_42deg_Heat_P Parameter: Timepoint (hr) Value: 1
  misc_feature: MA Experiment 108522 PARAMETER Experiment Name: Zm_42deg_Heat_P Parameter: Tissue Value: Aerial
  misc_feature: MA Experiment ID: 108523 Result: Up-regulated in Transcription
  misc_feature: MA Experiment 108523 PARAMETER Experiment Name: Zm_42deg_Heat_P Parameter: Age (day) Value: 8
  misc_feature: MA Experiment 108523 PARAMETER Experiment Name: Zm_42deg_Heat_P Parameter: Organism Value: Zea mays
  misc_feature: MA Experiment 108523 PARAMETER Experiment Name: Zm_42deg_Heat_P Parameter: Plant Line Value: 35A19
  misc_feature: MA Experiment 108523 PARAMETER Experiment Name: Zm_42deg_Heat_P Parameter: Temperature (deg C) Value: 42 vs. 22
  misc_feature: MA Experiment 108523 PARAMETER Experiment Name: Zm_42deg_Heat_P Parameter: Timepoint (hr) Value: 6
  misc_feature: MA Experiment 108523 PARAMETER Experiment Name: Zm_42deg_Heat_P Parameter: Tissue Value: Aerial
  misc_feature: MA Experiment ID: 108536 Result: Up-regulated in Transcription
  misc_feature: MA Experiment 108536 PARAMETER Experiment Name: Zm_Meristem_P Parameter: Age (day) Value: 8
  misc_feature: MA Experiment 108536 PARAMETER Experiment Name: Zm_Meristem_P Parameter: Organism Value: Zea mays
  misc_feature: MA Experiment 108536 PARAMETER Experiment Name: Zm_Meristem_P Parameter: Plant Line Value: 35A19
  misc_feature: MA Experiment 108536 PARAMETER Experiment Name: Zm_Meristem_P Parameter: Tissue Value: Shoot Meristem vs. Above Shoot Meristem
  misc_feature: MA Experiment ID: 108556 Result: Up-regulated in Transcription
  misc_feature: MA Experiment 108556 PARAMETER Experiment Name: Zm_Drought_P Parameter: Age (day) Value: 9
  misc_feature: MA Experiment 108556 PARAMETER Experiment Name: Zm_Drought_P Parameter: Organism Value: Zea mays
  misc_feature: MA Experiment 108556 PARAMETER Experiment Name: Zm_Drought_P Parameter: Plant Line Value: 35A19
  misc_feature: MA Experiment 108556 PARAMETER Experiment Name: Zm_Drought_P Parameter: Timepoint (hr) Value: 24
  misc_feature: MA Experiment 108556 PARAMETER Experiment Name: Zm_Drought_P Parameter: Tissue Value: Aerial
  misc_feature: MA Experiment 108556 PARAMETER Experiment Name: Zm_Drought_P Parameter: Treatment Value: Drought vs. No Drought
  misc_feature: MA Experiment ID: 108559 Result: Up-regulated in Transcription
  misc_feature: MA Experiment 108559 PARAMETER Experiment Name: Zm_5mM_NO_P Parameter: Age (day) Value: 8
  misc_feature: MA Experiment 108559 PARAMETER Experiment Name: Zm_5mM_NO_P Parameter: Organism Value: Zea mays
  misc_feature: MA Experiment 108559 PARAMETER Experiment Name: Zm_5mM_NO_P Parameter: Plant Line Value: 35A19
  misc_feature: MA Experiment 108559 PARAMETER Experiment Name: Zm_5mM_NO_P Parameter: Timepoint (hr) Value: 12
  misc_feature: MA Experiment 108559 PARAMETER Experiment Name: Zm_5mM_NO_P Parameter: Tissue Value: Aerial
  misc_feature: MA Experiment 108559 PARAMETER Experiment Name: Zm_5mM_NO_P Parameter: Treatment Value: 5mM NO vs. No Treatment
  misc_feature: MA Experiment ID: 20000477 Result: Up-regulated in Transcription
  misc_feature: MA Experiment 20000477 PARAMETER Experiment Name: Zm_5mM_SA_P Parameter: Age (day) Value: 10
  misc_feature: MA Experiment 20000477 PARAMETER Experiment Name: Zm_5mM_SA_P Parameter: Organism Value: Zea mays
  misc_feature: MA Experiment 20000477 PARAMETER Experiment Name: Zm_5mM_SA_P Parameter: Plant Line Value: 35A19
  misc_feature: MA Experiment 20000477 PARAMETER Experiment Name: Zm_5mM_SA_P Parameter: Timepoint (hr) Value: 48
  misc_feature: MA Experiment 20000477 PARAMETER Experiment Name: Zm_5mM_SA_P Parameter: Tissue Value: Aerial
  misc_feature: MA Experiment 20000477 PARAMETER Experiment Name: Zm_5mM_SA_P Parameter: Treatment Value: 5mM SA vs. No Treatment
  misc_feature: MA Experiment ID: 20000478 Result: Up-regulated in Transcription
  misc_feature: MA Experiment 20000478 PARAMETER Experiment Name: Zm_5mM_SA_P Parameter: Age (day) Value: 11
  misc_feature: MA Experiment 20000478 PARAMETER Experiment Name: Zm_5mM_SA_P Parameter: Organism Value: Zea mays
  misc_feature: MA Experiment 20000478 PARAMETER Experiment Name: Zm_5mM_SA_P Parameter: Plant Line Value: 35A19
  misc_feature: MA Experiment 20000478 PARAMETER Experiment Name: Zm_5mM_SA_P Parameter: Timepoint (hr) Value: 72
  misc_feature: MA Experiment 20000478 PARAMETER Experiment Name: Zm_5mM_SA_P Parameter: Tissue Value: Aerial
  misc_feature: MA Experiment 20000478 PARAMETER Experiment Name: Zm_5mM_SA_P Parameter: Treatment Value: 5mM SA vs. No Treatment
  misc_feature: MA Experiment ID: 20000479 Result: Up-regulated in Transcription
  misc_feature: MA Experiment 20000479 PARAMETER Experiment Name: Zm_Drought_P Parameter: Age (day) Value: 10
  misc_feature: MA Experiment 20000479 PARAMETER Experiment Name: Zm_Drought_P Parameter: Organism Value: Zea mays
  misc_feature: MA Experiment 20000479 PARAMETER Experiment Name: Zm_Drought_P Parameter: Plant Line Value: 35A19
  misc_feature: MA Experiment 20000479 PARAMETER Experiment Name: Zm_Drought_P Parameter: Timepoint (hr) Value: 48
  misc_feature: MA Experiment 20000479 PARAMETER Experiment Name: Zm_Drought_P Parameter: Tissue Value: Aerial
  misc_feature: MA Experiment 20000479 PARAMETER Experiment Name: Zm_Drought_P Parameter: Treatment Value: Drought vs. No Drought
  misc_feature: MA Experiment ID: 20000480 Result: Up-regulated in Transcription
  misc_feature: MA Experiment 20000480 PARAMETER Experiment Name: Zm_Drought_P Parameter: Age (day) Value: 11
  misc_feature: MA Experiment 20000480 PARAMETER Experiment Name: Zm_Drought_P Parameter: Organism Value: Zea mays
  misc_feature: MA Experiment 20000480 PARAMETER Experiment Name: Zm_Drought_P Parameter: Plant Line Value: 35A19
  misc_feature: MA Experiment 20000480 PARAMETER Experiment Name: Zm_Drought_P Parameter: Timepoint (hr) Value: 72
  misc_feature: MA Experiment 20000480 PARAMETER Experiment Name: Zm_Drought_P Parameter: Tissue Value: Aerial
  misc_feature: MA Experiment 20000480 PARAMETER Experiment Name: Zm_Drought_P Parameter: Treatment Value: Drought vs. No Drought
  misc_feature: MA Experiment ID: 20000487 Result: Up-regulated in Transcription
  misc_feature: MA Experiment 20000487 PARAMETER Experiment Name: Zm_50mM_NH4NO3_L_to_H_P Parameter: Organism Value: Zea mays
  misc_feature: MA Experiment 20000487 PARAMETER Experiment Name: Zm_50mM_NH4NO3_L_to_H_P Parameter: Timepoint (hr) Value: 4
  misc_feature: MA Experiment 20000487 PARAMETER Experiment Name: Zm_50mM_NH4NO3_L_to_H_P Parameter: Tissue Value: Leaves
  misc_feature: MA Experiment 20000487 PARAMETER Experiment Name: Zm_50mM_NH4NO3_L_to_H_P Parameter: Treatment Value: 50mM NH4NO3 vs. 100mM Mannitol
  misc_feature: MA Experiment ID: 20000534 Result: Up-regulated in Transcription
  misc_feature: MA Experiment 20000534 PARAMETER Experiment Name: Zm_Hybrid_Pollen_P Parameter: Age (day) Value: 8
  misc_feature: MA Experiment 20000534 PARAMETER Experiment Name: Zm_Hybrid_Pollen_P Parameter: Organism Value: Zea mays
  misc_feature: MA Experiment 20000534 PARAMETER Experiment Name: Zm_Hybrid_Pollen_P Parameter: Plant Line Value: 35A19
  misc_feature: MA Experiment 20000534 PARAMETER Experiment Name: Zm_Hybrid_Pollen_P Parameter: Tissue Value: Pollen vs. Aerial
  misc_feature: MA Experiment ID: 20000629 Result: Down-regulated in Transcription
  misc_feature: MA Experiment 20000629 PARAMETER Experiment Name: Zm_Herbicide-Treatments_P Parameter: Timepoint (hr) Value: 12
  misc_feature: MA Experiment 20000629 PARAMETER Experiment Name: Zm_Herbicide-Treatments_P Parameter: Tissue Value: Aerial
  misc_feature: MA Experiment 20000629 PARAMETER Experiment Name: Zm_Herbicide-Treatments_P Parameter: Treatment Value: Trimec vs. No Treatment
  misc_feature: MA Experiment ID: 20001613 Result: Up-regulated in Transcription
  misc_feature: MA Experiment 20001613 PARAMETER Experiment Name: Zm_50ppm_KNO3_L-to-H_P Parameter: Age (day) Value: 20
  misc_feature: MA Experiment 20001613 PARAMETER Experiment Name: Zm_50ppm_KNO3_L-to-H_P Parameter: Organism Value: Zea mays
  misc_feature: MA Experiment 20001613 PARAMETER Experiment Name: Zm_50ppm_KNO3_L-to-H_P Parameter: Plant Line Value: 35A19
  misc_feature: MA Experiment 20001613 PARAMETER Experiment Name: Zm_50ppm_KNO3_L-to-H_P Parameter: Timepoint (hr) Value: 24
  misc_feature: MA Experiment 20001613 PARAMETER Experiment Name: Zm_50ppm_KNO3_L-to-H_P Parameter: Tissue Value: Roots
  misc_feature: MA Experiment 20001613 PARAMETER Experiment Name: Zm_50ppm_KNO3_L-to-H_P Parameter: Treatment Value: 50ppm KNO3 vs. 50ppm KCl
aaatcgcggtcactgctccgaagtccgaaccttcatacacatcgtctcgtttccgatttccccaaattcaggccacaggcgctacaggacccaggcaccactcggtcggcggccaccgcgtcgccccgcctgctcgattggggtcgcgtgtgcgataggaagtattgtgttgtgtttgcaacgtgatagcttgtactgggaacaaaggtcaagatgggcgccttggacctacaccttgactttgcttctgctcaacatggacaagccaagttaaaggaatatgccaagagctctctgttgtctgatggaaactacaatacagacaagatcaatggttcaaaccctgatgactatgagaaatttgagaaagggataatgcactatgggtgtccacattatagaaggagatgccgcataagagctccttgctgcaatgaaatttttgattgccgacactgccacaatgaaactaagaattccattaaaattgataaaatgaagaggcatgaacttccacgccatgaagtgcagcaggttgtatgctcattgtgtggcactgaacaggaggtgcgacaagtatgtatcaattgcggtgtttgcatggggaagtacttctgtggtttgtgcaaactcttcgacgatgatgtctctaaacagcagtatcactgcaacggatgtggaatatgtagaatcggagggagggagaatttcttccactgttcaaaatgtggatgttgctattcaattgcgctgaagaatagtcatgcatgtgttgaaggggcgatgcatcatgactgtccaatctgcttcgagtacttgttcgattcgacaaatgatgtttccgtcctgccttgtggtcataccattcatgtaaagtgcctgaaagaaatggaagagcactgccagtttgcatgccccctttgctccaagtcggtttgtgacatgtcgaaggcatgggaaaggctcgacatggagctggcaactctgtctgactcctgtgatcacaaaatggtccgcatattatgcaacgactgcggggcaatatcagatgtgcagttccatttgattgcgcacaagtgccagaattgcaagtcatacaacacccgccagatttgaagtaagaatcgcaagtcacacaacaccgtcagatctgaaatagcaaatcctgtgggggtttctgcatttcttcaagaagcgtgatggactgatggccccttcccgtgagctgctgagcaccgggatgtctggcaagacactcatcactgtatccactccactgggtcctgcggaggcaaacagctcgagattgtatatctgctgctagctgccgcccttcgttatgcataagcctactcttgccgttttactcctgtcgctccgtgattctagtgtaataatgttatatttagtgctgcttcaagcgtacggctgcggttgaacggcggcggcggctgctgagccacagtaccttgctgttgctgagactgcacccagccacagtgcgccgccgccgcagcagcttgtagctggactttatgaaggtgcctttgttccgcaaggaagagttcttggttgcgggtagctattaaggccatctccaatagatgtcctattatatcccttatttcatcctctatttcaaactttatataaatagtattaaatatctcatct

SEQ ID NO: 11136 - protein, 300 aa, Zea mays subsp. mays
  peptide (1)..(300): Ceres Seq. ID no. 13573192
  misc_feature (59)..(142): Pfam Name: CHY zinc finger Pfam Description: CHY zinc finger
  misc_feature (59)..(142): Pfam Name: CHY zinc finger Pfam Description: CHY zinc finger
  misc_feature (4)..(300): Homolog of NCBI NO: 34910658 NR Description: putative PGPD14 protein (pollen germination
  misc_feature (37)..(299): Homolog of NCBI NO: 4105798 NR Description: PGPD14 [Petunia x hybrida]
  misc_feature (40)..(300): Homolog of NCBI NO: 15237169 NR Description: PGPD14 protein [Arabidopsis thaliana] PGPD14 protein [Arabidopsis thaliana] >gi|15450521|gb|AAK96553.1| [Arabidopsis thaliana] >gi|27363264|gb|AAO11551.1|
  misc_feature (51)..(300): Homolog of NCBI NO: 21593716 NR Description: PGPD14 protein [Arabidopsis thaliana]
  misc_feature (57)..(299): Homolog of NCBI NO: 37535002 NR Description: putative PGPD14 protein (pollen germination
  misc_feature (37)..(299): Homolog of NCBI NO: 4105798 NR Description: PGPD14 [Petunia x hybrida]
  misc_feature (51)..(300): Homolog of NCBI NO: 21593716 NR Description: PGPD14 protein [Arabidopsis thaliana]
  misc_feature (6)..(299): Homolog of NCBI NO: 24582224 NR Description: CG16947-PA [Drosophila melanogaster]
  misc_feature (26)..(300): Homolog of NCBI NO: 11358168 NR Description: hypothetical protein T20O10.70 - Arabidopsis >gi|7573426|emb|CAB87742.1| putative protein [Arabidopsis
  misc_feature (53)..(300): Homolog of NCBI NO: 30102616 NR Description: At3g62970 [Arabidopsis thaliana]
  misc_feature (26)..(300): Homolog of NCBI NO: 30695702 NR Description: expressed protein [Arabidopsis thaliana]
  misc_feature (42)..(300): Homolog of NCBI NO: 15238890 NR Description: expressed protein [Arabidopsis thaliana] unknown protein [Arabidopsis thaliana]
  misc_feature (57)..(299): Homolog of NCBI NO: 37535002 NR Description: putative PGPD14 protein (pollen germination
  misc_feature (40)..(300): Homolog of NCBI NO: 15237169 NR Description: PGPD14 protein [Arabidopsis thaliana] PGPD14 protein [Arabidopsis thaliana] >gi|15450521|gb|AAK96553.1| [Arabidopsis thaliana] >gi|27363264|gb|AAO11551.1|
  misc_feature (4)..(300): Homolog of NCBI NO: 34910658 NR Description: putative PGPD14 protein (pollen germination
  misc_feature (42)..(300): Homolog of NCBI NO: 15238890 NR Description: expressed protein [Arabidopsis thaliana] unknown protein [Arabidopsis thaliana]
  misc_feature (26)..(300): Homolog of NCBI NO: 30695702 NR Description: expressed protein [Arabidopsis thaliana]
  misc_feature (53)..(300): Homolog of NCBI NO: 30102616 NR Description: At3g62970 [Arabidopsis thaliana]
  misc_feature (26)..(300): Homolog of NCBI NO: 11358168 NR Description: hypothetical protein T20O10.70 - Arabidopsis >gi|7573426|emb|CAB87742.1| putative protein [Arabidopsis
  misc_feature (6)..(299): Homolog of NCBI NO: 24582224 NR Description: CG16947-PA [Drosophila melanogaster]
MGALDLHLDFASAQHGQAKLKEYAKSSLLSDGNYNTDKINGSNPDDYEKFEKGIMHYGCPHYRRRCRIRAPCCNEIFDCRHCHNETKNSIKIDKMKRHELPRHEVQQVVCSLCGTEQEVRQVCINCGVCMGKYFCGLCKLFDDDVSKQQYHCNGCGICRIGGRENFFHCSKCGCCYSIALKNSHACVEGAMHHDCPICFEYLFDSTNDVSVLPCGHTIHVKCLKEMEEHCQFACPLCSKSVCDMSKAWERLDMELATLSDSCDHKMVRILCNDCGAISDVQFHLIAHKCQNCKSYNTRQI

SEQ ID NO: 11137 - protein, 246 aa, Zea mays subsp. mays
  peptide (1)..(246): Ceres Seq. ID no. 13573193
  misc_feature (5)..(88): Pfam Name: CHY zinc finger Pfam Description: CHY zinc finger
  misc_feature (5)..(88): Pfam Name: CHY zinc finger Pfam Description: CHY zinc finger
  misc_feature (1)..(246): Homolog of NCBI NO: 34910658 NR Description: putative PGPD14 protein (pollen germination
  misc_feature (1)..(245): Homolog of NCBI NO: 4105798 NR Description: PGPD14 [Petunia x hybrida]
  misc_feature (1)..(246): Homolog of NCBI NO: 15237169 NR Description: PGPD14 protein [Arabidopsis thaliana] PGPD14 protein [Arabidopsis thaliana] >gi|15450521|gb|AAK96553.1| [Arabidopsis thaliana] >gi|27363264|gb|AAO11551.1|
  misc_feature (1)..(246): Homolog of NCBI NO: 21593716 NR Description: PGPD14 protein [Arabidopsis thaliana]
  misc_feature (3)..(245): Homolog of NCBI NO: 37535002 NR Description: putative PGPD14 protein (pollen germination
  misc_feature (1)..(245): Homolog of NCBI NO: 4105798 NR Description: PGPD14 [Petunia x hybrida]
  misc_feature (1)..(246): Homolog of NCBI NO: 21593716 NR Description: PGPD14 protein [Arabidopsis thaliana]
  misc_feature (1)..(245): Homolog of NCBI NO: 24582224 NR Description: CG16947-PA [Drosophila melanogaster]
  misc_feature (1)..(246): Homolog of NCBI NO: 11358168 NR Description: hypothetical protein T20O10.70 - Arabidopsis >gi|7573426|emb|CAB87742.1| putative protein [Arabidopsis
  misc_feature (1)..(246): Homolog of NCBI NO: 30102616 NR Description: At3g62970 [Arabidopsis thaliana]
  misc_feature (1)..(246): Homolog of NCBI NO: 30695702 NR Description: expressed protein [Arabidopsis thaliana]
  misc_feature (1)..(246): Homolog of NCBI NO: 15238890 NR Description: expressed protein [Arabidopsis thaliana] unknown protein [Arabidopsis thaliana]
  misc_feature (3)..(245): Homolog of NCBI NO: 37535002 NR Description: putative PGPD14 protein (pollen germination
  misc_feature (1)..(246): Homolog of NCBI NO: 15237169 NR Description: PGPD14 protein [Arabidopsis thaliana] PGPD14 protein [Arabidopsis thaliana] >gi|15450521|gb|AAK96553.1| [Arabidopsis thaliana] >gi|27363264|gb|AAO11551.1|
  misc_feature (1)..(246): Homolog of NCBI NO: 34910658 NR Description: putative PGPD14 protein (pollen germination
  misc_feature (1)..(246): Homolog of NCBI NO: 15238890 NR Description: expressed protein [Arabidopsis thaliana] unknown protein [Arabidopsis thaliana]
  misc_feature (1)..(246): Homolog of NCBI NO: 30695702 NR Description: expressed protein [Arabidopsis thaliana]
  misc_feature (1)..(246): Homolog of NCBI NO: 30102616 NR Description: At3g62970 [Arabidopsis thaliana]
  misc_feature (1)..(246): Homolog of NCBI NO: 11358168 NR Description: hypothetical protein T20O10.70 - Arabidopsis >gi|7573426|emb|CAB87742.1| putative protein [Arabidopsis
  misc_feature (1)..(245): Homolog of NCBI NO: 24582224 NR Description: CG16947-PA [Drosophila melanogaster]
MHYGCPHYRRRCRIRAPCCNEIFDCRHCHNETKNSIKIDKMKRHELPRHEVQQVVCSLCGTEQEVRQVCINCGVCMGKYFCGLCKLFDDDVSKQQYHCNGCGICRIGGRENFFHCSKCGCCYSIALKNSHACVEGAMHHDCPICFEYLFDSTNDVSVLPCGHTIHVKCLKEMEEHCQFACPLCSKSVCDMSKAWERLDMELATLSDSCDHKMVRILCNDCGAISDVQFHLIAHKCQNCKSYNTRQI

SEQ ID NO: 11138 - protein, 206 aa, Zea mays subsp. mays
  peptide (1)..(206): Ceres Seq. ID no. 13573194
  misc_feature (101)..(143): Pfam Name: Zinc finger, C3HC4 type (RING finger) Pfam Description: Zinc finger, C3HC4 type (RING finger)
  misc_feature (101)..(143): Pfam Name: Zinc finger, C3HC4 type (RING finger) Pfam Description: Zinc finger, C3HC4 type (RING finger)
  misc_feature (1)..(206): Homolog of NCBI NO: 34910658 NR Description: putative PGPD14 protein (pollen germination
  misc_feature (1)..(205): Homolog of NCBI NO: 4105798 NR Description: PGPD14 [Petunia x hybrida]
  misc_feature (1)..(206): Homolog of NCBI NO: 15237169 NR Description: PGPD14 protein [Arabidopsis thaliana] PGPD14 protein [Arabidopsis thaliana] >gi|15450521|gb|AAK96553.1| [Arabidopsis thaliana] >gi|27363264|gb|AAO11551.1|
  misc_feature (1)..(206): Homolog of NCBI NO: 21593716 NR Description: PGPD14 protein [Arabidopsis thaliana]
  misc_feature (1)..(205): Homolog of NCBI NO: 37535002 NR Description: putative PGPD14 protein (pollen germination
  misc_feature (1)..(205): Homolog of NCBI NO: 4105798 NR Description: PGPD14 [Petunia x hybrida]
  misc_feature (1)..(206): Homolog of NCBI NO: 21593716 NR Description: PGPD14 protein [Arabidopsis thaliana]
  misc_feature (1)..(205): Homolog of NCBI NO: 24582224 NR Description: CG16947-PA [Drosophila melanogaster]
  misc_feature (1)..(206): Homolog of NCBI NO: 11358168 NR Description: hypothetical protein T20O10.70 - Arabidopsis >gi|7573426|emb|CAB87742.1| putative protein [Arabidopsis
  misc_feature (1)..(206): Homolog of NCBI NO: 30102616 NR Description: At3g62970 [Arabidopsis thaliana]
  misc_feature (1)..(206): Homolog of NCBI NO: 30695702 NR Description: expressed protein [Arabidopsis thaliana]
  misc_feature (1)..(206): Homolog of NCBI NO: 15238890 NR Description: expressed protein [Arabidopsis thaliana] unknown protein [Arabidopsis thaliana]
  misc_feature (1)..(205): Homolog of NCBI NO: 37535002 NR Description: putative PGPD14 protein (pollen germination
  misc_feature (1)..(206): Homolog of NCBI NO: 15237169 NR Description: PGPD14 protein [Arabidopsis thaliana] PGPD14 protein [Arabidopsis thaliana] >gi|15450521|gb|AAK96553.1| [Arabidopsis thaliana] >gi|27363264|gb|AAO11551.1|
  misc_feature (1)..(206): Homolog of NCBI NO: 34910658 NR Description: putative PGPD14 protein (pollen germination
  misc_feature (1)..(206): Homolog of NCBI NO: 15238890 NR Description: expressed protein [Arabidopsis thaliana] unknown protein [Arabidopsis thaliana]
  misc_feature (1)..(206): Homolog of NCBI NO: 30695702 NR Description: expressed protein [Arabidopsis thaliana]
  misc_feature (1)..(206): Homolog of NCBI NO: 30102616 NR Description: At3g62970 [Arabidopsis thaliana]
  misc_feature (1)..(206): Homolog of NCBI NO: 11358168 NR Description: hypothetical protein T20O10.70 - Arabidopsis >gi|7573426|emb|CAB87742.1| putative protein [Arabidopsis
  misc_feature (1)..(205): Homolog of NCBI NO: 24582224 NR Description: CG16947-PA [Drosophila melanogaster]
MKRHELPRHEVQQVVCSLCGTEQEVRQVCINCGVCMGKYFCGLCKLFDDDVSKQQYHCNGCGICRIGGRENFFHCSKCGCCYSIALKNSHACVEGAMHHDCPICFEYLFDSTNDVSVLPCGHTIHVKCLKEMEEHCQFACPLCSKSVCDMSKAWERLDMELATLSDSCDHKMVRILCNDCGAISDVQFHLIAHKCQNCKSYNTRQI

SEQ ID NO: 11139 - DNA, 691 bp, Zea mays subsp. mays
  misc_feature (1)..(691): Ceres Seq. ID no. 12358105
  misc_feature: MA Experiment ID: 108535 Result: Up-regulated in Transcription
  misc_feature: MA Experiment 108535 PARAMETER Experiment Name: Zm_Meristem_P Parameter: Age (day) Value: 8
  misc_feature: MA Experiment 108535 PARAMETER Experiment Name: Zm_Meristem_P Parameter: Organism Value: Zea mays
  misc_feature: MA Experiment 108535 PARAMETER Experiment Name: Zm_Meristem_P Parameter: Plant Line Value: 35A19
  misc_feature: MA Experiment 108535 PARAMETER Experiment Name: Zm_Meristem_P Parameter: Tissue Value: Root Meristem vs. Above Root Meristem
  misc_feature: MA Experiment ID: 20000487 Result: Up-regulated in Transcription
  misc_feature: MA Experiment 20000487 PARAMETER Experiment Name: Zm_50mM_NH4NO3_L_to_H_P Parameter: Organism Value: Zea mays
  misc_feature: MA Experiment 20000487 PARAMETER Experiment Name: Zm_50mM_NH4NO3_L_to_H_P Parameter: Timepoint (hr) Value: 4
  misc_feature: MA Experiment 20000487 PARAMETER Experiment Name: Zm_50mM_NH4NO3_L_to_H_P Parameter: Tissue Value: Leaves
  misc_feature: MA Experiment 20000487 PARAMETER Experiment Name: Zm_50mM_NH4NO3_L_to_H_P Parameter: Treatment Value: 50mM NH4NO3 vs. 100mM Mannitol
  misc_feature: MA Experiment ID: 20001606 Result: Up-regulated in Transcription
  misc_feature: MA Experiment 20001606 PARAMETER Experiment Name: Zm_50ppm_KNO3_L-to-H_P Parameter: Age (day) Value: 19
  misc_feature: MA Experiment 20001606 PARAMETER Experiment Name: Zm_50ppm_KNO3_L-to-H_P Parameter: Organism Value: Zea mays
  misc_feature: MA Experiment 20001606 PARAMETER Experiment Name: Zm_50ppm_KNO3_L-to-H_P Parameter: Plant Line Value: 35A19
  misc_feature: MA Experiment 20001606 PARAMETER Experiment Name: Zm_50ppm_KNO3_L-to-H_P Parameter: Timepoint (hr) Value: 8
  misc_feature: MA Experiment 20001606 PARAMETER Experiment Name: Zm_50ppm_KNO3_L-to-H_P Parameter: Tissue Value: Shoots
  misc_feature: MA Experiment 20001606 PARAMETER Experiment Name: Zm_50ppm_KNO3_L-to-H_P Parameter: Treatment Value: 50ppm KNO3 vs. 50ppm KCl
gtttgctccccctccctcacccgcctccactcccccctcccaggcgctgcccaggtaagtcggcggcggcgatgacaacgcgcttcaagaagaaccgcaagaagcgcggccacgtgtccgccgggcacggccgcatcggcaagcacaggaagcacccgggaggtcgcggtaacgccggtggcatgcaccaccaccgtatcctcttcgacaagtaccatccgggctacttcggcaaggttggcatgcgttacttccataagctccgcaacaagttctactgccccgcggtcaacatcgagcgcctctggtcgatggtgcccgccgacaaggcggcggaggccggcctcgacaaggccccgcagatcgacgtcacgcagttcggctacttcaaggtgctcgggaagggggtgctgccgcccaagcccattgtcgtcaaggccaagctcatctccaaggtcgccgagaagaagatcaaggcagcaggcggggccgtcgtgctcaccgcctaggtttcagtccttgttcgcctcctggttttgaaatctatatctgaactgatagtgctttcctgtctcagcaatttgtgttaagaaaacctgtagttttaaaatatgtggttcctgcctgttgggcagtgcttatgcggtttttgatgccagttcatatcaaatatttcacatcaattaaatcc

SEQ ID NO: 11140 - protein, 168 aa, Zea mays subsp. mays
  peptide (1)..(168): Ceres Seq. ID no. 12358106
  misc_feature (130)..(162): Pfam Name: Ribosomal protein L15 Pfam Description: Ribosomal protein L15
  misc_feature (24)..(168): Homolog of NCBI NO: 30017566 NR Description: putative ribosomal protein L27a [Oryza sativa
  misc_feature (24)..(168): Homolog of NCBI NO: 23237917 NR Description: putative 60S ribosomal protein L27a [Oryza sativa
  misc_feature (24)..(168): Homolog of NCBI NO: 15223190 NR Description: 60S ribosomal protein L27A; protein id: supported by cDNA: 15789., supported by cDNA: gi_14517369, by cDNA: gi_15081671, supported by cDNA: gi_20147176 [Arabidopsis
  misc_feature (24)..(168): Homolog of NCBI NO: 3608481 NR Description: ribosomal protein L27a [Petunia x hybrida]
  misc_feature (24)..(168): Homolog of NCBI NO: 21553702 NR Description: 60S ribosomal protein L27A [Arabidopsis thaliana]
  misc_feature (24)..(168): Homolog of NCBI NO: 7959355 NR Description: 60S ribosomal protein L27a [Panax ginseng]
  misc_feature (24)..(168): Homolog of NCBI NO: 15220698 NR Description: 60s ribosomal protein l27a.; protein id: supported by cDNA: 23092., supported by cDNA: gi_13194819, by cDNA: gi_13265579, supported by cDNA: gi_15294177 [Arabidopsis
  misc_feature (26)..(168): Homolog of NCBI NO: 22758850 NR Description: ribosomal protein L22 [Argopecten irradians]
  misc_feature (24)..(168): Homolog of NCBI NO: 1350711 NR Description: 60S RIBOSOMAL PROTEIN L27A
  misc_feature (24)..(168): Homolog of NCBI NO: 23612262 NR Description: 60S ribosomal protein L27a, putative [Plasmodium
LLPLPHPPPLPPPRRCPGKSAAAMTTRFKKNRKKRGHVSAGHGRIGKHRKHPGGRGNAGGMHHHRILFDKYHPGYFGKVGMRYFHKLRNKFYCPAVNIERLWSMVPADKAAEAGLDKAPQIDVTQFGYFKVLGKGVLPPKPIVVKAKLISKVAEKKIKAAGGAVVLTA

SEQ ID NO: 11141 - protein, 145 aa, Zea mays subsp. mays
  peptide (1)..(145): Ceres Seq. ID no. 12358107
  misc_feature (107)..(139): Pfam Name: Ribosomal protein L15 Pfam Description: Ribosomal protein L15
  misc_feature (1)..(145): Homolog of NCBI NO: 30017566 NR Description: putative ribosomal protein L27a [Oryza sativa
  misc_feature (1)..(145): Homolog of NCBI NO: 23237917 NR Description: putative 60S ribosomal protein L27a [Oryza sativa
  misc_feature (1)..(145): Homolog of NCBI NO: 15223190 NR Description: 60S ribosomal protein L27A; protein id: supported by cDNA: 15789., supported by cDNA: gi_14517369, by cDNA: gi_15081671, supported by cDNA: gi_20147176 [Arabidopsis
  misc_feature (1)..(145): Homolog of NCBI NO: 3608481 NR Description: ribosomal protein L27a [Petunia x hybrida]
  misc_feature (1)..(145): Homolog of NCBI NO: 21553702 NR Description: 60S ribosomal protein L27A [Arabidopsis thaliana]
  misc_feature (1)..(145): Homolog of NCBI NO: 7959355 NR Description: 60S ribosomal protein L27a [Panax ginseng]
  misc_feature (1)..(145): Homolog of NCBI NO: 15220698 NR Description: 60s ribosomal protein l27a.; protein id: supported by cDNA: 23092., supported by cDNA: gi_13194819, by cDNA: gi_13265579, supported by cDNA: gi_15294177 [Arabidopsis
  misc_feature (3)..(145): Homolog of NCBI NO: 22758850 NR Description: ribosomal protein L22 [Argopecten irradians]
  misc_feature (1)..(145): Homolog of NCBI NO: 1350711 NR Description: 60S RIBOSOMAL PROTEIN L27A
  misc_feature (1)..(145): Homolog of NCBI NO: 23612262 NR Description: 60S ribosomal protein L27a, putative [Plasmodium
MTTRFKKNRKKRGHVSAGHGRIGKHRKHPGGRGNAGGMHHHRILFDKYHPGYFGKVGMRYFHKLRNKFYCPAVNIERLWSMVPADKAAEAGLDKAPQIDVTQFGYFKVLGKGVLPPKPIVVKAKLISKVAEKKIKAAGGAVVLTA

SEQ ID NO: 11142 - protein, 108 aa, Zea mays subsp. mays
  peptide (1)..(108): Ceres Seq. ID no. 12358108
  misc_feature (70)..(102): Pfam Name: Ribosomal protein L15 Pfam Description: Ribosomal protein L15
  misc_feature (1)..(108): Homolog of NCBI NO: 30017566 NR Description: putative ribosomal protein L27a [Oryza sativa
  misc_feature (1)..(108): Homolog of NCBI NO: 23237917 NR Description: putative 60S ribosomal protein L27a [Oryza sativa
  misc_feature (1)..(108): Homolog of NCBI NO: 15223190 NR Description: 60S ribosomal protein L27A; protein id: supported by cDNA: 15789., supported by cDNA: gi_14517369, by cDNA: gi_15081671, supported by cDNA: gi_20147176 [Arabidopsis
  misc_feature (1)..(108): Homolog of NCBI NO: 3608481 NR Description: ribosomal protein L27a [Petunia x hybrida]
  misc_feature (1)..(108): Homolog of NCBI NO: 21553702 NR Description: 60S ribosomal protein L27A [Arabidopsis thaliana]
  misc_feature (1)..(108): Homolog of NCBI NO: 7959355 NR Description: 60S ribosomal protein L27a [Panax ginseng]
  misc_feature (1)..(108): Homolog of NCBI NO: 15220698 NR Description: 60s ribosomal protein l27a.; protein id: supported by cDNA: 23092., supported by cDNA: gi_13194819, by cDNA: gi_13265579, supported by cDNA: gi_15294177 [Arabidopsis
  misc_feature (1)..(108): Homolog of NCBI NO: 22758850 NR Description: ribosomal protein L22 [Argopecten irradians]
  misc_feature (1)..(108): Homolog of NCBI NO: 1350711 NR Description: 60S RIBOSOMAL PROTEIN L27A
  misc_feature (1)..(108): Homolog of NCBI NO: 23612262 NR Description: 60S ribosomal protein L27a, putative [Plasmodium
MHHHRILFDKYHPGYFGKVGMRYFHKLRNKFYCPAVNIERLWSMVPADKAAEAGLDKAPQIDVTQFGYFKVLGKGVLPPKPIVVKAKLISKVAEKKIKAAGGAVVLTA

SEQ ID NO: 11143 - DNA, 683 bp, Zea mays subsp. mays
  misc_feature (1)..(683): Ceres Seq. ID no. 12403959
  misc_feature: MA Experiment ID: 108535 Result: Up-regulated in Transcription
  misc_feature: MA Experiment 108535 PARAMETER Experiment Name: Zm_Meristem_P Parameter: Age (day) Value: 8
  misc_feature: MA Experiment 108535 PARAMETER Experiment Name: Zm_Meristem_P Parameter: Organism Value: Zea mays
  misc_feature: MA Experiment 108535 PARAMETER Experiment Name: Zm_Meristem_P Parameter: Plant Line Value: 35A19
  misc_feature: MA Experiment 108535 PARAMETER Experiment Name: Zm_Meristem_P Parameter: Tissue Value: Root Meristem vs. Above Root Meristem
  misc_feature: MA Experiment ID: 108544 Result: Down-regulated in Transcription
  misc_feature: MA Experiment ID: 20000487 Result: Up-regulated in Transcription
  misc_feature: MA Experiment 20000487 PARAMETER Experiment Name: Zm_50mM_NH4NO3_L_to_H_P Parameter: Organism Value: Zea mays
  misc_feature: MA Experiment 20000487 PARAMETER Experiment Name: Zm_50mM_NH4NO3_L_to_H_P Parameter: Timepoint (hr) Value: 4
  misc_feature: MA Experiment 20000487 PARAMETER Experiment Name: Zm_50mM_NH4NO3_L_to_H_P Parameter: Tissue Value: Leaves
  misc_feature: MA Experiment 20000487 PARAMETER Experiment Name: Zm_50mM_NH4NO3_L_to_H_P Parameter: Treatment Value: 50mM NH4NO3 vs. 100mM Mannitol
  misc_feature: MA Experiment ID: 20000488 Result: Up-regulated in Transcription
  misc_feature: MA Experiment 20000488 PARAMETER Experiment Name: Zm_50mM_NH4NO3_L_to_H_P Parameter: Organism Value: Zea mays
  misc_feature: MA Experiment 20000488 PARAMETER Experiment Name: Zm_50mM_NH4NO3_L_to_H_P Parameter: Timepoint (hr) Value: 8
  misc_feature: MA Experiment 20000488 PARAMETER Experiment Name: Zm_50mM_NH4NO3_L_to_H_P Parameter: Tissue Value: Leaves
  misc_feature: MA Experiment 20000488 PARAMETER Experiment Name: Zm_50mM_NH4NO3_L_to_H_P Parameter: Treatment Value: 50mM NH4NO3 vs. 100mM Mannitol
  misc_feature: MA Experiment ID: 20000534 Result: Down-regulated in Transcription
  misc_feature: MA Experiment 20000534 PARAMETER Experiment Name: Zm_Hybrid_Pollen_P Parameter: Age (day) Value: 8
  misc_feature: MA Experiment 20000534 PARAMETER Experiment Name: Zm_Hybrid_Pollen_P Parameter: Organism Value: Zea mays
  misc_feature: MA Experiment 20000534 PARAMETER Experiment Name: Zm_Hybrid_Pollen_P Parameter: Plant Line Value: 35A19
  misc_feature: MA Experiment 20000534 PARAMETER Experiment Name: Zm_Hybrid_Pollen_P Parameter: Tissue Value: Pollen vs. Aerial
acctgagacctagaaccctcttccccctcgatggccgtagggagcggcggcggctcgcggcgcgcgcgtccgaacgtgctagtgacggggacgccggggacggggaagacgacaacgtgctcgctccttgccgacgccgcaggcctccgccacgtcaacatcggcgacctcgtccgcgagaagagcctccacgacggctgggacgccgacctcgagtgccatgtcatcaacgaggacctggtgtgcgacgagcttgaggacatgatggaagaaggtggcatactagtagattaccacggatgtgatttctttccagaacgttggtttgacctcgtagttgtgctccagactgacaactcaattctgcatgatcgcctgacggaggttacatgggttccaaactcgccaacaacatagagtgcgaaatcttccaagtgctcctcgaggaggcgagggagagctacagagaggacatcgtgatgccattgcgaagtgacaacgtggaggatattagtaggaacgtaggtgcactgacagactgggtaaacaattggagacctagttagacctgtcaaaagaaatgttgccttatgtgttgtatttggatatgtattgggtggaccagctgccatgtttgtaatgtacggggtgttttggttaaagaaacgaagtcgttcatcctt

SEQ ID NO: 11144 - protein, 128 aa, Zea mays subsp. mays
  peptide (1)..(128): Ceres Seq. ID no. 12403960
  misc_feature (6)..(117): Homolog of NCBI NO: 34395293 NR Description: putative adrenal gland protein AD-004 [Oryza
  misc_feature (6)..(70): Homolog of NCBI NO: 34902744 NR Description: hypothetical protein~similar to Arabidopsis
  misc_feature (71)..(117): Homolog of NCBI NO: 34902744 NR Description: hypothetical protein~similar to Arabidopsis
  misc_feature (1)..(117): Homolog of NCBI NO: 10177726 NR Description: gene_id:K9B18.5~ref|NP_057367.1~similar to protein [Arabidopsis thaliana] >gi|19310480|gb|AAL84974.1| [Arabidopsis thaliana] >gi|20147317|gb|AAM10372.1|
  misc_feature (14)..(116): Homolog of NCBI NO: 7706212 NR Description: adrenal gland protein AD-004; TAF9 RNA polymerase
  misc_feature (14)..(116): Homolog of NCBI NO: 33303797 NR Description: TAF9 RNA polymerase II, TATA box binding protein
  misc_feature (14)..(116): Homolog of NCBI NO: 28076975 NR Description: RIKEN cDNA 4921516M08 [Mus musculus]
  misc_feature (14)..(116): Homolog of NCBI NO: 34853506 NR Description: similar to RIKEN cDNA 4921516M08 [Rattus
  misc_feature (14)..(116): Homolog of NCBI NO: 6457370 NR Description: unknown protein [Oryctolagus sp.]
  misc_feature (1)..(127): Homolog of NCBI NO: 15239296 NR Description: putative protein; protein id: At5g60340.1
MAVGSGGGSRRARPNVLVTGTPGTGKTTTCSLLADAAGLRHVNIGDLVREKSLHDGWDADLECHVINEDLVCDELEDMMEEGGILVDYHGCDFFPERWFDLVVVLQTDNSILHDRLTEVTWVPNSPTT

SEQ ID NO: 11145 - protein, 84 aa, Zea mays subsp. mays
  peptide (1)..(84): Ceres Seq. ID no. 12403961
LRPRTLFPLDGRRERRRLAARASERASDGDAGDGEDDNVLAPCRRRRPPPRQHRRPRPREEPPRRLGRRPRVPCHQRGPGVRRA

SEQ ID NO: 11146 - DNA, 1055 bp, Zea mays subsp. mays
  misc_feature (1)..(1055): Ceres Seq. ID no. 12351694
  misc_feature: MA Experiment ID: 108547 Result: Up-regulated in Transcription
  misc_feature: MA Experiment 108547 PARAMETER Experiment Name: Zm_Imbibed_Seeds_P Parameter: Age (day) Value: 4 vs. 2
  misc_feature: MA Experiment 108547 PARAMETER Experiment Name: Zm_Imbibed_Seeds_P Parameter: Organism Value: Zea mays
  misc_feature: MA Experiment 108547 PARAMETER Experiment Name: Zm_Imbibed_Seeds_P Parameter: Plant Line Value: 35A19
  misc_feature: MA Experiment 108547 PARAMETER Experiment Name: Zm_Imbibed_Seeds_P Parameter: Tissue Value: Aerial vs. Embryo
attctccactgcctccagcaagtgttctaaaatctgaatggcatcttgctcctctgtccacgccgcaccatcgctcctcgtctcggcgccgcctagtaggcggcgcacaagtacggccgtatgtcttcagggtgttcgccgcggcagggtcgcgtcctgccgcgtgcggtgtagcgccggggccgggcagggcggggtcaaggtccctgcgaagctggcggagctgtggtcggcggcgaagagcgcgcctcccctggccgtgctcgcgggtgtggcggcggcggtggcgatatacaaggtcgggtccagtctccttgcgccgcgccatcccccgccccgtcggctggaggcccagacggccccgccgcctccagtcccggagccggtgcaggtgggcgagataacggaggaggaactacggcagtacgacggggtccgaccccgagaaaccgctgctgatggccatcaaggggcagatctatgacgtctcagagagcaggatgttctatggacctggcgcagcttatgctctgtttgctggtaaagatgccagtagggcattggctaagatgtcctttgaatcacaggatctgaatggtgatatatctggtctaacgccaatggagctcggcgccttgaatgactgggagtacaagttcgccaccaagtatgcgaaggtaggaaccataagaagagcagcgcccgtcgaagtggtttatggcaacatttcgcctgaaatgagggaagaagttagtgaacctgtggttgaacctgagcttgagcctgagcccgagcctgagccgcatgacgacgatgcaccatgaataggaaaaacacaaagacatcagttcgggtaggaagatgaaatggagggcggcacactgcttataatgttccagaggtagtcagaatttcgaaataatgaaaagcctcataggctcgtacttgttgcgtggatattcagaaagaatagtgtctaaatttaaaccaatagtagatgtgtactctgtagtaggattgaattgttggatatgtacatgtcattcttctatttt

SEQ ID NO: 11147 - protein, 148 aa, Zea mays subsp. mays
  peptide (1)..(148): Ceres Seq. ID no. 12351695
  misc_feature (1)..(137): Homolog of NCBI NO: 37535794 NR Description: putative steroid membrane binding protein [Oryza
  misc_feature (58)..(137): Homolog of NCBI NO: 37535798 NR Description: putative steroid membrane binding protein [Oryza
  misc_feature (62)..(137): Homolog of NCBI NO: 4960156 NR Description: putative progesterone-binding protein homolog
  misc_feature (62)..(137): Homolog of NCBI NO: 15242943 NR Description: progesterone-binding protein-like; protein id: supported by cDNA: 28003., supported by cDNA: gi_15028112,
  misc_feature (60)..(132): Homolog of NCBI NO: 4960154 NR Description: putative progesterone-binding protein homolog
  misc_feature (60)..(132): Homolog of NCBI NO: 15229044 NR Description: putative progesterone-binding protein homolog protein id: At3g48890.1, supported by cDNA: gi_16930426, by cDNA: gi_19310508, supported by cDNA: gi_4960153 [Arabidopsis
  misc_feature (66)..(137): Homolog of NCBI NO: 38637200 NR Description: steroid membrane binding protein-like [Oryza
MASCSSVHAAPSLLVSAPPSRRRTSTAVCLQGVRRGRVASCRVRCSAGAGQGGVKVPAKLAELWSAAKSAPPLAVLAGVAAAVAIYKVGSSLLAPRHPPPRRLEAQTAPPPPVPEPVQVGEITEEELRQYDGVRPRETAADGHQGADL

SEQ ID NO: 11148 - protein, 133 aa, Zea mays subsp. mays
  peptide (1)..(133): Ceres Seq. ID no. 12351696
  misc_feature (95)..(133): Homolog of NCBI NO: 13384818 NR Description: RIKEN cDNA 1110060M21 [Mus musculus] unnamed protein product [Mus musculus] unnamed protein product [Mus musculus]
SPLPPASVLKSEWHLAPLSTPHHRSSSRRRLVGGAQVRPYVFRVFAAAGSRPAACGVAPGPGRAGSRSLRSWRSCGRRRRARLPWPCSRVWRRRWRYTRSGPVSLRRAIPRPVGWRPRRPRRLQSRSRCRWAR

SEQ ID NO: 11149 - protein, 121 aa, Zea mays subsp. mays
  peptide (1)..(121): Ceres Seq. ID no. 12351697
  misc_feature (1)..(78): Pfam Name: Cytochrome b5-like Heme/Steroid binding domain Pfam Description: Cytochrome b5-like Heme/Steroid binding domain
  misc_feature (1)..(79): Homolog of NCBI NO: 37535794 NR Description: putative steroid membrane binding protein [Oryza
  misc_feature (1)..(117): Homolog of NCBI NO: 37535798 NR Description: putative steroid membrane binding protein [Oryza
  misc_feature (1)..(121): Homolog of NCBI NO: 4960156 NR Description: putative progesterone-binding protein homolog
  misc_feature (1)..(121): Homolog of NCBI NO: 15242943 NR Description: progesterone-binding protein-like; protein id: supported by cDNA: 28003., supported by cDNA: gi_15028112,
  misc_feature (1)..(79): Homolog of NCBI NO: 4960154 NR Description: putative progesterone-binding protein homolog
  misc_feature (1)..(79): Homolog of NCBI NO: 15229044 NR Description: putative progesterone-binding protein homolog protein id: At3g48890.1, supported by cDNA: gi_16930426, by cDNA: gi_19310508, supported by cDNA: gi_4960153 [Arabidopsis
  misc_feature (1)..(77): Homolog of NCBI NO: 15224648 NR Description: putative steroid binding protein; protein id: supported by cDNA: 10261. [Arabidopsis thaliana]
  misc_feature (1)..(77): Homolog of NCBI NO: 40889041 NR Description: Chain A, Solution Structure Of A Putative
  misc_feature (1)..(117): Homolog of NCBI NO: 18859969 NR Description: CG9066-PA [Drosophila melanogaster]
  misc_feature (1)..(79): Homolog of NCBI NO: 13384818 NR Description: RIKEN cDNA 1110060M21 [Mus musculus] unnamed protein product [Mus musculus] unnamed protein product [Mus musculus]
MAIKGQIYDVSESRMFYGPGAAYALFAGKDASRALAKMSFESQDLNGDISGLTPMELGALNDWEYKFATKYAKVGTIRRAAPVEVVYGNISPEMREEVSEPVVEPELEPEPEPEPHDDDAP

SEQ ID NO: 11150 - DNA, 648 bp, Zea mays subsp. mays
  misc_feature (1)..(648): Ceres Seq. ID no. 12340573
  misc_feature: MA Experiment ID: 108535 Result: Down-regulated in Transcription
  misc_feature: MA Experiment 108535 PARAMETER Experiment Name: Zm_Meristem_P Parameter: Age (day) Value: 8
  misc_feature: MA Experiment 108535 PARAMETER Experiment Name: Zm_Meristem_P Parameter: Organism Value: Zea mays
  misc_feature: MA Experiment 108535 PARAMETER Experiment Name: Zm_Meristem_P Parameter: Plant Line Value: 35A19
  misc_feature: MA Experiment 108535 PARAMETER Experiment Name: Zm_Meristem_P Parameter: Tissue Value: Root Meristem vs. Above Root Meristem
cttcttcgcattgcctttcccttcagttgcaccgacctccagacgaaaccacccaagacgcgtgcttccattcctagcccaacagaagcgaagcacgccaccgaccaccggcctcgaagggatcatcttctctacaactcgtcctcgtggccttgttcctcctcttgtataggggactgcggcggagtggagatccgtgccgacatagtccgacttcttcgctcgctgcctacgattgatggcctcaccttcaccaaccgaagagttcagcagggaagcagctcgtcagtctctgatcgcgatctccgagtccactccggagacaccttcaccgcagacggtgaggacaccgccgatctccagcgcagagaacgggaagccgggcgatggggcggacaagttcagatcgaagctgatgtccatcacagacctgtcttctgatgcccaacctgcgcagtgccctcccgaggatgtcgctgcttaatcaatcgtgtgattctctgctcgacttgcggacacgatgtatcagtgcttgccgatcctctgaactggacatttggctgtcgtgctttaaactggacgtccttatggcttatgttattactggtcgtttttatttgataaataaatattcaggggaacgggtgc

SEQ ID NO: 11151 - protein, 146 aa, Zea mays subsp. mays
  peptide (1)..(146): Ceres Seq. ID no. 12340574
LLRIAFPFSCTDLQTKPPKTRASIPSPTEAKHATDHRPRRDHLLYNSSSWPCSSSCIGDCGGVEIRADIVRLLRSLPTIDGLTFTNRRVQQGSSSSVSDRDLRVHSGDTFTADGEDTADLQRREREAGRWGGQVQIEADVHHRPVF

SEQ ID NO: 11152 - protein, 81 aa, Zea mays subsp. mays; identical to SEQ ID NO: 10489
  peptide (1)..(81): Ceres Seq. ID no. 12340575
  misc_feature (1)..(81): Homolog of NCBI NO: 38346711 NR Description: OSJNBa0086O06.9 [Oryza sativa (japonica

SEQ ID NO: 11153 - DNA, 1784 bp, Zea mays subsp. mays; identical to SEQ ID NO: 9530
  misc_feature (1)..(1784): Ceres Seq. ID no. 12414416
  misc_feature: MA Experiment ID: 20000492 Result: Down-regulated in Transcription
  misc_feature: MA Experiment 20000492 PARAMETER Experiment Name: Zm_Hybrid_Seed_Dev_P Parameter: DAP Value: 12
  misc_feature: MA Experiment 20000492 PARAMETER Experiment Name: Zm_Hybrid_Seed_Dev_P Parameter: Organism Value: Zea mays
  misc_feature: MA Experiment 20000492 PARAMETER Experiment Name: Zm_Hybrid_Seed_Dev_P Parameter: Plant Line Value: 35A19
  misc_feature: MA Experiment 20000492 PARAMETER Experiment Name: Zm_Hybrid_Seed_Dev_P Parameter: Tissue Value: Fert Kernel vs. Unfert Floret

SEQ ID NO: 11154 - protein, 354 aa, Zea mays subsp. mays; identical to SEQ ID NO: 9531
  peptide (1)..(354): Ceres Seq. ID no. 12414417
  misc_feature (1)..(353): Homolog of NCBI NO: 34896140 NR Description: P0701D05.25 [Oryza sativa (japonica >gi|13486667|dbj|BAB39904.1| contains ESTs
  misc_feature (5)..(349): Homolog of NCBI NO: 22329373 NR Description: unknown protein; protein id: At1g06890.1, by cDNA: gi_19423945 [Arabidopsis thaliana] unknown protein [Arabidopsis thaliana]
  misc_feature (6)..(349): Homolog of NCBI NO: 27311731 NR Description: putative integral membrane protein [Arabidopsis
  misc_feature (6)..(323): Homolog of NCBI NO: 30683853 NR Description: transporter-related [Arabidopsis thaliana]
  misc_feature (5)..(335): Homolog of NCBI NO: 13384378 NR Description: putative phosphate translocator [Oryza sativa
  misc_feature (104)..(349): Homolog of NCBI NO: 25406945 NR Description: hypothetical protein [imported] - Arabidopsis >gi|7523696|gb|AAF63135.1|AC011001_5 Hypothetical protein
  misc_feature (104)..(335): Homolog of NCBI NO: 37535412 NR Description: putative
  misc_feature (5)..(82): Homolog of NCBI NO: 37535412 NR Description: putative
  misc_feature (6)..(331): Homolog of NCBI NO: 18411172 NR Description: expressed protein; protein id: At1g76670.1, by cDNA: gi_14532697, supported by cDNA: gi_16604379, supported cDNA: gi_18491194 [Arabidopsis thaliana] >gi|25354481|pir||A96795
  misc_feature (1)..(353): Homolog of NCBI NO: 13699188 NR Description: putative glucose-6-phosphate/phosphate-tranlocat
  misc_feature (1)..(353): Homolog of NCBI NO: 13699188 NR Description: putative glucose-6-phosphate/phosphate-tranlocat
  misc_feature (1)..(353): Homolog of NCBI NO: 34896140 NR Description: P0701D05.25 [Oryza sativa (japonica >gi|13486667|dbj|BAB39904.1| contains ESTs
  misc_feature (5)..(349): Homolog of NCBI NO: 22329373 NR Description: unknown protein; protein id: At1g06890.1, by cDNA: gi_19423945 [Arabidopsis thaliana] unknown protein [Arabidopsis thaliana]
  misc_feature (6)..(349): Homolog of NCBI NO: 27311731 NR Description: putative integral membrane protein [Arabidopsis
  misc_feature (6)..(323): Homolog of NCBI NO: 30683853 NR Description: transporter-related [Arabidopsis thaliana]
  misc_feature (5)..(335): Homolog of NCBI NO: 13384378 NR Description: putative phosphate translocator [Oryza sativa
  misc_feature (104)..(349): Homolog of NCBI NO: 25406945 NR Description: hypothetical protein [imported] - Arabidopsis >gi|7523696|gb|AAF63135.1|AC011001_5 Hypothetical protein
  misc_feature (104)..(335): Homolog of NCBI NO: 37535412 NR Description: putative
  misc_feature (5)..(82): Homolog of NCBI NO: 37535412 NR Description: putative
  misc_feature (6)..(331): Homolog of NCBI NO: 18411172 NR Description: expressed protein; protein id: At1g76670.1, by cDNA: gi_14532697, supported by cDNA: gi_16604379, supported cDNA: gi_18491194 [Arabidopsis thaliana] >gi|25354481|pir||A96795

SEQ ID NO: 11155 - protein, 321 aa, Zea mays subsp. mays; identical to SEQ ID NO: 9532
  peptide (1)..(321): Ceres Seq. ID no. 12414418
  misc_feature (1)..(320): Homolog of NCBI NO: 13699188 NR Description: putative glucose-6-phosphate/phosphate-tranlocat
  misc_feature (1)..(320): Homolog of NCBI NO: 34896140 NR Description: P0701D05.25 [Oryza sativa (japonica >gi|13486667|dbj|BAB39904.1| contains ESTs
  misc_feature (1)..(316): Homolog of NCBI NO: 22329373 NR Description: unknown protein; protein id: At1g06890.1, by cDNA: gi_19423945 [Arabidopsis thaliana] unknown protein [Arabidopsis thaliana]
  misc_feature (1)..(316): Homolog of NCBI NO: 27311731 NR Description: putative integral membrane protein [Arabidopsis
  misc_feature (1)..(290): Homolog of NCBI NO: 30683853 NR Description: transporter-related [Arabidopsis thaliana]
  misc_feature (1)..(302): Homolog of NCBI NO: 13384378 NR Description: putative phosphate translocator [Oryza sativa
  misc_feature (71)..(316): Homolog of NCBI NO: 25406945 NR Description: hypothetical protein [imported] - Arabidopsis >gi|7523696|gb|AAF63135.1|AC011001_5 Hypothetical protein
  misc_feature (71)..(302): Homolog of NCBI NO: 37535412 NR Description: putative
  misc_feature (1)..(49): Homolog of NCBI NO: 37535412 NR Description: putative
  misc_feature (1)..(298): Homolog of NCBI NO: 18411172 NR Description: expressed protein; protein id: At1g76670.1, by cDNA: gi_14532697, supported by cDNA: gi_16604379, supported cDNA: gi_18491194 [Arabidopsis thaliana] >gi|25354481|pir||A96795
  misc_feature (1)..(320): Homolog of NCBI NO: 13699188 NR Description: putative glucose-6-phosphate/phosphate-tranlocat
  misc_feature (1)..(320): Homolog of NCBI NO: 34896140 NR Description: P0701D05.25 [Oryza sativa (japonica >gi|13486667|dbj|BAB39904.1| contains ESTs
  misc_feature (1)..(316): Homolog of NCBI NO: 22329373 NR Description: unknown protein; protein id: At1g06890.1, by cDNA: gi_19423945 [Arabidopsis thaliana] unknown protein [Arabidopsis thaliana]
  misc_feature (1)..(316): Homolog of NCBI NO: 27311731 NR Description: putative integral membrane protein [Arabidopsis
  misc_feature (1)..(290): Homolog of NCBI NO: 30683853 NR Description: transporter-related [Arabidopsis thaliana]
  misc_feature (1)..(302): Homolog of NCBI NO: 13384378 NR Description: putative phosphate translocator [Oryza sativa
  misc_feature (71)..(316): Homolog of NCBI NO: 25406945 NR Description: hypothetical protein [imported] - Arabidopsis >gi|7523696|gb|AAF63135.1|AC011001_5 Hypothetical protein
  misc_feature (71)..(302): Homolog of NCBI NO: 37535412 NR Description: putative
  misc_feature (1)..(49): Homolog of NCBI NO: 37535412 NR Description: putative
  misc_feature (1)..(298): Homolog of NCBI NO: 18411172 NR Description: expressed protein; protein id: At1g76670.1, by cDNA: gi_14532697, supported by cDNA: gi_16604379, supported cDNA: gi_18491194 [Arabidopsis thaliana] >gi|25354481|pir||A96795

SEQ ID NO: 11156 - protein, 292 aa, Zea mays subsp. mays; identical to SEQ ID NO: 9533
  peptide (1)..(292): Ceres Seq. ID no. 12414419
  misc_feature (1)..(291): Homolog of NCBI NO: 13699188 NR Description: putative glucose-6-phosphate/phosphate-tranlocat
  misc_feature (1)..(291): Homolog of NCBI NO: 34896140 NR Description: P0701D05.25 [Oryza sativa (japonica >gi|13486667|dbj|BAB39904.1| contains ESTs
  misc_feature (1)..(287): Homolog of NCBI NO: 22329373 NR Description: unknown protein; protein id: At1g06890.1, by cDNA: gi_19423945 [Arabidopsis thaliana] unknown protein [Arabidopsis thaliana]
  misc_feature (1)..(287): Homolog of NCBI NO: 27311731 NR Description: putative integral membrane protein [Arabidopsis
  misc_feature (1)..(261): Homolog of NCBI NO: 30683853 NR Description: transporter-related [Arabidopsis thaliana]
  misc_feature (1)..(273): Homolog of NCBI NO: 13384378 NR Description: putative phosphate translocator [Oryza sativa
  misc_feature (42)..(287): Homolog of NCBI NO: 25406945 NR Description: hypothetical protein [imported] - Arabidopsis >gi|7523696|gb|AAF63135.1|AC011001_5 Hypothetical protein
  misc_feature (42)..(273): Homolog of NCBI NO: 37535412 NR Description: putative
  misc_feature (1)..(20): Homolog of NCBI NO: 37535412 NR Description: putative
  misc_feature (1)..(269): Homolog of NCBI NO: 18411172 NR Description: expressed protein; protein id: At1g76670.1, by cDNA: gi_14532697, supported by cDNA: gi_16604379, supported cDNA: gi_18491194 [Arabidopsis thaliana] >gi|25354481|pir||A96795
  misc_feature (1)..(291): Homolog of NCBI NO: 13699188 NR Description: putative glucose-6-phosphate/phosphate-tranlocat
  misc_feature (1)..(291): Homolog of NCBI NO: 34896140 NR Description: P0701D05.25 [Oryza sativa (japonica >gi|13486667|dbj|BAB39904.1| contains ESTs
  misc_feature (1)..(287): Homolog of NCBI NO: 22329373 NR Description: unknown protein; protein id: At1g06890.1, by cDNA: gi_19423945 [Arabidopsis thaliana] unknown protein [Arabidopsis thaliana]
  misc_feature (1)..(287): Homolog of NCBI NO: 27311731 NR Description: putative integral membrane protein [Arabidopsis
  misc_feature (1)..(261): Homolog of NCBI NO: 30683853 NR Description: transporter-related [Arabidopsis thaliana]
  misc_feature (1)..(273): Homolog of NCBI NO: 13384378 NR Description: putative phosphate translocator [Oryza sativa
  misc_feature (42)..(287): Homolog of NCBI NO: 25406945 NR Description: hypothetical protein [imported] - Arabidopsis >gi|7523696|gb|AAF63135.1|AC011001_5 Hypothetical protein
  misc_feature (42)..(273): Homolog of NCBI NO: 37535412 NR Description: putative
  misc_feature (1)..(20): Homolog of NCBI NO: 37535412 NR Description: putative
  misc_feature (1)..(269): Homolog of NCBI NO: 18411172 NR Description: expressed protein; protein id: At1g76670.1, by cDNA: gi_14532697, supported by cDNA: gi_16604379, supported cDNA: gi_18491194 [Arabidopsis thaliana] >gi|25354481|pir||A96795

SEQ ID NO: 11157 - DNA, 1084 bp, Zea mays subsp. mays
  misc_feature (1)..(1084): Ceres Seq. ID no. 12355615
  misc_feature: MA Experiment ID: 108527 Result: Up-regulated in Transcription
  misc_feature: MA Experiment 108527 PARAMETER Experiment Name: Zm_5mM_NO_P Parameter: Age (day) Value: 8
  misc_feature: MA Experiment 108527 PARAMETER Experiment Name: Zm_5mM_NO_P Parameter: Organism Value: Zea mays
  misc_feature: MA Experiment 108527 PARAMETER Experiment Name: Zm_5mM_NO_P Parameter: Plant Line Value: 35A19
  misc_feature: MA Experiment 108527 PARAMETER Experiment Name: Zm_5mM_NO_P Parameter: Timepoint (hr) Value: 6
  misc_feature: MA Experiment 108527 PARAMETER Experiment Name: Zm_5mM_NO_P Parameter: Tissue Value: Aerial
  misc_feature: MA Experiment 108527 PARAMETER Experiment Name: Zm_5mM_NO_P Parameter: Treatment Value: 5mM NO vs. No Treatment
  misc_feature: MA Experiment ID: 108536 Result: Up-regulated in Transcription
  misc_feature: MA Experiment 108536 PARAMETER Experiment Name: Zm_Meristem_P Parameter: Age (day) Value: 8
  misc_feature: MA Experiment 108536 PARAMETER Experiment Name: Zm_Meristem_P Parameter: Organism Value: Zea mays
  misc_feature: MA Experiment 108536 PARAMETER Experiment Name: Zm_Meristem_P Parameter: Plant Line Value: 35A19
  misc_feature: MA Experiment 108536 PARAMETER Experiment Name: Zm_Meristem_P Parameter: Tissue Value: Shoot Meristem vs. Above Shoot Meristem
  misc_feature: MA Experiment ID: 108543 Result: Up-regulated in Transcription
  misc_feature: MA Experiment ID: 108559 Result: Up-regulated in Transcription
  misc_feature: MA Experiment 108559 PARAMETER Experiment Name: Zm_5mM_NO_P Parameter: Age (day) Value: 8
  misc_feature: MA Experiment 108559 PARAMETER Experiment Name: Zm_5mM_NO_P Parameter: Organism Value: Zea mays
  misc_feature: MA Experiment 108559 PARAMETER Experiment Name: Zm_5mM_NO_P Parameter: Plant Line Value: 35A19
  misc_feature: MA Experiment 108559 PARAMETER Experiment Name: Zm_5mM_NO_P Parameter: Timepoint (hr) Value: 12
  misc_feature: MA Experiment 108559 PARAMETER Experiment Name: Zm_5mM_NO_P Parameter: Tissue Value: Aerial
  misc_feature: MA Experiment 108559 PARAMETER Experiment Name: Zm_5mM_NO_P Parameter: Treatment Value: 5mM NO vs. No Treatment
  misc_feature: MA Experiment ID: 20000535 Result: Down-regulated in Transcription
  misc_feature: MA Experiment 20000535 PARAMETER Experiment Name: Zm_Hybrid_Seed_Dev_P Parameter: DAP Value: 30 vs. 12
  misc_feature: MA Experiment 20000535 PARAMETER Experiment Name: Zm_Hybrid_Seed_Dev_P Parameter: Organism Value: Zea mays
  misc_feature: MA Experiment 20000535 PARAMETER Experiment Name: Zm_Hybrid_Seed_Dev_P Parameter: Plant Line Value: 35A19
  misc_feature: MA Experiment 20000535 PARAMETER Experiment Name: Zm_Hybrid_Seed_Dev_P Parameter: Tissue Value: Embryo vs. Unfert Floret
aagttcaggcagtttcgtgcccttttcttctccaccagctcaaagctgaacgcggcatccttcctttcacaccggggaccggcgagcagagccgcgcacagcagaacgcggaagcaagaggaggcgatcgactactcgaccagccctctccgtgtctccgatggcggctcgcgtcctcgcggccctcgcccttgccctcgccctcgccctcgtcgccgtacccgctcccacgcgggcgtccaacgacgagggggacgcgctctacgcgctgcggcagcggctgtcggaccccaacggcgtgctgcagagctgggatcccacgctcgtcaccccctgcacctggttccacatctcctgcgaccaggtcggccgcgtcgtccgcctggacttgggcaactccaacgtctccggctccatcggccctgagctcggccgccttgtcaacctcaagtacctggagctgtacaggaacaaccttgacggcgagatccccaaggaattgggcaacctcaagaacctgatcagcttggatctgtatgccaacaagctcacgggaggaatccccaagtcactctccaagctcgactcactcagattcatgcgcttgaacaacaacaagcttacaggatcaattccaagggagtttgccaagctctccaacctgaaagtcatcgatttgtctaacaatgatctctgtggaactatccctgttgatgggcctttctcaacctttcctctccgaagctttgagaacaacagcaggctcaacggtccagagctacaaggattggttccttatgattttggatgttagatgccgatcaacaatgtaccaccttccccagttgaaagggggaaagacaagatagtattatcaatagaaacctagcttcaagaatgtcgtgactatatatatgtatgatattaagactagatttgataagggtggcatagcaagtcctgatattctgtgtgcattcagaatagctgcttttatgccccttgtgttgatattttgcaaaccaaaacaaactgttctgaaacgagggcacatattgttcatgaataaatttgagcctccaat

SEQ ID NO: 11158 - protein, 217 aa, Zea mays subsp. mays
  peptide (1)..(217): Ceres Seq. ID no. 12355616
  misc_feature (167)..(199): Pfam Name: Leucine Rich Repeat Pfam Description: Leucine Rich Repeat
  misc_feature (1)..(217): Homolog of NCBI NO: 34896972 NR Description: putative leucine-rich repeat protein [Oryza
  misc_feature (7)..(217): Homolog of NCBI NO: 34903344 NR Description: unnamed protein product [Oryza sativa (japonica group)] >gi|6498429|dbj|BAA87832.1| unnamed protein product
  misc_feature (1)..(217): Homolog of NCBI NO: 34146800 NR Description: At3g43740 [Arabidopsis thaliana]
  misc_feature (6)..(217): Homolog of NCBI NO: 15242153 NR Description: leucine-rich repeat protein; protein id: supported by cDNA: gi_13358181, supported by cDNA: gi_13899096, by cDNA: gi_20148426 [Arabidopsis thaliana]
  misc_feature (1)..(217): Homolog of NCBI NO: 29468120 NR Description: leucine-rich repeat protein [Oryza sativa]
  misc_feature (26)..(217): Homolog of NCBI NO: 30385250 NR Description: leucine-rich repeat protein [x Citrofortunella
  misc_feature (1)..(217): Homolog of NCBI NO: 27497122 NR Description: floral organ regulator 1 [Oryza sativa (japonica
  misc_feature (15)..(217): Homolog of NCBI NO: 7489030 NR Description: leucine-rich repeat protein LRP - tomato
  misc_feature (1)..(217): Homolog of NCBI NO: 13897320 NR Description: somatic embryogenesis receptor-like kinase 2 [Zea
  misc_feature (1)..(217): Homolog of NCBI NO: 40253600 NR Description: putative somatic embryogenesis receptor kinase 1
MAARVLAALALALALALVAVPAPTRASNDEGDALYALRQRLSDPNGVLQSWDPTLVTPCTWFHISCDQVGRVVRLDLGNSNVSGSIGPELGRLVNLKYLELYRNNLDGEIPKELGNLKNLISLDLYANKLTGGIPKSLSKLDSLRFMRLNNNKLTGSIPREFAKLSNLKVIDLSNNDLCGTIPVDGPFSTFPLRSFENNSRLNGPELQGLVPYDFGC

SEQ ID NO: 11159 - protein, 172 aa, Zea mays subsp. mays
  peptide (1)..(172): Ceres Seq. ID no. 12355617
  misc_feature (62)..(172): Pfam Name: Herpes virus major outer envelope glycoprotein (BLLF1) Pfam Description: Herpes virus major outer envelope glycoprotein
VQAVSCPFLLHQLKAERGILPFTPGTGEQSRAQQNAEARGGDRLLDQPSPCLRWRLASSRPSPLPSPSPSSPYPLPRGRPTTRGTRSTRCGSGCRTPTACCRAGIPRSSPPAPGSTSPATRSAASSAWTWATPTSPAPSALSSAALSTSSTWSCTGTTLTARSPRNWATSRT

SEQ ID NO: 11160 - protein, 141 aa, Zea mays subsp. mays
  peptide (1)..(141): Ceres Seq. ID no. 12355618
KFRQFRALFFSTSSKLNAASFLSHRGPASRAAHSRTRKQEEAIDYSTSPLRVSDGGSRPRGPRPCPRPRPRRRTRSHAGVQRRGGRALRAAAAAVGPQRRAAELGSHARHPLHLVPHLLRPGRPRRPPGLGQLQRLRLHRP

SEQ ID NO: 11161 - DNA, 1483 bp, Zea mays subsp. mays
  misc_feature (1)..(1483): Ceres Seq. ID no. 13492502
  misc_feature: MA Experiment ID: 108529 Result: Up-regulated in Transcription
  misc_feature: MA Experiment 108529 PARAMETER Experiment Name: Zm_Imbibed_Seeds_P Parameter: Age (day) Value: 5 vs. 2
  misc_feature: MA Experiment 108529 PARAMETER Experiment Name: Zm_Imbibed_Seeds_P Parameter: Organism Value: Zea mays
  misc_feature: MA Experiment 108529 PARAMETER Experiment Name: Zm_Imbibed_Seeds_P Parameter: Plant Line Value: 35A19
  misc_feature: MA Experiment 108529 PARAMETER Experiment Name: Zm_Imbibed_Seeds_P Parameter: Tissue Value: Roots vs. Embryo
  misc_feature: MA Experiment ID: 108535 Result: Down-regulated in Transcription
  misc_feature: MA Experiment 108535 PARAMETER Experiment Name: Zm_Meristem_P Parameter: Age (day) Value: 8
  misc_feature: MA Experiment 108535 PARAMETER Experiment Name: Zm_Meristem_P Parameter: Organism Value: Zea mays
  misc_feature: MA Experiment 108535 PARAMETER Experiment Name: Zm_Meristem_P Parameter: Plant Line Value: 35A19
  misc_feature: MA Experiment 108535 PARAMETER Experiment Name: Zm_Meristem_P Parameter: Tissue Value: Root Meristem vs. Above Root Meristem
  misc_feature: MA Experiment ID: 108546 Result: Up-regulated in Transcription
  misc_feature: MA Experiment 108546 PARAMETER Experiment Name: Zm_Imbibed_Seeds_P Parameter: Age (day) Value: 3 vs. 2
  misc_feature: MA Experiment 108546 PARAMETER Experiment Name: Zm_Imbibed_Seeds_P Parameter: Organism Value: Zea mays
  misc_feature: MA Experiment 108546 PARAMETER Experiment Name: Zm_Imbibed_Seeds_P Parameter: Plant Line Value: 35A19
  misc_feature: MA Experiment 108546 PARAMETER Experiment Name: Zm_Imbibed_Seeds_P Parameter: Tissue Value: Roots vs. Embryo
tgaagagttcagctaccctaccatccacactttattcatctcagggcagtagccagtagctagctgtagagggagttatcggccatgtcggaggaggcgacgctggaggacacgcctacgtggatcgtggcgtccgtgtgctccgtcatcgtcctcatctccttcgtcttcgagcgcgcgctccaccacctcggcaaggcactggagcgcctgaggaagaccctgtacgaggcgctgctaaagctcaaagaagagctcatgctgctgggcttcgtctcgctgctcctcgtcgtctcccaggacttgatacagaagatctgcatcgacgacagcctcatggagcactggatgccgtgccggggtgctagcgccaccgcctcggctcattacggtgtctcctcctcctcctcctcctccgcggtcggtggcgggaggaggatgctcaaaggcggcggggcagctttcgggcactgttcaagcaagggaaaagtcccgttgctatcacttcacgccttggagcaggtacacattttcatcttcgtcctagctatcacgcaagtcgttctcagcgtcgccaccgtcctcctgggacttctgcagatgcggatatggatgcactgggagaacaccattcagcaagagggcagctctgctcccaagatgatcgcccgtgtgcagaaaatcaggttcatccaggaccggtgtaaggggtacgagaaggccgcctgggttataatatggctgcgttctttcttcaaacagttctacggatcagtgtccaacgacgactacattgcgatgagactcggtttcgtcatggagcactttagggggcaccccaagttcaacttttacgactacatgatcaaagctctcgagaaagatttcaagcgagtagttagtataaaatggtattactggatttttgtgatgatctttctgctgctcaatgtcaccgggtggcactcctacttctggatctcattagttccactggctctgctgcttctgattgggacgaagctggagcacatcataaacaggctggcctacgaggtggcctcgaagcacgccgccgggcaaggcgaagggggcatcgtggtgagcccttcggacgagctgttctggttccgcagcccacggctggtgctcgtgctcatccacttcatcctgttccagaacgcgttcgagttcgcgtatttcttctggacactggtaaacatctggcatgcatgcatgcatgcatcatgcatgcgctctctgtctcaaatgcatgcagctacgccgtcgagtcgtcgtcgtcgttcgtcgacccaatctggccactggccagtgacgacctgtgtggcagtattcctgaatcctgatccctgtacgtgttaattgcaacgcaggcgatgttcggcgccaactcctgcatcatggacagtctaggatacagcgtctcgcgaatcatcatatggtactgagaacgtcgctgtcg

SEQ ID NO: 11162 - protein, 432 aa, Zea mays subsp. mays
  peptide (1)..(432): Ceres Seq. ID no. 13492503
  misc_feature (2)..(396): Pfam Name: Mlo family Pfam Description: Mlo family
  misc_feature (1)..(396): Homolog of NCBI NO: 13784979 NR Description: seven transmembrane protein Mlo3 [Zea mays]
  misc_feature (5)..(385): Homolog of NCBI NO: 34907492 NR Description: putative seven transmembrane protein [Oryza
  misc_feature (1)..(377): Homolog of NCBI NO: 13784989 NR Description: seven transmembrane protein Mlo8 [Zea mays]
  misc_feature (3)..(401): Homolog of NCBI NO: 15235429 NR Description: seven transmembrane MLO protein family (MLO1)
  misc_feature (6)..(385): Homolog of NCBI NO: 15224823 NR Description: seven transmembrane MLO protein family (MLO15)
  misc_feature (1)..(385): Homolog of NCBI NO: 18416311 NR Description: seven transmembrane MLO protein family (MLO13) thaliana] >gi|14091596|gb|AAK53806.1|AF369574_1 membrane protein
  misc_feature (119)..(385): Homolog of NCBI NO: 7487333 NR Description: hypothetical protein T22A6.80 - Arabidopsis
  misc_feature (1)..(84): Homolog of NCBI NO: 7487333 NR Description: hypothetical protein T22A6.80 - Arabidopsis
  misc_feature (1)..(385): Homolog of NCBI NO: 13784987 NR Description: seven transmembrane protein Mlo7 [Zea mays]
  misc_feature (95)..(377): Homolog of NCBI NO: 13784985 NR Description: seven transmembrane protein Mlo6 [Zea mays]
MSEEATLEDTPTWIVASVCSVIVLISFVFERALHHLGKALERLRKTLYEALLKLKEELMLLGFVSLLLVVSQDLIQKICIDDSLMEHWMPCRGASATASAHYGVSSSSSSSAVGGGRRMLKGGGAAFGHCSSKGKVPLLSLHALEQVHIFIFVLAITQVVLSVATVLLGLLQMRIWMHWENTIQQEGSSAPKMIARVQKIRFIQDRCKGYEKAAWVIIWLRSFFKQFYGSVSNDDYIAMRLGFVMEHFRGHPKFNFYDYMIKALEKDFKRVVSIKWYYWIFVMIFLLLNVTGWHSYFWISLVPLALLLLIGTKLEHIINRLAYEVASKHAAGQGEGGIVVSPSDELFWFRSPRLVLVLIHFILFQNAFEFAYFFWTLVNIWHACMHASCMRSLSQMHAATPSSRRRRSSTQSGHWPVTTCVAVFLNPDPCTC

SEQ ID NO: 11163 - protein, 374 aa, Zea mays subsp. mays
  peptide (1)..(374): Ceres Seq. ID no. 13492504
  misc_feature (1)..(338): Pfam Name: Mlo family Pfam Description: Mlo family
  misc_feature (1)..(338): Homolog of NCBI NO: 13784979 NR Description: seven transmembrane protein Mlo3 [Zea mays]
  misc_feature (1)..(327): Homolog of NCBI NO: 34907492 NR Description: putative seven transmembrane protein [Oryza
  misc_feature (1)..(319): Homolog of NCBI NO: 13784989 NR Description: seven transmembrane protein Mlo8 [Zea mays]
  misc_feature (1)..(343): Homolog of NCBI NO: 15235429 NR Description: seven transmembrane MLO protein family (MLO1)
  misc_feature (1)..(327): Homolog of NCBI NO: 15224823 NR Description: seven transmembrane MLO protein family (MLO15)
  misc_feature (1)..(327): Homolog of NCBI NO: 18416311 NR Description: seven transmembrane MLO protein family (MLO13) thaliana] >gi|14091596|gb|AAK53806.1|AF369574_1 membrane protein
  misc_feature (61)..(327): Homolog of NCBI NO: 7487333 NR Description: hypothetical protein T22A6.80 - Arabidopsis
  misc_feature (1)..(26): Homolog of NCBI NO: 7487333 NR Description: hypothetical protein T22A6.80 - Arabidopsis
  misc_feature (1)..(327): Homolog of NCBI NO: 13784987 NR Description: seven transmembrane protein Mlo7 [Zea mays]
  misc_feature (37)..(319): Homolog of NCBI NO: 13784985 NR Description: seven transmembrane protein Mlo6 [Zea mays]
MLLGFVSLLLVVSQDLIQKICIDDSLMEHWMPCRGASATASAHYGVSSSSSSSAVGGGRRMLKGGGAAFGHCSSKGKVPLLSLHALEQVHIFIFVLAITQVVLSVATVLLGLLQMRIWMHWENTIQQEGSSAPKMIARVQKIRFIQDRCKGYEKAAWVIIWLRSFFKQFYGSVSNDDYIAMRLGFVMEHFRGHPKFNFYDYMIKALEKDFKRVVSIKWYYWIFVMIFLLLNVTGWHSYFWISLVPLALLLLIGTKLEHIINRLAYEVASKHAAGQGEGGIVVSPSDELFWFRSPRLVLVLIHFILFQNAFEFAYFFWTLVNIWHACMHASCMRSLSQMHAATPSSRRRRSSTQSGHWPVTTCVAVFLNPDPCTC

SEQ ID NO: 11164 - protein, 348 aa, Zea mays subsp. mays
  peptide (1)..(348): Ceres Seq. ID no. 13492505
  misc_feature (1)..(312): Pfam Name: Mlo family Pfam Description: Mlo family
  misc_feature (1)..(312): Homolog of NCBI NO: 13784979 NR Description: seven transmembrane protein Mlo3 [Zea mays]
  misc_feature (1)..(301): Homolog of NCBI NO: 34907492 NR Description: putative seven transmembrane protein [Oryza
  misc_feature (1)..(293): Homolog of NCBI NO: 13784989 NR Description: seven transmembrane protein Mlo8 [Zea mays]
  misc_feature (1)..(317): Homolog of NCBI NO: 15235429 NR Description: seven transmembrane MLO protein family (MLO1)
  misc_feature (1)..(301): Homolog of NCBI NO: 15224823 NR Description: seven transmembrane MLO protein family (MLO15)
  misc_feature (1)..(301): Homolog of NCBI NO: 18416311 NR Description: seven transmembrane MLO protein family (MLO13) thaliana] >gi|14091596|gb|AAK53806.1|AF369574_1 membrane protein
  misc_feature (35)..(301): Homolog of NCBI NO: 7487333 NR Description: hypothetical protein T22A6.80 - Arabidopsis
  misc_feature (1)..(301): Homolog of NCBI NO: 13784987 NR Description: seven transmembrane protein Mlo7 [Zea mays]
  misc_feature (11)..(293): Homolog of NCBI NO: 13784985 NR Description: seven transmembrane protein Mlo6 [Zea mays]
  misc_feature (1)..(35): Homolog of NCBI NO: 13784985 NR Description: seven transmembrane protein Mlo6 [Zea mays]
MEHWMPCRGASATASAHYGVSSSSSSSAVGGGRRMLKGGGAAFGHCSSKGKVPLLSLHALEQVHIFIFVLAITQVVLSVATVLLGLLQMRIWMHWENTIQQEGSSAPKMIARVQKIRFIQDRCKGYEKAAWVIIWLRSFFKQFYGSVSNDDYIAMRLGFVMEHFRGHPKFNFYDYMIKALEKDFKRVVSIKWYYWIFVMIFLLLNVTGWHSYFWISLVPLALLLLIGTKLEHIINRLAYEVASKHAAGQGEGGIVVSPSDELFWFRSPRLVLVLIHFILFQNAFEFAYFFWTLVNIWHACMHASCMRSLSQMHAATPSSRRRRSSTQSGHWPVTTCVAVFLNPDPCTC

SEQ ID NO: 11165 - DNA, 1324 bp, Zea mays subsp. mays
  misc_feature (1)..(1324): Ceres Seq. ID no. 12411942
  misc_feature: MA Experiment ID: 108527 Result: Up-regulated in Transcription
  misc_feature: MA Experiment 108527 PARAMETER Experiment Name: Zm_5mM_NO_P Parameter: Age (day) Value: 8
  misc_feature: MA Experiment 108527 PARAMETER Experiment Name: Zm_5mM_NO_P Parameter: Organism Value: Zea mays
  misc_feature: MA Experiment 108527 PARAMETER Experiment Name: Zm_5mM_NO_P Parameter: Plant Line Value: 35A19
  misc_feature: MA Experiment 108527 PARAMETER Experiment Name: Zm_5mM_NO_P Parameter: Timepoint (hr) Value: 6
  misc_feature: MA Experiment 108527 PARAMETER Experiment Name: Zm_5mM_NO_P Parameter: Tissue Value: Aerial
  misc_feature: MA Experiment 108527 PARAMETER Experiment Name: Zm_5mM_NO_P Parameter: Treatment Value: 5mM NO vs. No Treatment
  misc_feature: MA Experiment ID: 108535 Result: Up-regulated in Transcription
  misc_feature: MA Experiment 108535 PARAMETER Experiment Name: Zm_Meristem_P Parameter: Age (day) Value: 8
  misc_feature: MA Experiment 108535 PARAMETER Experiment Name: Zm_Meristem_P Parameter: Organism Value: Zea mays
  misc_feature: MA Experiment 108535 PARAMETER Experiment Name: Zm_Meristem_P Parameter: Plant Line Value: 35A19
  misc_feature: MA Experiment 108535 PARAMETER Experiment Name: Zm_Meristem_P Parameter: Tissue Value: Root Meristem vs. Above Root Meristem
  misc_feature: MA Experiment ID: 20000478 Result: Up-regulated in Transcription
  misc_feature: MA Experiment 20000478 PARAMETER Experiment Name: Zm_5mM_SA_P Parameter: Age (day) Value: 11
  misc_feature: MA Experiment 20000478 PARAMETER Experiment Name: Zm_5mM_SA_P Parameter: Organism Value: Zea mays
  misc_feature: MA Experiment 20000478 PARAMETER Experiment Name: Zm_5mM_SA_P Parameter: Plant Line Value: 35A19
  misc_feature: MA Experiment 20000478 PARAMETER Experiment Name: Zm_5mM_SA_P Parameter: Timepoint (hr) Value: 72
  misc_feature: MA Experiment 20000478 PARAMETER Experiment Name: Zm_5mM_SA_P Parameter: Tissue Value: Aerial
  misc_feature: MA Experiment 20000478 PARAMETER Experiment Name: Zm_5mM_SA_P Parameter: Treatment Value: 5mM SA vs. No Treatment
  misc_feature: MA Experiment ID: 20000480 Result: Up-regulated in Transcription
  misc_feature: MA Experiment 20000480 PARAMETER Experiment Name: Zm_Drought_P Parameter: Age (day) Value: 11
  misc_feature: MA Experiment 20000480 PARAMETER Experiment Name: Zm_Drought_P Parameter: Organism Value: Zea mays
  misc_feature: MA Experiment 20000480 PARAMETER Experiment Name: Zm_Drought_P Parameter: Plant Line Value: 35A19
  misc_feature: MA Experiment 20000480 PARAMETER Experiment Name: Zm_Drought_P Parameter: Timepoint (hr) Value: 72
  misc_feature: MA Experiment 20000480 PARAMETER Experiment Name: Zm_Drought_P Parameter: Tissue Value: Aerial
  misc_feature: MA Experiment 20000480 PARAMETER Experiment Name: Zm_Drought_P Parameter: Treatment Value: Drought vs. No Drought
aatcctttcacccttcagcccgcgtgccctctgtttctctcccggttcttcccctctcctgcgacgacagggttgggtaacgccgctcgccgccgccgccgccgccatacgcaggtgccgaggccttcgtcgatctcttagccgtcgacaagcacccaagagatgcaggatagaatgagacggcaggggcaatatggtgaagcggatattaactccatggttgctgcccagttgcatcactaccaggcacagcaaagggtacagaaacaccctgagaatagctacactggaagagatcctgcacaagcttctgcggagcatcagtacactccccctaaggcaagacagagtcaatgggatcgaggtggaccaaatgcgccaagccaggttccatcatatgcatataacgaagcccaaggtgctggaggtgcgcaatccttttatgatgggcagagatctgatacaaaggttggtctagaaaagcagcccagcaaggagtctagggagcaacctcgtactgaacgaactgaaacaagatacgagaattataatcttcctcggacattcgaaggtcttgaacaaagtttccatgaagacattattttgctatccaaggaactacaggaggcagaggatgctgaaaattctagacacatggagagattgaaggatataaatacacagtaccaggagaaactattagcacttagagctcggcaagcgaactatagagatgagttcctgcgcaaggaatctctagcacgccagcagcaataccagcacgccagcatgagccattacgccagcaattccacggctggggagcagcatggttataacccaacggcagcaggcacgcctcctgttgctgctggaggtgcttatggtgaggctcatcggggttatgcttctggccagtatgaatcatttagcgatcgtccagattatccagagttccatgatgggggcagaggtcgtggtcgtagttctgagcagcgtgctcaataccctggtggtcgtgcttataattccggtggccggcgattctagatatgctttgaactttgaaggacgatctatcactctgtcaagcgagctcatatcacctgatgtcagtgtgctgtaccgtgctatactcgaccgagaaacctaagcgctcataaaacttgttctacaattcaggtgcatcgaactactttatggttttgctagagttcattctggttataattgtagaggaacgaaacgatgagagaacactgacttttccgtttctctgcaattcatgtaatatgatctcggaagcaataacatttcatcttcg

SEQ ID NO: 11166 - protein, 295 aa, Zea mays subsp. mays
  peptide (1)..(295): Ceres Seq. ID no. 12411943
  misc_feature (5)..(293): Homolog of NCBI NO: 22326954 NR Description: unknown protein; protein id: At5g22040.1 thaliana] >gi|13374863|emb|CAC34497.1| putative protein
  misc_feature (125)..(289): Homolog of NCBI NO: 26449851 NR Description: unknown protein [Arabidopsis thaliana]
  misc_feature (30)..(289): Homolog of NCBI NO: 15228732 NR Description: putative protein; protein id: At3g62330.1
MQDRMRRQGQYGEADINSMVAAQLHHYQAQQRVQKHPENSYTGRDPAQASAEHQYTPPKARQSQWDRGGPNAPSQVPSYAYNEAQGAGGAQSFYDGQRSDTKVGLEKQPSKESREQPRTERTETRYENYNLPRTFEGLEQSFHEDIILLSKELQEAEDAENSRHMERLKDINTQYQEKLLALRARQANYRDEFLRKESLARQQQYQHASMSHYASNSTAGEQHGYNPTAAGTPPVAAGGAYGEAHRGYASGQYESFSDRPDYPEFHDGGRGRGRSSEQRAQYPGGRAYNSGGRRF

SEQ ID NO: 11167 - protein, 291 aa, Zea mays subsp. mays
  peptide (1)..(291): Ceres Seq. ID no. 12411944
  misc_feature (1)..(289): Homolog of NCBI NO: 22326954 NR Description: unknown protein; protein id: At5g22040.1 thaliana] >gi|13374863|emb|CAC34497.1| putative protein
  misc_feature (121)..(285): Homolog of NCBI NO: 26449851 NR Description: unknown protein [Arabidopsis thaliana]
  misc_feature (26)..(285): Homolog of NCBI NO: 15228732 NR Description: putative protein; protein id: At3g62330.1
MRRQGQYGEADINSMVAAQLHHYQAQQRVQKHPENSYTGRDPAQASAEHQYTPPKARQSQWDRGGPNAPSQVPSYAYNEAQGAGGAQSFYDGQRSDTKVGLEKQPSKESREQPRTERTETRYENYNLPRTFEGLEQSFHEDIILLSKELQEAEDAENSRHMERLKDINTQYQEKLLALRARQANYRDEFLRKESLARQQQYQHASMSHYASNSTAGEQHGYNPTAAGTPPVAAGGAYGEAHRGYASGQYESFSDRPDYPEFHDGGRGRGRSSEQRAQYPGGRAYNSGGRRF

SEQ ID NO: 11168 - protein, 277 aa, Zea mays subsp. mays
  peptide (1)..(277): Ceres Seq. ID no. 12411945
  misc_feature (1)..(275): Homolog of NCBI NO: 22326954 NR Description: unknown protein; protein id: At5g22040.1 thaliana] >gi|13374863|emb|CAC34497.1| putative protein
  misc_feature (107)..(271): Homolog of NCBI NO: 26449851 NR Description: unknown protein [Arabidopsis thaliana]
  misc_feature (12)..(271): Homolog of NCBI NO: 15228732 NR Description: putative protein; protein id: At3g62330.1
MVAAQLHHYQAQQRVQKHPENSYTGRDPAQASAEHQYTPPKARQSQWDRGGPNAPSQVPSYAYNEAQGAGGAQSFYDGQRSDTKVGLEKQPSKESREQPRTERTETRYENYNLPRTFEGLEQSFHEDIILLSKELQEAEDAENSRHMERLKDINTQYQEKLLALRARQANYRDEFLRKESLARQQQYQHASMSHYASNSTAGEQHGYNPTAAGTPPVAAGGAYGEAHRGYASGQYESFSDRPDYPEFHDGGRGRGRSSEQRAQYPGGRAYNSGGRRF

SEQ ID NO: 11169 - DNA, 1362 bp, Zea mays subsp. mays
  misc_feature (1)..(1362): Ceres Seq. ID no. 12374139
  misc_feature: MA Experiment ID: 108544 Result: Up-regulated in Transcription
gatcctatcgcatcgaatcgaaactgttccgctcccactccgatcggattcggtgggacggtggcatctatgcgcccgtcgcaccgtcgctcaaactgtataaacctgcgcccgaacacttcgagctcacccgcaacctcctccgggaagcgcgatcgccgtctcgaaggagctgaaatccaagattccaagctcttctgtcacaggttgagggaagttgaagcaaaagtctaagcaaaaatgttttacgggggatatgcttaccatggcaactcgtttgagcaaacataccgttgttatccagcatcgttttttgataagccacacctggaaggcggtgataaagtaataatgccaccttctgcccttgatcgtcttgcttccttgcacatcgagtaccctatgctatttgagctgcacaatgatgcaacccagcggatttcacactgtggtgttttggagtttgttgcagaagaaggcatgatcatcatgccctattggatgatgcaaaacatgctgcttcaagagggtgacactgtccatgtaaaaaatgcgactcttcccaagggcacatatgtgaaattgcaacctcacacaactgattttctggatatttcaaacccgaaagccatcttggaaaaaactttaagaaatttctcctgcttaaccacgggagacagcatcatggtagcctacaacaacaaacaatattatattgatattgttgaaacaaagcctgcttctgcggttagcattattgagacagactgtgaagtggactttgcgcctcctcttgattataaagaacctgagaaaccacgacaaccaacagttcctgcaagcaaggcacctgctgaagatggcaacactgcagtggaggatgaaccaaaattcaaaccatttactggttttggaaagcggttggatggaaaagcctcaaaactgcaagcatcagaggttccttccactgcactttctgcaccttcagattcaaacaaaagagcaaatcagcaaatctcagcacccgcagcttcaggagctagcaattacagtcgacagaaaactgggaaacttgtttttggttcaagtgcaagcaacaataaggaaccacaaaaggctcctgctaaagaggagcaacccgcaaagaaggacgacgagctgaggttccaagcgttcagcgggaagagctactcattgaaacgttagctgcttcagttaaccttcaaattcgccgctactctttcgtttcgtgcatggtgggtgttctggcacctggtcaccaccatgtagatatgaattgaagtatgtatatgcttatcttgatggaaacatgacagtctgtttatttaagcccaaaagttc

SEQ ID NO: 11170 - protein, 321 aa, Zea mays subsp. mays
  peptide (1)..(321): Ceres Seq. ID no. 12374140
  misc_feature (10)..(184): Pfam Name: Ubiquitin fusion degradation protein UFD1 Pfam Description: Ubiquitin fusion degradation protein UFD1
  misc_feature (1)..(321): Homolog of NCBI NO: 38345534 NR Description: OSJNBa0020J04.9 [Oryza sativa (japonica
  misc_feature (1)..(320): Homolog of NCBI NO: 21592947 NR Description: putative ubiquitin fusion-degradation protein
  misc_feature (1)..(320): Homolog of NCBI NO: 18399646 NR Description: putative ubiquitin fusion-degradation protein;
  misc_feature (2)..(320): Homolog of NCBI NO: 25347017 NR Description: probable ubiquitin fusion-degradation protein
  misc_feature (1)..(320): Homolog of NCBI NO: 7488221 NR Description: probable ubiquitin-dependent proteolytic protein -
  misc_feature (1)..(320): Homolog of NCBI NO: 18420341 NR Description: putative ubiquitin-dependent proteolytic protein; id: At4g38930.1, supported by cDNA: gi_16930496 [Arabidopsis >gi|16930497|gb|AAL31934.1|AF419602_1 AT4g38930/F19H22_30
  misc_feature (34)..(319): Homolog of NCBI NO: 7488408 NR Description: probable ubiquitin fusion-degradation protein
  misc_feature (38)..(319): Homolog of NCBI NO: 30684115 NR Description: ubiquitin fusion degradation (UFD) protein,
  misc_feature (11)..(241): Homolog of NCBI NO: 38540890 NR Description: Ubiquitin fusion degradation 1-like protein
  misc_feature (11)..(241): Homolog of NCBI NO: 16758158 NR Description: ubiquitin fusion degradation 1-like [Rattus
MFYGGYAYHGNSFEQTYRCYPASFFDKPHLEGGDKVIMPPSALDRLASLHIEYPMLFELHNDATQRISHCGVLEFVAEEGMIIMPYWMMQNMLLQEGDTVHVKNATLPKGTYVKLQPHTTDFLDISNPKAILEKTLRNFSCLTTGDSIMVAYNNKQYYIDIVETKPASAVSIIETDCEVDFAPPLDYKEPEKPRQPTVPASKAPAEDGNTAVEDEPKFKPFTGFGKRLDGKASKLQASEVPSTALSAPSDSNKRANQQISAPAASGASNYSRQKTGKLVFGSSASNNKEPQKAPAKEEQPAKKDDELRFQAFSGKSYSLKR

SEQ ID NO: 11171 - protein, 284 aa, Zea mays subsp. mays
  peptide (1)..(284): Ceres Seq. ID no. 12374141
  misc_feature (1)..(147): Pfam Name: Ubiquitin fusion degradation protein UFD1 Pfam Description: Ubiquitin fusion degradation protein UFD1
  misc_feature (1)..(284): Homolog of NCBI NO: 38345534 NR Description: OSJNBa0020J04.9 [Oryza sativa (japonica
  misc_feature (1)..(283): Homolog of NCBI NO: 21592947 NR Description: putative ubiquitin fusion-degradation protein
  misc_feature (1)..(283): Homolog of NCBI NO: 18399646 NR Description: putative ubiquitin fusion-degradation protein;
  misc_feature (1)..(283): Homolog of NCBI NO: 25347017 NR Description: probable ubiquitin fusion-degradation protein
  misc_feature (1)..(283): Homolog of NCBI NO: 7488221 NR Description: probable ubiquitin-dependent proteolytic protein -
  misc_feature (1)..(283): Homolog of NCBI NO: 18420341 NR Description: putative ubiquitin-dependent proteolytic protein; id: At4g38930.1, supported by cDNA: gi_16930496 [Arabidopsis >gi|16930497|gb|AAL31934.1|AF419602_1 AT4g38930/F19H22_30
  misc_feature (1)..(282): Homolog of NCBI NO: 7488408 NR Description: probable ubiquitin fusion-degradation protein
  misc_feature (1)..(282): Homolog of NCBI NO: 30684115 NR Description: ubiquitin fusion degradation (UFD) protein,
  misc_feature (1)..(204): Homolog of NCBI NO: 38540890 NR Description: Ubiquitin fusion degradation 1-like protein
  misc_feature (1)..(204): Homolog of NCBI NO: 16758158 NR Description: ubiquitin fusion degradation 1-like [Rattus
MPPSALDRLASLHIEYPMLFELHNDATQRISHCGVLEFVAEEGMIIMPYWMMQNMLLQEGDTVHVKNATLPKGTYVKLQPHTTDFLDISNPKAILEKTLRNFSCLTTGDSIMVAYNNKQYYIDIVETKPASAVSIIETDCEVDFAPPLDYKEPEKPRQPTVPASKAPAEDGNTAVEDEPKFKPFTGFGKRLDGKASKLQASEVPSTALSAPSDSNKRANQQISAPAASGASNYSRQKTGKLVFGSSASNNKEPQKAPAKEEQPAKKDDELRFQAFSGKSYSLKR

SEQ ID NO: 11172 - protein, 267 aa, Zea mays subsp. mays
  peptide (1)..(267): Ceres Seq. ID no. 12374142
  misc_feature (1)..(130): Pfam Name: Ubiquitin fusion degradation protein UFD1 Pfam Description: Ubiquitin fusion degradation protein UFD1
  misc_feature (1)..(267): Homolog of NCBI NO: 38345534 NR Description: OSJNBa0020J04.9 [Oryza sativa (japonica
  misc_feature (1)..(266): Homolog of NCBI NO: 21592947 NR Description: putative ubiquitin fusion-degradation protein
  misc_feature (1)..(266): Homolog of NCBI NO: 18399646 NR Description: putative ubiquitin fusion-degradation protein;
  misc_feature (1)..(266): Homolog of NCBI NO: 25347017 NR Description: probable ubiquitin fusion-degradation protein
  misc_feature (1)..(266): Homolog of NCBI NO: 7488221 NR Description: probable ubiquitin-dependent proteolytic protein -
  misc_feature (1)..(266): Homolog of NCBI NO: 18420341 NR Description: putative ubiquitin-dependent proteolytic protein; id: At4g38930.1, supported by cDNA: gi_16930496 [Arabidopsis >gi|16930497|gb|AAL31934.1|AF419602_1 AT4g38930/F19H22_30
  misc_feature (1)..(265): Homolog of NCBI NO: 7488408 NR Description: probable ubiquitin fusion-degradation protein
  misc_feature (1)..(265): Homolog of NCBI NO: 30684115 NR Description: ubiquitin fusion degradation (UFD) protein,
  misc_feature (1)..(187): Homolog of NCBI NO: 38540890 NR Description: Ubiquitin fusion degradation 1-like protein
  misc_feature (1)..(187): Homolog of NCBI NO: 16758158 NR Description: ubiquitin fusion degradation 1-like [Rattus
MLFELHNDATQRISHCGVLEFVAEEGMIIMPYWMMQNMLLQEGDTVHVKNATLPKGTYVKLQPHTTDFLDISNPKAILEKTLRNFSCLTTGDSIMVAYNNKQYYIDIVETKPASAVSIIETDCEVDFAPPLDYKEPEKPRQPTVPASKAPAEDGNTAVEDEPKFKPFTGFGKRLDGKASKLQASEVPSTALSAPSDSNKRANQQISAPAASGASNYSRQKTGKLVFGSSASNNKEPQKAPAKEEQPAKKDDELRFQAFSGKSYSLKR

SEQ ID NO: 11173 - DNA, 1710 bp, Zea mays subsp. mays
  misc_feature (1)..(1710): Ceres Seq. ID no. 12413551
  misc_feature: MA Experiment ID: 108522 Result: Up-regulated in Transcription
  misc_feature: MA Experiment 108522 PARAMETER Experiment Name: Zm_42deg_Heat_P Parameter: Age (day) Value: 8
  misc_feature: MA Experiment 108522 PARAMETER Experiment Name: Zm_42deg_Heat_P Parameter: Organism Value: Zea mays
  misc_feature: MA Experiment 108522 PARAMETER Experiment Name: Zm_42deg_Heat_P Parameter: Plant Line Value: 35A19
  misc_feature: MA Experiment 108522 PARAMETER Experiment Name: Zm_42deg_Heat_P Parameter: Temperature (deg C) Value: 42 vs. 22
  misc_feature: MA Experiment 108522 PARAMETER Experiment Name: Zm_42deg_Heat_P Parameter: Timepoint (hr) Value: 1
  misc_feature: MA Experiment 108522 PARAMETER Experiment Name: Zm_42deg_Heat_P Parameter: Tissue Value: Aerial
  misc_feature: MA Experiment ID: 108523 Result: Up-regulated in Transcription
  misc_feature: MA Experiment 108523 PARAMETER Experiment Name: Zm_42deg_Heat_P Parameter: Age (day) Value: 8
  misc_feature: MA Experiment 108523 PARAMETER Experiment Name: Zm_42deg_Heat_P Parameter: Organism Value: Zea mays
  misc_feature: MA Experiment 108523 PARAMETER Experiment Name: Zm_42deg_Heat_P Parameter: Plant Line Value: 35A19
  misc_feature: MA Experiment 108523 PARAMETER Experiment Name: Zm_42deg_Heat_P Parameter: Temperature (deg C) Value: 42 vs. 22
  misc_feature: MA Experiment 108523 PARAMETER Experiment Name: Zm_42deg_Heat_P Parameter: Timepoint (hr) Value: 6
  misc_feature: MA Experiment 108523 PARAMETER Experiment Name: Zm_42deg_Heat_P Parameter: Tissue Value: Aerial
tgaataccagtatccgcagtgtaaaagcttcattttattacaaaaaaaaaatcttcgtcctccccgcgaagacgcttcccgagcttctccttcgttcctcctcttccccgcggctctcctctgccccgcaccggcaccgctagggttttgccgccgacctctcgctcgcttccgggctccgcgaggcaaccgtccggaccggccggtcgaaatggtggatgtggaggaggtcgggaacaagatgcaatcgcagatgcgcctgcacgcggaccggatgacgccgccgccgacctccccctcccggcgctcttcgacagggcgtcgcggcttcacgccctggcctccagctccgccctcgaccaggatgggatccgcaccggggttgagctgctgcggacgctgcgacgagatggtcggcaggctcggtcttttctcccccaacgagaccaaggacgacgtctccaccgcaaacctcaagtacctactcgtcccatattaccttgcggaaatgaccgagaagatggcgcaggaggatcggatcccggttcttaaggcgtcgcaggaccatttgaaggagttcattgctctatgcgaagtactagagcttattccagaggatgagctagaattgtctaggcagaagcagtctgatactatggcaaacagaagagcacagaaggttgcccggttcaaacgtcaaaaggctgcagaaacaaagctccaagagatcagagagagaaaagaaaggcgtggacgctcattgagagcaactgctttgtctgccccagttgaagctggagaggaagatgacctggaggatgacggggaggaagaaagggaggcttggttagctaccatctcattggctatctgcaaggcttttgatcttctcgacatgttaaagaaggaagaagaaatgcttctagctgtaaaggaaaggaaggcaaaggacgggaatgcatttgctcgtgaaatgctcgacgaacggacaaagaaggctgaagcatggcaccacaaagctgccagtcgtgtggcgtattccaaaccagccgatccgatcacctgtgcaacatttgctcaggatgtcattgaagggagagcgagcgtttcacaggcccacgagcacaaacaccagcccctgatatttggacctgcaagccttgttggcggcggtctgaccagtgaaagggaaagaatggcagcgcaagtttttcagcccagttacaggatgccaacaatgagcatagaagaggctggcttgcgcgagatgaagatgatggagagntggcaagagaggaccnccgagatgatgagagaagcaaactccgcntggcacaagggcggcgacagcagcagcagctcgatnccgcaaggggaggncggggacgaggatgccgaggaggccaaggcacgagcgtgggacgactggaaggacgacaaccctcgcggcgctggcaacaagaagctcacgccctgtggctagactgcaaatcgaagcacgctcgctgtgtgatcgtacggtgtttgactcgaccagtatttagtttgtatctgacgatcagtgtatttattatataggctgcttctgtaacagtgtgtttatacaccatccactgcagcttcttcacacaggtgtttccgaagttaactgggttagacaaactgtgttgtccaagcaagagtatctaacaaatagctacgtaactactt

SEQ ID NO: 11174 - protein, 493 aa, Zea mays subsp. mays
  peptide (1)..(493): Ceres Seq. ID no. 12413552
  misc_feature (133)..(481): Pfam Name: TAP42-like family Pfam Description: TAP42-like family
  misc_feature (133)..(493): Homolog of NCBI NO: 21553995 NR Description: PP2A regulatory subunit [Arabidopsis thaliana]
  misc_feature (133)..(493): Homolog of NCBI NO: 8809589 NR Description: PP2A regulatory subunit [Arabidopsis thaliana]
  misc_feature (71)..(316): Homolog of NCBI NO: 7489459 NR Description: chilling-induced protein - rice
  misc_feature (271)..(493): Homolog of NCBI NO: 7489459 NR Description: chilling-induced protein - rice
  misc_feature (71)..(493): Homolog of NCBI NO: 29367365 NR Description: PP2A regulatory subunit-like protein [Oryza
  misc_feature (133)..(493): Homolog of NCBI NO: 18423459 NR Description: PP2A regulatory subunit; protein id: At5g53000.1, by cDNA: 19116., supported by cDNA: gi_5107032 [Arabidopsis >gi|25369342|pir||T52307 serine/threonine protein phosphatase
  misc_feature (133)..(331): Homolog of NCBI NO: 19075479 NR Description: putative phosphatase component pombe] >gi|14286078|sp|Q9Y7T1|YCJ5_SCHPO Hypothetical protein
  misc_feature (392)..(486): Homolog of NCBI NO: 19075479 NR Description: putative phosphatase component pombe] >gi|14286078|sp|Q9Y7T1|YCJ5_SCHPO Hypothetical protein
  misc_feature (134)..(242): Homolog of NCBI NO: 40746142 NR Description: hypothetical protein AN0120.2 [Aspergillus
  misc_feature (392)..(486): Homolog of NCBI NO: 40746142 NR Description: hypothetical protein AN0120.2 [Aspergillus
  misc_feature (428)..(428): Xaa is any aa, unknown or other
  misc_feature (434)..(434): Xaa is any aa, unknown or other
  misc_feature (443)..(443): Xaa is any aa, unknown or other
  misc_feature (455)..(455): Xaa is any aa, unknown or other
  misc_feature (460)..(460): Xaa is any aa, unknown or other
EYQYPQCKSFILLQKKNLRPPREDASRASPSFLLFPAALLCPAPAPLGFCRRPLARFRAPRGNRPDRPVEMVDVEEVGNKMQSQMRLHADRMTPPPTSPSRRSSTGRRGFTPWPPAPPSTRMGSAPGLSCCGRCDEMVGRLGLFSPNETKDDVSTANLKYLLVPYYLAEMTEKMAQEDRIPVLKASQDHLKEFIALCEVLELIPEDELELSRQKQSDTMANRRAQKVARFKRQKAAETKLQEIRERKERRGRSLRATALSAPVEAGEEDDLEDDGEEEREAWLATISLAICKAFDLLDMLKKEEEMLLAVKERKAKDGNAFAREMLDERTKKAEAWHHKAASRVAYSKPADPITCATFAQDVIEGRASVSQAHEHKHQPLIFGPASLVGGGLTSERERMAAQVFQPSYRMPTMSIEEAGLREMKMMEXWQERTXEMMREANSXWHKGGDSSSSSXPQGEXGDEDAEEAKARAWDDWKDDNPRGAGNKKLTPCG

SEQ ID NO: 11175 - protein, 423 aa, Zea mays subsp. mays
  peptide (1)..(423): Ceres Seq. ID no. 12413553
  misc_feature (63)..(411): Pfam Name: TAP42-like family Pfam Description: TAP42-like family
  misc_feature (1)..(423): Homolog of NCBI NO: 29367365 NR Description: PP2A regulatory subunit-like protein [Oryza
  misc_feature (63)..(423): Homolog of NCBI NO: 18423459 NR Description: PP2A regulatory subunit; protein id: At5g53000.1, by cDNA: 19116., supported by cDNA: gi_5107032 [Arabidopsis >gi|25369342|pir||T52307 serine/threonine protein phosphatase
  misc_feature (63)..(423): Homolog of NCBI NO: 21553995 NR Description: PP2A regulatory subunit [Arabidopsis thaliana]
  misc_feature (63)..(423): Homolog of NCBI NO: 8809589 NR Description: PP2A regulatory subunit [Arabidopsis thaliana]
  misc_feature (1)..(246): Homolog of NCBI NO: 7489459 NR Description: chilling-induced protein - rice
  misc_feature (201)..(423): Homolog of NCBI NO: 7489459 NR Description: chilling-induced protein - rice
  misc_feature (63)..(261): Homolog of NCBI NO: 19075479 NR Description: putative phosphatase component pombe] >gi|14286078|sp|Q9Y7T1|YCJ5_SCHPO Hypothetical protein
  misc_feature (322)..(416): Homolog of NCBI NO: 19075479 NR Description: putative phosphatase component pombe] >gi|14286078|sp|Q9Y7T1|YCJ5_SCHPO Hypothetical protein
  misc_feature (64)..(172): Homolog of NCBI NO: 40746142 NR Description: hypothetical protein AN0120.2 [Aspergillus
  misc_feature (322)..(416): Homolog of NCBI NO: 40746142 NR Description: hypothetical protein AN0120.2 [Aspergillus
  misc_feature (358)..(358): Xaa is any aa, unknown or other
  misc_feature (364)..(364): Xaa is any aa, unknown or other
  misc_feature (373)..(373): Xaa is any aa, unknown or other
  misc_feature (385)..(385): Xaa is any aa, unknown or other
  misc_feature (390)..(390): Xaa is any aa, unknown or other
MVDVEEVGNKMQSQMRLHADRMTPPPTSPSRRSSTGRRGFTPWPPAPPSTRMGSAPGLSCCGRCDEMVGRLGLFSPNETKDDVSTANLKYLLVPYYLAEMTEKMAQEDRIPVLKASQDHLKEFIALCEVLELIPEDELELSRQKQSDTMANRRAQKVARFKRQKAAETKLQEIRERKERRGRSLRATALSAPVEAGEEDDLEDDGEEEREAWLATISLAICKAFDLLDMLKKEEEMLLAVKERKAKDGNAFAREMLDERTKKAEAWHHKAASRVAYSKPADPITCATFAQDVIEGRASVSQAHEHKHQPLIFGPASLVGGGLTSERERMAAQVFQPSYRMPTMSIEEAGLREMKMMEXWQERTXEMMREANSXWHKGGDSSSSSXPQGEXGDEDAEEAKARAWDDWKDDNPRGAGNKKLTPCG

SEQ ID NO: 11176 - protein, 413 aa, Zea mays subsp. mays
  peptide (1)..(413): Ceres Seq. ID no. 12413554
  misc_feature (53)..(401): Pfam Name: TAP42-like family Pfam Description: TAP42-like family
  misc_feature (1)..(413): Homolog of NCBI NO: 29367365 NR Description: PP2A regulatory subunit-like protein [Oryza
  misc_feature (53)..(413): Homolog of NCBI NO: 18423459 NR Description: PP2A regulatory subunit; protein id: At5g53000.1, by cDNA: 19116., supported by cDNA: gi_5107032 [Arabidopsis >gi|25369342|pir||T52307 serine/threonine protein phosphatase
  misc_feature (53)..(413): Homolog of NCBI NO: 21553995 NR Description: PP2A regulatory subunit [Arabidopsis thaliana]
  misc_feature (53)..(413): Homolog of NCBI NO: 8809589 NR Description: PP2A regulatory subunit [Arabidopsis thaliana]
  misc_feature (1)..(236): Homolog of NCBI NO: 7489459 NR Description: chilling-induced protein - rice
  misc_feature (191)..(413): Homolog of NCBI NO: 7489459 NR Description: chilling-induced protein - rice
  misc_feature (53)..(251): Homolog of NCBI NO: 19075479 NR Description: putative phosphatase component pombe] >gi|14286078|sp|Q9Y7T1|YCJ5_SCHPO Hypothetical protein
  misc_feature (312)..(406): Homolog of NCBI NO: 19075479 NR Description: putative phosphatase component pombe] >gi|14286078|sp|Q9Y7T1|YCJ5_SCHPO Hypothetical protein
  misc_feature (54)..(162): Homolog of NCBI NO: 40746142 NR Description: hypothetical protein AN0120.2 [Aspergillus
  misc_feature (312)..(406): Homolog of NCBI NO: 40746142 NR Description: hypothetical protein AN0120.2 [Aspergillus
  misc_feature (348)..(348): Xaa is any aa, unknown or other
  misc_feature (354)..(354): Xaa is any aa, unknown or other
  misc_feature (363)..(363): Xaa is any aa, unknown or other
  misc_feature (375)..(375): Xaa is any aa, unknown or other
  misc_feature (380)..(380): Xaa is any aa, unknown or other
MQSQMRLHADRMTPPPTSPSRRSSTGRRGFTPWPPAPPSTRMGSAPGLSCCGRCDEMVGRLGLFSPNETKDDVSTANLKYLLVPYYLAEMTEKMAQEDRIPVLKASQDHLKEFIALCEVLELIPEDELELSRQKQSDTMANRRAQKVARFKRQKAAETKLQEIRERKERRGRSLRATALSAPVEAGEEDDLEDDGEEEREAWLATISLAICKAFDLLDMLKKEEEMLLAVKERKAKDGNAFAREMLDERTKKAEAWHHKAASRVAYSKPADPITCATFAQDVIEGRASVSQAHEHKHQPLIFGPASLVGGGLTSERERMAAQVFQPSYRMPTMSIEEAGLREMKMMEXWQERTXEMMREANSXWHKGGDSSSSSXPQGEXGDEDAEEAKARAWDDWKDDNPRGAGNKKLTPCG

SEQ ID NO: 11177 - DNA, 1140 bp, Zea mays subsp. mays
  misc_feature (1)..(1140): Ceres Seq. ID no. 12411938
  misc_feature: MA Experiment ID: 108504 Result: Up-regulated in Transcription
  misc_feature: MA Experiment 108504 PARAMETER Experiment Name: Zm_Drought_P Parameter: Age (day) Value: 8
  misc_feature: MA Experiment 108504 PARAMETER Experiment Name: Zm_Drought_P Parameter: Organism Value: Zea mays
  misc_feature: MA Experiment 108504 PARAMETER Experiment Name: Zm_Drought_P Parameter: Plant Line Value: 35A19
  misc_feature: MA Experiment 108504 PARAMETER Experiment Name: Zm_Drought_P Parameter: Timepoint (hr) Value: 12
  misc_feature: MA Experiment 108504 PARAMETER Experiment Name: Zm_Drought_P Parameter: Tissue Value: Aerial
  misc_feature: MA Experiment 108504 PARAMETER Experiment Name: Zm_Drought_P Parameter: Treatment Value: Drought vs. No Drought
  misc_feature: MA Experiment ID: 108523 Result: Up-regulated in Transcription
  misc_feature: MA Experiment 108523 PARAMETER Experiment Name: Zm_42deg_Heat_P Parameter: Age (day) Value: 8
  misc_feature: MA Experiment 108523 PARAMETER Experiment Name: Zm_42deg_Heat_P Parameter: Organism Value: Zea mays
  misc_feature: MA Experiment 108523 PARAMETER Experiment Name: Zm_42deg_Heat_P Parameter: Plant Line Value: 35A19
  misc_feature: MA Experiment 108523 PARAMETER Experiment Name: Zm_42deg_Heat_P Parameter: Temperature (deg C) Value: 42 vs. 22
  misc_feature: MA Experiment 108523 PARAMETER Experiment Name: Zm_42deg_Heat_P Parameter: Timepoint (hr) Value: 6
  misc_feature: MA Experiment 108523 PARAMETER Experiment Name: Zm_42deg_Heat_P Parameter: Tissue Value: Aerial
  misc_feature: MA Experiment ID: 108526 Result: Up-regulated in Transcription
  misc_feature: MA Experiment 108526 PARAMETER Experiment Name: Zm_5mM_NO_P Parameter: Age (day) Value: 8
  misc_feature: MA Experiment 108526 PARAMETER Experiment Name: Zm_5mM_NO_P Parameter: Organism Value: Zea mays
  misc_feature: MA Experiment 108526 PARAMETER Experiment Name: Zm_5mM_NO_P Parameter: Plant Line Value: 35A19
  misc_feature: MA Experiment 108526 PARAMETER Experiment Name: Zm_5mM_NO_P Parameter: Timepoint (hr) Value: 1
  misc_feature: MA Experiment 108526 PARAMETER Experiment Name: Zm_5mM_NO_P Parameter: Tissue Value: Aerial
  misc_feature: MA Experiment 108526 PARAMETER Experiment Name: Zm_5mM_NO_P Parameter: Treatment Value: 5mM NO vs. No Treatment
  misc_feature: MA Experiment ID: 108527 Result: Up-regulated in Transcription
  misc_feature: MA Experiment 108527 PARAMETER Experiment Name: Zm_5mM_NO_P Parameter: Age (day) Value: 8
  misc_feature: MA Experiment 108527 PARAMETER Experiment Name: Zm_5mM_NO_P Parameter: Organism Value: Zea mays
  misc_feature: MA Experiment 108527 PARAMETER Experiment Name: Zm_5mM_NO_P Parameter: Plant Line Value: 35A19
  misc_feature: MA Experiment 108527 PARAMETER Experiment Name: Zm_5mM_NO_P Parameter: Timepoint (hr) Value: 6
  misc_feature: MA Experiment 108527 PARAMETER Experiment Name: Zm_5mM_NO_P Parameter: Tissue Value: Aerial
  misc_feature: MA Experiment 108527 PARAMETER Experiment Name: Zm_5mM_NO_P Parameter: Treatment Value: 5mM NO vs. No Treatment
  misc_feature: MA Experiment ID: 108532 Result: Up-regulated in Transcription
  misc_feature: MA Experiment 108532 PARAMETER Experiment Name: Zm_20uM_KNO3_H-to-L_P Parameter: Age (day) Value: 11
  misc_feature: MA Experiment 108532 PARAMETER Experiment Name: Zm_20uM_KNO3_H-to-L_P Parameter: Organism Value: Zea mays
  misc_feature: MA Experiment 108532 PARAMETER Experiment Name: Zm_20uM_KNO3_H-to-L_P Parameter: Plant Line Value: 35A19
  misc_feature: MA Experiment 108532 PARAMETER Experiment Name: Zm_20uM_KNO3_H-to-L_P Parameter: Timepoint (hr) Value: 16
  misc_feature: MA Experiment 108532 PARAMETER Experiment Name: Zm_20uM_KNO3_H-to-L_P Parameter: Tissue Value: Roots
  misc_feature: MA Experiment 108532 PARAMETER Experiment Name: Zm_20uM_KNO3_H-to-L_P Parameter: Treatment Value: 20uM KNO3 vs. 60mM KNO3
  misc_feature: MA Experiment ID: 108548 Result: Up-regulated in Transcription
  misc_feature: MA Experiment 108548 PARAMETER Experiment Name: Zm_20uM_KNO3_H-to-L_P Parameter: Age (day) Value: 11
  misc_feature: MA Experiment 108548 PARAMETER Experiment Name: Zm_20uM_KNO3_H-to-L_P Parameter: Organism Value: Zea mays
  misc_feature: MA Experiment 108548 PARAMETER Experiment Name: Zm_20uM_KNO3_H-to-L_P Parameter: Plant Line Value: 35A19
  misc_feature: MA Experiment 108548 PARAMETER Experiment Name: Zm_20uM_KNO3_H-to-L_P Parameter: Timepoint (hr) Value: 4
  misc_feature: MA Experiment 108548 PARAMETER Experiment Name: Zm_20uM_KNO3_H-to-L_P Parameter: Tissue Value: Roots
  misc_feature: MA Experiment 108548 PARAMETER Experiment Name: Zm_20uM_KNO3_H-to-L_P Parameter: Treatment Value: 20uM KNO3 vs. 60mM KNO3
  misc_feature: MA Experiment ID: 108556 Result: Up-regulated in Transcription
  misc_feature: MA Experiment 108556 PARAMETER Experiment Name: Zm_Drought_P Parameter: Age (day) Value: 9
  misc_feature: MA Experiment 108556 PARAMETER Experiment Name: Zm_Drought_P Parameter: Organism Value: Zea mays
  misc_feature: MA Experiment 108556 PARAMETER Experiment Name: Zm_Drought_P Parameter: Plant Line Value: 35A19
  misc_feature: MA Experiment 108556 PARAMETER Experiment Name: Zm_Drought_P Parameter: Timepoint (hr) Value: 24
  misc_feature: MA Experiment 108556 PARAMETER Experiment Name: Zm_Drought_P Parameter: Tissue Value: Aerial
  misc_feature: MA Experiment 108556 PARAMETER Experiment Name: Zm_Drought_P Parameter: Treatment Value: Drought vs. No Drought
  misc_feature: MA Experiment ID: 108559 Result: Up-regulated in Transcription
  misc_feature: MA Experiment 108559 PARAMETER Experiment Name: Zm_5mM_NO_P Parameter: Age (day) Value: 8
  misc_feature: MA Experiment 108559 PARAMETER Experiment Name: Zm_5mM_NO_P Parameter: Organism Value: Zea mays
  misc_feature: MA Experiment 108559 PARAMETER Experiment Name: Zm_5mM_NO_P Parameter: Plant Line Value: 35A19
  misc_feature: MA Experiment 108559 PARAMETER Experiment Name: Zm_5mM_NO_P Parameter: Timepoint (hr) Value: 12
  misc_feature: MA Experiment 108559 PARAMETER Experiment Name: Zm_5mM_NO_P Parameter: Tissue Value: Aerial
  misc_feature: MA Experiment 108559 PARAMETER Experiment Name: Zm_5mM_NO_P Parameter: Treatment Value: 5mM NO vs. No Treatment
  misc_feature: MA Experiment ID: 20000478 Result: Up-regulated in Transcription
  misc_feature: MA Experiment 20000478 PARAMETER Experiment Name: Zm_5mM_SA_P Parameter: Age (day) Value: 11
  misc_feature: MA Experiment 20000478 PARAMETER Experiment Name: Zm_5mM_SA_P Parameter: Organism Value: Zea mays
  misc_feature: MA Experiment 20000478 PARAMETER Experiment Name: Zm_5mM_SA_P Parameter: Plant Line Value: 35A19
  misc_feature: MA Experiment 20000478 PARAMETER Experiment Name: Zm_5mM_SA_P Parameter: Timepoint (hr) Value: 72
  misc_feature: MA Experiment 20000478 PARAMETER Experiment Name: Zm_5mM_SA_P Parameter: Tissue Value: Aerial
  misc_feature: MA Experiment 20000478 PARAMETER Experiment Name: Zm_5mM_SA_P Parameter: Treatment Value: 5mM SA vs. No Treatment
  misc_feature: MA Experiment ID: 20000487 Result: Up-regulated in Transcription
  misc_feature: MA Experiment 20000487 PARAMETER Experiment Name: Zm_50mM_NH4NO3_L_to_H_P Parameter: Organism Value: Zea mays
  misc_feature: MA Experiment 20000487 PARAMETER Experiment Name: Zm_50mM_NH4NO3_L_to_H_P Parameter: Timepoint (hr) Value: 4
  misc_feature: MA Experiment 20000487 PARAMETER Experiment Name: Zm_50mM_NH4NO3_L_to_H_P Parameter: Tissue Value: Leaves
  misc_feature: MA Experiment 20000487 PARAMETER Experiment Name: Zm_50mM_NH4NO3_L_to_H_P Parameter: Treatment Value: 50mM NH4NO3 vs. 100mM Mannitol
  misc_feature: MA Experiment ID: 20000535 Result: Up-regulated in Transcription
  misc_feature: MA Experiment 20000535 PARAMETER Experiment Name: Zm_Hybrid_Seed_Dev_P Parameter: DAP Value: 30 vs. 12
  misc_feature: MA Experiment 20000535 PARAMETER Experiment Name: Zm_Hybrid_Seed_Dev_P Parameter: Organism Value: Zea mays
  misc_feature: MA Experiment 20000535 PARAMETER Experiment Name: Zm_Hybrid_Seed_Dev_P Parameter: Plant Line Value: 35A19
  misc_feature: MA Experiment 20000535 PARAMETER Experiment Name: Zm_Hybrid_Seed_Dev_P Parameter: Tissue Value: Embryo vs. Unfert Floret
gcccgtcctctcggtctccgaccacgactgtgcgccttcctaagtaaccctagctcggcgccctccctccgcgacatccaagcccggcaatctcatcgtcgcgcttgcaccgttacgcagtgcgacctctgcgtcttcgaatccaggtctctgcaggaaggtagagaggaggaggaggtttgtggcaggatttaaccagcccaatggttccatccgagatggggagcgtcgccaccgccgtcagcacgcctgctgcggacaagctgctccatgggcctatctctggcaagaagtgcaagaaaccaggcccgaggaagattcataaggctgagagggagaagcttaaacgagaccacctaaatgatctctttgttgagctgggtaatatgctagaagcagatagacagaacaatgggaaagcatgcatactgactgacactactcggatactaagagacctgcttgttcaagtagactctcttcgaaaggaacatagcgacctacaaaacgaatctcattatgtaacaatggagagggatgagatgcaggatgaaaacggcgtgctccgcaaagaaatttcagagcttcaaaacgagttgacaatgcgggtttcaggcagtccagcaggttggggccatggcaccgccagatcagatccccctcttcctcactcaaccgcagtgttctcgtcggagcaggcgatgcaaccacccaccattgcaagcgttgtattcccgttgcagcagccactggcaccatcagcaatgaccaaaccacctcatgctgcaccaccactcgaactgaagctctttccagaagtggcatttgccgaaggccatgagccgtgtgaagaccacaaagctcccaaccatgtggcacgaccacaggcaaggtacccaacgcaatcagcctcatggcccgtaaacctgttctctggccttccacgaatggaagatgagcaatgcagtagcagcacaagcggcagcagcagagaggataacacagatatagaatgagtggatcagctcctacaatcaaagagtctctgttttgagtctagtggatgtaaatttgaatctcctttttggatttcagaacgatagattatactctgttggaaataggacccctcccattgct

SEQ ID NO: 11178 - protein, 270 aa, Zea mays subsp. mays
  peptide (1)..(270): Ceres Seq. ID no. 12411939
  misc_feature (37)..(87): Pfam Name: Helix-loop-helix DNA-binding domain Pfam Description: Helix-loop-helix DNA-binding domain
  misc_feature (1)..(253): Homolog of NCBI NO: 18071393 NR Description: putative amelogenin precursor [Oryza sativa]
  misc_feature (1)..(265): Homolog of NCBI NO: 33146544 NR Description: amelogenin precursor-like protein [Oryza sativa
  misc_feature (97)..(268): Homolog of NCBI NO: 34913194 NR Description: contains EST C74688(E50368)~similar to amelogenin
  misc_feature (1)..(106): Homolog of NCBI NO: 34913194 NR Description: contains EST C74688(E50368)~similar to amelogenin
  misc_feature (1)..(265): Homolog of NCBI NO: 34391901 NR Description: putative transcription factor bHLH [Oryza sativa
  misc_feature (15)..(242): Homolog of NCBI NO: 15228207 NR Description: hypothetical protein; protein id: At3g47640.1, by cDNA: gi_19423957, supported by cDNA: gi_21280820 [Arabidopsis
  misc_feature (37)..(196): Homolog of NCBI NO: 15230975 NR Description: bHLH protein; protein id: At3g19860.1, supported cDNA: gi_17473643, supported by cDNA: gi_20148748 [Arabidopsis >gi|17473644|gb|AAL38283.1| unknown protein [Arabidopsis
  misc_feature (37)..(196): Homolog of NCBI NO: 11994197 NR Description: emb|CAA18500.1~gene_id:MPN9.10~similar to unknown
  misc_feature (1)..(166): Homolog of NCBI NO: 7487183 NR Description: hypothetical protein T19K4.190 - Arabidopsis
  misc_feature (1)..(136): Homolog of NCBI NO: 30690568 NR Description: bHLH protein family [Arabidopsis thaliana]
MVPSEMGSVATAVSTPAADKLLHGPISGKKCKKPGPRKIHKAEREKLKRDHLNDLFVELGNMLEADRQNNGKACILTDTTRILRDLLVQVDSLRKEHSDLQNESHYVTMERDEMQDENGVLRKEISELQNELTMRVSGSPAGWGHGTARSDPPLPHSTAVFSSEQAMQPPTIASVVFPLQQPLAPSAMTKPPHAAPPLELKLFPEVAFAEGHEPCEDHKAPNHVARPQARYPTQSASWPVNLFSGLPRMEDEQCSSSTSGSSREDNTDIE

SEQ ID NO: 11179 - protein, 265 aa, Zea mays subsp. mays
  peptide (1)..(265): Ceres Seq. ID no. 12411940
  misc_feature (32)..(82): Pfam Name: Helix-loop-helix DNA-binding domain Pfam Description: Helix-loop-helix DNA-binding domain
  misc_feature (1)..(248): Homolog of NCBI NO: 18071393 NR Description: putative amelogenin precursor [Oryza sativa]
  misc_feature (1)..(260): Homolog of NCBI NO: 33146544 NR Description: amelogenin precursor-like protein [Oryza sativa
  misc_feature (92)..(263): Homolog of NCBI NO: 34913194 NR Description: contains EST C74688(E50368)~similar to amelogenin
  misc_feature (1)..(101): Homolog of NCBI NO: 34913194 NR Description: contains EST C74688(E50368)~similar to amelogenin
  misc_feature (1)..(260): Homolog of NCBI NO: 34391901 NR Description: putative transcription factor bHLH [Oryza sativa
  misc_feature (10)..(237): Homolog of NCBI NO: 15228207 NR Description: hypothetical protein; protein id: At3g47640.1, by cDNA: gi_19423957, supported by cDNA: gi_21280820 [Arabidopsis
  misc_feature (32)..(191): Homolog of NCBI NO: 15230975 NR Description: bHLH protein; protein id: At3g19860.1, supported cDNA: gi_17473643, supported by cDNA: gi_20148748 [Arabidopsis >gi|17473644|gb|AAL38283.1| unknown protein [Arabidopsis
  misc_feature (32)..(191): Homolog of NCBI NO: 11994197 NR Description: emb|CAA18500.1~gene_id:MPN9.10~similar to unknown
  misc_feature (1)..(161): Homolog of NCBI NO: 7487183 NR Description: hypothetical protein T19K4.190 - Arabidopsis
  misc_feature (1)..(131): Homolog of NCBI NO: 30690568 NR Description: bHLH protein family [Arabidopsis thaliana]
MGSVATAVSTPAADKLLHGPISGKKCKKPGPRKIHKAEREKLKRDHLNDLFVELGNMLEADRQNNGKACILTDTTRILRDLLVQVDSLRKEHSDLQNESHYVTMERDEMQDENGVLRKEISELQNELTMRVSGSPAGWGHGTARSDPPLPHSTAVFSSEQAMQPPTIASVVFPLQQPLAPSAMTKPPHAAPPLELKLFPEVAFAEGHEPCEDHKAPNHVARPQARYPTQSASWPVNLFSGLPRMEDEQCSSSTSGSSREDNTDIE

SEQ ID NO: 11180 - protein, 209 aa, Zea mays subsp. mays
  peptide (1)..(209): Ceres Seq. ID no. 12411941
  misc_feature (1)..(192): Homolog of NCBI NO: 18071393 NR Description: putative amelogenin precursor [Oryza sativa]
  misc_feature (1)..(204): Homolog of NCBI NO: 33146544 NR Description: amelogenin precursor-like protein [Oryza sativa
  misc_feature (36)..(207): Homolog of NCBI NO: 34913194 NR Description: contains EST C74688(E50368)~similar to amelogenin
  misc_feature (1)..(45): Homolog of NCBI NO: 34913194 NR Description: contains EST C74688(E50368)~similar to amelogenin
  misc_feature (1)..(204): Homolog of NCBI NO: 34391901 NR Description: putative transcription factor bHLH [Oryza sativa
  misc_feature (1)..(181): Homolog of NCBI NO: 15228207 NR Description: hypothetical protein; protein id: At3g47640.1, by cDNA: gi_19423957, supported by cDNA: gi_21280820 [Arabidopsis
  misc_feature (1)..(135): Homolog of NCBI NO: 15230975 NR Description: bHLH protein; protein id: At3g19860.1, supported cDNA: gi_17473643, supported by cDNA: gi_20148748 [Arabidopsis >gi|17473644|gb|AAL38283.1| unknown protein [Arabidopsis
  misc_feature (1)..(135): Homolog of NCBI NO: 11994197 NR Description: emb|CAA18500.1~gene_id:MPN9.10~similar to unknown
  misc_feature (1)..(105): Homolog of NCBI NO: 7487183 NR Description: hypothetical protein T19K4.190 - Arabidopsis
  misc_feature (1)..(75): Homolog of NCBI NO: 30690568 NR Description: bHLH protein family [Arabidopsis thaliana]
MLEADRQNNGKACILTDTTRILRDLLVQVDSLRKEHSDLQNESHYVTMERDEMQDENGVLRKEISELQNELTMRVSGSPAGWGHGTARSDPPLPHSTAVFSSEQAMQPPTIASVVFPLQQPLAPSAMTKPPHAAPPLELKLFPEVAFAEGHEPCEDHKAPNHVARPQARYPTQSASWPVNLFSGLPRMEDEQCSSSTSGSSREDNTDIE

SEQ ID NO: 11181 - DNA, 1762 bp, Zea mays subsp. mays
  misc_feature (1)..(1762): Ceres Seq. ID no. 12411934
  misc_feature: MA Experiment ID: 108523 Result: Up-regulated in Transcription
  misc_feature: MA Experiment 108523 PARAMETER Experiment Name: Zm_42deg_Heat_P Parameter: Age (day) Value: 8
  misc_feature: MA Experiment 108523 PARAMETER Experiment Name: Zm_42deg_Heat_P Parameter: Organism Value: Zea mays
  misc_feature: MA Experiment 108523 PARAMETER Experiment Name: Zm_42deg_Heat_P Parameter: Plant Line Value: 35A19
  misc_feature: MA Experiment 108523 PARAMETER Experiment Name: Zm_42deg_Heat_P Parameter: Temperature (deg C) Value: 42 vs. 22
  misc_feature: MA Experiment 108523 PARAMETER Experiment Name: Zm_42deg_Heat_P Parameter: Timepoint (hr) Value: 6
  misc_feature: MA Experiment 108523 PARAMETER Experiment Name: Zm_42deg_Heat_P Parameter: Tissue Value: Aerial
  misc_feature: MA Experiment ID: 108535 Result: Up-regulated in Transcription
  misc_feature: MA Experiment 108535 PARAMETER Experiment Name: Zm_Meristem_P Parameter: Age (day) Value: 8
  misc_feature: MA Experiment 108535 PARAMETER Experiment Name: Zm_Meristem_P Parameter: Organism Value: Zea mays
  misc_feature: MA Experiment 108535 PARAMETER Experiment Name: Zm_Meristem_P Parameter: Plant Line Value: 35A19
  misc_feature: MA Experiment 108535 PARAMETER Experiment Name: Zm_Meristem_P Parameter: Tissue Value: Root Meristem vs. Above Root Meristem
  misc_feature: MA Experiment ID: 108544 Result: Down-regulated in Transcription
actgacaaaaccctggctcgttccccgctctacaggcctaaacctcacctcgccggcggccaaaaatcgaagcaccgaaccagcggctgcggcagcggcggcggcgcggcaagggttgaccatggcggagctaaagcggttgtcggagagccgtgacctgacgcggattgagcgcatcggtgcgcactcccacatccgggggctagggttggactcgtccatggaggcgcgcgatacctcggagggcatggtcgggcagctccacgcgcgccgcgcctcggggctcatactccagctcatccgccagggcaagattgccggccgcgctgtgctccttgcgggccagcccggcaccggcaagaccgcgctcgccatgggtatcgccaagtcgcttggtgcggagacacccttcgcctccgtcgctgcctcggagctcttctcgctcgacctctccaagacggaggctctgacgcaggccttccgccgcgccataggcgtccgcatcaaggaggaggccgagatcattgagggcgaggtcgtggagatctcaatcgaccgccctttgtcggcctctggcgttggcggcagctcagttgctccttctggtgcaactgctgctggtaagtcagggcggctcacgctgaagaccacggacatggagactgtgtacgagctcgggggaaagatgattgaggctcttgggaaggagaaggtgcagagtggagatgtgattgcgcttgacaaggcctccgggaaggtcaccaagcttggccgctccattgggaggtcgcgggattatgatgccgtaggtccacacaccaagtttgtcaagtgtcctgatggtgagctccagaagcgcaaggaggtcgtgcactgtgtcaccttacatgagattgatgtcatcaatagcaggacacagggttttcttgcactgttcactggtgacactggtgaaattcgtgcagaggttcgggagcagattgacacaaaggttgcagagtggagagaggaaggaaaagctgatattgtccctggtgttctgttcatcgatgaagtccacatgctagacatcgagtgcttctccttcctcaaccgcgcattggaaaacgacatggcgccgatcttagtaatcgcaacaaaccgagggatcacgtctatccgtgggacaaactaccgctcgccgcatgggatcccgccagacttccttgaccggctactgattatcacgacgcatccctacacggaggatgagatccggaagatcctggatatccggtgcgacgaggaagacgtggagatgtccgcggacgctaaggttctgctcaccaagatcggtgtggagacctctctgcggtatgccatcaaccttatcacatctgccgcgctagcctgccagaggcgcaaggggaaggtggtcgagatggaggacattagccgggtgtaccagctgttcctggacgtgaagcgatcgacgcagtacctgatggagtaccagagccagtacatgttcaacgaagtgccggggcaagcagatggagaggacgccatgcaatcgtagatgaactttcctttacatggtgtgtgtgggttatagtatgtaccgcgtggcgtatatttatgatgcgtctttcttgttcaggttgctgttaccctgacccaaggcgcggtgtgtgcggtggactgtttgttagcttgatgtaggtgactatgcaactcaatctatcttattaaattcaccccggttggaaaccgtggtttgttt

SEQ ID NO: 11182 - protein, 518 aa, Zea mays subsp. mays
  peptide (1)..(518): Ceres Seq. ID no. 12411935
  misc_feature (161)..(487): Pfam Name: TIP49 C-terminus Pfam Description: TIP49 C-terminus
  misc_feature (41)..(517): Homolog of NCBI NO: 15240788 NR Description: RuvB DNA helicase-like protein; protein id:
  misc_feature (41)..(507): Homolog of NCBI NO: 15229623 NR Description: RuvB DNA helicase - like protein; protein id:
  misc_feature (40)..(506): Homolog of NCBI NO: 30316328 NR Description: RuvB-like 2 (Reptin)
  misc_feature (40)..(506): Homolog of NCBI NO: 29126859 NR Description: Similar to RuvB-like protein 2 [Xenopus laevis]
  misc_feature (40)..(509): Homolog of NCBI NO: 6755382 NR Description: RuvB-like protein 2 [Mus musculus]
  misc_feature (40)..(509): Homolog of NCBI NO: 5730023 NR Description: RuvB-like 2; erythrocyte cytosolic protein,
  misc_feature (46)..(505): Homolog of NCBI NO: 27819634 NR Description: RuvB-like protein 2 [Danio rerio]
  misc_feature (41)..(515): Homolog of NCBI NO: 17737635 NR Description: reptin CG9750-PA
  misc_feature (40)..(451): Homolog of NCBI NO: 4929561 NR Description: CGI-46 protein [Homo sapiens]
  misc_feature (46)..(507): Homolog of NCBI NO: 23480914 NR Description: Arabidopsis thaliana At5g67630/K9I9_20
LTKPWLVPRSTGLNLTSPAAKNRSTEPAAAAAAAARQGLTMAELKRLSESRDLTRIERIGAHSHIRGLGLDSSMEARDTSEGMVGQLHARRASGLILQLIRQGKIAGRAVLLAGQPGTGKTALAMGIAKSLGAETPFASVAASELFSLDLSKTEALTQAFRRAIGVRIKEEAEIIEGEVVEISIDRPLSASGVGGSSVAPSGATAAGKSGRLTLKTTDMETVYELGGKMIEALGKEKVQSGDVIALDKASGKVTKLGRSIGRSRDYDAVGPHTKFVKCPDGELQKRKEVVHCVTLHEIDVINSRTQGFLALFTGDTGEIRAEVREQIDTKVAEWREEGKADIVPGVLFIDEVHMLDIECFSFLNRALENDMAPILVIATNRGITSIRGTNYRSPHGIPPDFLDRLLIITTHPYTEDEIRKILDIRCDEEDVEMSADAKVLLTKIGVETSLRYAINLITSAALACQRRKGKVVEMEDISRVYQLFLDVKRSTQYLMEYQSQYMFNEVPGQADGEDAMQS

SEQ ID NO: 11183 - protein, 478 aa, Zea mays subsp. mays
  peptide (1)..(478): Ceres Seq. ID no. 12411936
  misc_feature (121)..(447): Pfam Name: TIP49 C-terminus Pfam Description: TIP49 C-terminus
  misc_feature (1)..(477): Homolog of NCBI NO: 15240788 NR Description: RuvB DNA helicase-like protein; protein id:
  misc_feature (1)..(467): Homolog of NCBI NO: 15229623 NR Description: RuvB DNA helicase - like protein; protein id:
  misc_feature (1)..(466): Homolog of NCBI NO: 30316328 NR Description: RuvB-like 2 (Reptin)
  misc_feature (1)..(466): Homolog of NCBI NO: 29126859 NR Description: Similar to RuvB-like protein 2 [Xenopus laevis]
  misc_feature (1)..(469): Homolog of NCBI NO: 6755382 NR Description: RuvB-like protein 2 [Mus musculus]
  misc_feature (1)..(469): Homolog of NCBI NO: 5730023 NR Description: RuvB-like 2; erythrocyte cytosolic protein,
  misc_feature (6)..(465): Homolog of NCBI NO: 27819634 NR Description: RuvB-like protein 2 [Danio rerio]
  misc_feature (1)..(475): Homolog of NCBI NO: 17737635 NR Description: reptin CG9750-PA
  misc_feature (1)..(411): Homolog of NCBI NO: 4929561 NR Description: CGI-46 protein [Homo sapiens]
  misc_feature (6)..(467): Homolog of NCBI NO: 23480914 NR Description: Arabidopsis thaliana At5g67630/K9I9_20
MAELKRLSESRDLTRIERIGAHSHIRGLGLDSSMEARDTSEGMVGQLHARRASGLILQLIRQGKIAGRAVLLAGQPGTGKTALAMGIAKSLGAETPFASVAASELFSLDLSKTEALTQAFRRAIGVRIKEEAEIIEGEVVEISIDRPLSASGVGGSSVAPSGATAAGKSGRLTLKTTDMETVYELGGKMIEALGKEKVQSGDVIALDKASGKVTKLGRSIGRSRDYDAVGPHTKFVKCPDGELQKRKEVVHCVTLHEIDVINSRTQGFLALFTGDTGEIRAEVREQIDTKVAEWREEGKADIVPGVLFIDEVHMLDIECFSFLNRALENDMAPILVIATNRGITSIRGTNYRSPHGIPPDFLDRLLIITTHPYTEDEIRKILDIRCDEEDVEMSADAKVLLTKIGVETSLRYAINLITSAALACQRRKGKVVEMEDISRVYQLFLDVKRSTQYLMEYQSQYMFNEVPGQADGEDAMQS

SEQ ID NO: 11184 - protein, 445 aa, Zea mays subsp. mays
  peptide (1)..(445): Ceres Seq. ID no. 12411937
  misc_feature (88)..(414): Pfam Name: TIP49 C-terminus Pfam Description: TIP49 C-terminus
  misc_feature (1)..(444): Homolog of NCBI NO: 15240788 NR Description: RuvB DNA helicase-like protein; protein id:
  misc_feature (1)..(434): Homolog of NCBI NO: 15229623 NR Description: RuvB DNA helicase - like protein; protein id:
  misc_feature (1)..(433): Homolog of NCBI NO: 30316328 NR Description: RuvB-like 2 (Reptin)
  misc_feature (1)..(433): Homolog of NCBI NO: 29126859 NR Description: Similar to RuvB-like protein 2 [Xenopus laevis]
  misc_feature (1)..(436): Homolog of NCBI NO: 6755382 NR Description: RuvB-like protein 2 [Mus musculus]
  misc_feature (1)..(436): Homolog of NCBI NO: 5730023 NR Description: RuvB-like 2; erythrocyte cytosolic protein,
  misc_feature (1)..(432): Homolog of NCBI NO: 27819634 NR Description: RuvB-like protein 2 [Danio rerio]
  misc_feature (1)..(442): Homolog of NCBI NO: 17737635 NR Description: reptin CG9750-PA
  misc_feature (1)..(378): Homolog of NCBI NO: 4929561 NR Description: CGI-46 protein [Homo sapiens]
  misc_feature (1)..(434): Homolog of NCBI NO: 23480914 NR Description: Arabidopsis thaliana At5g67630/K9I9_20
MEARDTSEGMVGQLHARRASGLILQLIRQGKIAGRAVLLAGQPGTGKTALAMGIAKSLGAETPFASVAASELFSLDLSKTEALTQAFRRAIGVRIKEEAEIIEGEVVEISIDRPLSASGVGGSSVAPSGATAAGKSGRLTLKTTDMETVYELGGKMIEALGKEKVQSGDVIALDKASGKVTKLGRSIGRSRDYDAVGPHTKFVKCPDGELQKRKEVVHCVTLHEIDVINSRTQGFLALFTGDTGEIRAEVREQIDTKVAEWREEGKADIVPGVLFIDEVHMLDIECFSFLNRALENDMAPILVIATNRGITSIRGTNYRSPHGIPPDFLDRLLIITTHPYTEDEIRKILDIRCDEEDVEMSADAKVLLTKIGVETSLRYAINLITSAALACQRRKGKVVEMEDISRVYQLFLDVKRSTQYLMEYQSQYMFNEVPGQADGEDAMQS

SEQ ID NO: 11185 - DNA, 1072 bp, Zea mays subsp. mays; identical to SEQ ID NO: 10515
  misc_feature (1)..(1072): Ceres Seq. ID no. 12340576
  misc_feature: MA Experiment ID: 108523 Result: Down-regulated in Transcription
  misc_feature: MA Experiment 108523 PARAMETER Experiment Name: Zm_42deg_Heat_P Parameter: Age (day) Value: 8
  misc_feature: MA Experiment 108523 PARAMETER Experiment Name: Zm_42deg_Heat_P Parameter: Organism Value: Zea mays
  misc_feature: MA Experiment 108523 PARAMETER Experiment Name: Zm_42deg_Heat_P Parameter: Plant Line Value: 35A19
  misc_feature: MA Experiment 108523 PARAMETER Experiment Name: Zm_42deg_Heat_P Parameter: Temperature (deg C) Value: 42 vs. 22
  misc_feature: MA Experiment 108523 PARAMETER Experiment Name: Zm_42deg_Heat_P Parameter: Timepoint (hr) Value: 6
  misc_feature: MA Experiment 108523 PARAMETER Experiment Name: Zm_42deg_Heat_P Parameter: Tissue Value: Aerial
  misc_feature: MA Experiment ID: 108535 Result: Up-regulated in Transcription
  misc_feature: MA Experiment 108535 PARAMETER Experiment Name: Zm_Meristem_P Parameter: Age (day) Value: 8
  misc_feature: MA Experiment 108535 PARAMETER Experiment Name: Zm_Meristem_P Parameter: Organism Value: Zea mays
  misc_feature: MA Experiment 108535 PARAMETER Experiment Name: Zm_Meristem_P Parameter: Plant Line Value: 35A19
  misc_feature: MA Experiment 108535 PARAMETER Experiment Name: Zm_Meristem_P Parameter: Tissue Value: Root Meristem vs. Above Root Meristem
  misc_feature: MA Experiment ID: 108543 Result: Up-regulated in Transcription
  misc_feature: MA Experiment ID: 108548 Result: Up-regulated in Transcription
  misc_feature: MA Experiment 108548 PARAMETER Experiment Name: Zm_20uM_KNO3_H-to-L_P Parameter: Age (day) Value: 11
  misc_feature: MA Experiment 108548 PARAMETER Experiment Name: Zm_20uM_KNO3_H-to-L_P Parameter: Organism Value: Zea mays
  misc_feature: MA Experiment 108548 PARAMETER Experiment Name: Zm_20uM_KNO3_H-to-L_P Parameter: Plant Line Value: 35A19
  misc_feature: MA Experiment 108548 PARAMETER Experiment Name: Zm_20uM_KNO3_H-to-L_P Parameter: Timepoint (hr) Value: 4
  misc_feature: MA Experiment 108548 PARAMETER Experiment Name: Zm_20uM_KNO3_H-to-L_P Parameter: Tissue Value: Roots
  misc_feature: MA Experiment 108548 PARAMETER Experiment Name: Zm_20uM_KNO3_H-to-L_P Parameter: Treatment Value: 20uM KNO3 vs. 60mM KNO3
  misc_feature: MA Experiment ID: 108556 Result: Down-regulated in Transcription
  misc_feature: MA Experiment 108556 PARAMETER Experiment Name: Zm_Drought_P Parameter: Age (day) Value: 9
  misc_feature: MA Experiment 108556 PARAMETER Experiment Name: Zm_Drought_P Parameter: Organism Value: Zea mays
  misc_feature: MA Experiment 108556 PARAMETER Experiment Name: Zm_Drought_P Parameter: Plant Line Value: 35A19
  misc_feature: MA Experiment 108556 PARAMETER Experiment Name: Zm_Drought_P Parameter: Timepoint (hr) Value: 24
  misc_feature: MA Experiment 108556 PARAMETER Experiment Name: Zm_Drought_P Parameter: Tissue Value: Aerial
  misc_feature: MA Experiment 108556 PARAMETER Experiment Name: Zm_Drought_P Parameter: Treatment Value: Drought vs. No Drought
  misc_feature: MA Experiment ID: 20000478 Result: Down-regulated in Transcription
  misc_feature: MA Experiment 20000478 PARAMETER Experiment Name: Zm_5mM_SA_P Parameter: Age (day) Value: 11
  misc_feature: MA Experiment 20000478 PARAMETER Experiment Name: Zm_5mM_SA_P Parameter: Organism Value: Zea mays
  misc_feature: MA Experiment 20000478 PARAMETER Experiment Name: Zm_5mM_SA_P Parameter: Plant Line Value: 35A19
  misc_feature: MA Experiment 20000478 PARAMETER Experiment Name: Zm_5mM_SA_P Parameter: Timepoint (hr) Value: 72
  misc_feature: MA Experiment 20000478 PARAMETER Experiment Name: Zm_5mM_SA_P Parameter: Tissue Value: Aerial
  misc_feature: MA Experiment 20000478 PARAMETER Experiment Name: Zm_5mM_SA_P Parameter: Treatment Value: 5mM SA vs. No Treatment
  misc_feature: MA Experiment ID: 20000535 Result: Up-regulated in Transcription
  misc_feature: MA Experiment 20000535 PARAMETER Experiment Name: Zm_Hybrid_Seed_Dev_P Parameter: DAP Value: 30 vs. 12
  misc_feature: MA Experiment 20000535 PARAMETER Experiment Name: Zm_Hybrid_Seed_Dev_P Parameter: Organism Value: Zea mays
  misc_feature: MA Experiment 20000535 PARAMETER Experiment Name: Zm_Hybrid_Seed_Dev_P Parameter: Plant Line Value: 35A19
  misc_feature: MA Experiment 20000535 PARAMETER Experiment Name: Zm_Hybrid_Seed_Dev_P Parameter: Tissue Value: Embryo vs. Unfert Floret

SEQ ID NO: 11186 - protein, 237 aa, Zea mays subsp. mays; identical to SEQ ID NO: 10516
  peptide (1)..(237): Ceres Seq. ID no. 12340577
  misc_feature (92)..(162): Pfam Name: linker histone H1 and H5 family Pfam Description: linker histone H1 and H5 family
  misc_feature (92)..(162): Pfam Name: linker histone H1 and H5 family Pfam Description: linker histone H1 and H5 family
  misc_feature (44)..(225): Homolog of NCBI NO: 121950 NR Description: HISTONE H1 >gi|7439629|pir||S26826 histone H1 -
  misc_feature (44)..(233): Homolog of NCBI NO: 34897182 NR Description: histone-like protein [Oryza sativa (japonica
  misc_feature (44)..(237): Homolog of NCBI NO: 11558848 NR Description: histone H1 [Triticum aestivum]
  misc_feature (44)..(237): Homolog of NCBI NO: 5230781 NR Description: histone H1 WH1A.1 [Triticum aestivum]
  misc_feature (44)..(237): Homolog of NCBI NO: 5230785 NR Description: histone H1 WH1B.1 [Triticum aestivum]
  misc_feature (44)..(233): Homolog of NCBI NO: 34897182 NR Description: histone-like protein [Oryza sativa (japonica
  misc_feature (44)..(237): Homolog of NCBI NO: 5230781 NR Description: histone H1 WH1A.1 [Triticum aestivum]
  misc_feature (44)..(237): Homolog of NCBI NO: 283024 NR Description: histone H1 - wheat
  misc_feature (52)..(237): Homolog of NCBI NO: 5230788 NR Description: histone H1 WH1A.3 [Triticum aestivum]
  misc_feature (44)..(237): Homolog of NCBI NO: 14916992 NR Description: HISTONE H1
  misc_feature (44)..(237): Homolog of NCBI NO: 5230783 NR Description: histone H1 WH1A.2 [Triticum aestivum]
  misc_feature (44)..(237): Homolog of NCBI NO: 5230790 NR Description: histone H1 WH1A.4 [Triticum aestivum]
  misc_feature (44)..(237): Homolog of NCBI NO: 5230785 NR Description: histone H1 WH1B.1 [Triticum aestivum]
  misc_feature (44)..(237): Homolog of NCBI NO: 11558848 NR Description: histone H1 [Triticum aestivum]
  misc_feature (44)..(225): Homolog of NCBI NO: 121950 NR Description: HISTONE H1 >gi|7439629|pir||S26826 histone H1 -
  misc_feature (44)..(237): Homolog of NCBI NO: 5230790 NR Description: histone H1 WH1A.4 [Triticum aestivum]
  misc_feature (44)..(237): Homolog of NCBI NO: 5230783 NR Description: histone H1 WH1A.2 [Triticum aestivum]
  misc_feature (44)..(237): Homolog of NCBI NO: 14916992 NR Description: HISTONE H1
  misc_feature (52)..(237): Homolog of NCBI NO: 5230788 NR Description: histone H1 WH1A.3 [Triticum aestivum]
  misc_feature (44)..(237): Homolog of NCBI NO: 283024 NR Description: histone H1 - wheat

SEQ ID NO: 11187 - protein, 194 aa, Zea mays subsp. mays; identical to SEQ ID NO: 10517
  peptide (1)..(194): Ceres Seq. ID no. 12340578
  misc_feature (49)..(119): Pfam Name: linker histone H1 and H5 family Pfam Description: linker histone H1 and H5 family
  misc_feature (49)..(119): Pfam Name: linker histone H1 and H5 family Pfam Description: linker histone H1 and H5 family
  misc_feature (1)..(182): Homolog of NCBI NO: 121950 NR Description: HISTONE H1 >gi|7439629|pir||S26826 histone H1 -
  misc_feature (1)..(190): Homolog of NCBI NO: 34897182 NR Description: histone-like protein [Oryza sativa (japonica
  misc_feature (1)..(194): Homolog of NCBI NO: 11558848 NR Description: histone H1 [Triticum aestivum]
  misc_feature (1)..(194): Homolog of NCBI NO: 5230781 NR Description: histone H1 WH1A.1 [Triticum aestivum]
  misc_feature (1)..(194): Homolog of NCBI NO: 5230785 NR Description: histone H1 WH1B.1 [Triticum aestivum]
  misc_feature (1)..(190): Homolog of NCBI NO: 34897182 NR Description: histone-like protein [Oryza sativa (japonica
  misc_feature (1)..(194): Homolog of NCBI NO: 5230781 NR Description: histone H1 WH1A.1 [Triticum aestivum]
  misc_feature (1)..(194): Homolog of NCBI NO: 283024 NR Description: histone H1 - wheat
  misc_feature (9)..(194): Homolog of NCBI NO: 5230788 NR Description: histone H1 WH1A.3 [Triticum aestivum]
  misc_feature (1)..(194): Homolog of NCBI NO: 14916992 NR Description: HISTONE H1
  misc_feature (1)..(194): Homolog of NCBI NO: 5230783 NR Description: histone H1 WH1A.2 [Triticum aestivum]
  misc_feature (1)..(194): Homolog of NCBI NO: 5230790 NR Description: histone H1 WH1A.4 [Triticum aestivum]
  misc_feature (1)..(194): Homolog of NCBI NO: 5230785 NR Description: histone H1 WH1B.1 [Triticum aestivum]
  misc_feature (1)..(194): Homolog of NCBI NO: 11558848 NR Description: histone H1 [Triticum aestivum]
  misc_feature (1)..(182): Homolog of NCBI NO: 121950 NR Description: HISTONE H1 >gi|7439629|pir||S26826 histone H1 -
  misc_feature (1)..(194): Homolog of NCBI NO: 5230790 NR Description: histone H1 WH1A.4 [Triticum aestivum]
  misc_feature (1)..(194): Homolog of NCBI NO: 5230783 NR Description: histone H1 WH1A.2 [Triticum aestivum]
  misc_feature (1)..(194): Homolog of NCBI NO: 14916992 NR Description: HISTONE H1
  misc_feature (9)..(194): Homolog of NCBI NO: 5230788 NR Description: histone H1 WH1A.3 [Triticum aestivum]
  misc_feature (1)..(194): Homolog of NCBI NO: 283024 NR Description: histone H1 - wheat

SEQ ID NO: 11188 - protein, 139 aa, Zea mays subsp. mays; identical to SEQ ID NO: 10518
  peptide (1)..(139): Ceres Seq. ID no. 12340579
  misc_feature (1)..(64): Pfam Name: linker histone H1 and H5 family Pfam Description: linker histone H1 and H5 family
  misc_feature (1)..(64): Pfam Name: linker histone H1 and H5 family Pfam Description: linker histone H1 and H5 family
  misc_feature (1)..(127): Homolog of NCBI NO: 121950 NR Description: HISTONE H1 >gi|7439629|pir||S26826 histone H1 -
  misc_feature (1)..(135): Homolog of NCBI NO: 34897182 NR Description: histone-like protein [Oryza sativa (japonica
  misc_feature (1)..(139): Homolog of NCBI NO: 11558848 NR Description: histone H1 [Triticum aestivum]
  misc_feature (1)..(139): Homolog of NCBI NO: 5230781 NR Description: histone H1 WH1A.1 [Triticum aestivum]
  misc_feature (1)..(139): Homolog of NCBI NO: 5230785 NR Description: histone H1 WH1B.1 [Triticum aestivum]
  misc_feature (1)..(135): Homolog of NCBI NO: 34897182 NR Description: histone-like protein [Oryza sativa (japonica
  misc_feature (1)..(139): Homolog of NCBI NO: 5230781 NR Description: histone H1 WH1A.1 [Triticum aestivum]
  misc_feature (1)..(139): Homolog of NCBI NO: 283024 NR Description: histone H1 - wheat
  misc_feature (1)..(139): Homolog of NCBI NO: 5230788 NR Description: histone H1 WH1A.3 [Triticum aestivum]
  misc_feature (1)..(139): Homolog of NCBI NO: 14916992 NR Description: HISTONE H1
  misc_feature (1)..(139): Homolog of NCBI NO: 5230783 NR Description: histone H1 WH1A.2 [Triticum aestivum]
  misc_feature (1)..(139): Homolog of NCBI NO: 5230790 NR Description: histone H1 WH1A.4 [Triticum aestivum]
  misc_feature (1)..(139): Homolog of NCBI NO: 5230785 NR Description: histone H1 WH1B.1 [Triticum aestivum]
  misc_feature (1)..(139): Homolog of NCBI NO: 11558848 NR Description: histone H1 [Triticum aestivum]
  misc_feature (1)..(127): Homolog of NCBI NO: 121950 NR Description: HISTONE H1 >gi|7439629|pir||S26826 histone H1 -
  misc_feature (1)..(139): Homolog of NCBI NO: 5230790 NR Description: histone H1 WH1A.4 [Triticum aestivum]
  misc_feature (1)..(139): Homolog of NCBI NO: 5230783 NR Description: histone H1 WH1A.2 [Triticum aestivum]
  misc_feature (1)..(139): Homolog of NCBI NO: 14916992 NR Description: HISTONE H1
  misc_feature (1)..(139): Homolog of NCBI NO: 5230788 NR Description: histone H1 WH1A.3 [Triticum aestivum]
  misc_feature (1)..(139): Homolog of NCBI NO: 283024 NR Description: histone H1 - wheat

SEQ ID NO: 11189 - DNA, 600 bp, Zea mays subsp. mays
  misc_feature (1)..(600): Ceres Seq. ID no. 12594988
  misc_feature: MA Experiment ID: 108515 Result: Down-regulated in Transcription
  misc_feature: MA Experiment 108515 PARAMETER Experiment Name: Zm_2mM_SA_P Parameter: Age (day) Value: 8
  misc_feature: MA Experiment 108515 PARAMETER Experiment Name: Zm_2mM_SA_P Parameter: Organism Value: Zea mays
  misc_feature: MA Experiment 108515 PARAMETER Experiment Name: Zm_2mM_SA_P Parameter: Plant Line Value: 35A19
  misc_feature: MA Experiment 108515 PARAMETER Experiment Name: Zm_2mM_SA_P Parameter: Timepoint (hr) Value: 12
  misc_feature: MA Experiment 108515 PARAMETER Experiment Name: Zm_2mM_SA_P Parameter: Tissue Value: Aerial
  misc_feature: MA Experiment 108515 PARAMETER Experiment Name: Zm_2mM_SA_P Parameter: Treatment Value: 2mM SA vs. No Treatment
  misc_feature: MA Experiment ID: 108523 Result: Down-regulated in Transcription
  misc_feature: MA Experiment 108523 PARAMETER Experiment Name: Zm_42deg_Heat_P Parameter: Age (day) Value: 8
  misc_feature: MA Experiment 108523 PARAMETER Experiment Name: Zm_42deg_Heat_P Parameter: Organism Value: Zea mays
  misc_feature: MA Experiment 108523 PARAMETER Experiment Name: Zm_42deg_Heat_P Parameter: Plant Line Value: 35A19
  misc_feature: MA Experiment 108523 PARAMETER Experiment Name: Zm_42deg_Heat_P Parameter: Temperature (deg C) Value: 42 vs. 22
  misc_feature: MA Experiment 108523 PARAMETER Experiment Name: Zm_42deg_Heat_P Parameter: Timepoint (hr) Value: 6
  misc_feature: MA Experiment 108523 PARAMETER Experiment Name: Zm_42deg_Heat_P Parameter: Tissue Value: Aerial
  misc_feature: MA Experiment ID: 108535 Result: Up-regulated in Transcription
  misc_feature: MA Experiment 108535 PARAMETER Experiment Name: Zm_Meristem_P Parameter: Age (day) Value: 8
  misc_feature: MA Experiment 108535 PARAMETER Experiment Name: Zm_Meristem_P Parameter: Organism Value: Zea mays
  misc_feature: MA Experiment 108535 PARAMETER Experiment Name: Zm_Meristem_P Parameter: Plant Line Value: 35A19
  misc_feature: MA Experiment 108535 PARAMETER Experiment Name: Zm_Meristem_P Parameter: Tissue Value: Root Meristem vs. Above Root Meristem
  misc_feature: MA Experiment ID: 108542 Result: Down-regulated in Transcription
  misc_feature: MA Experiment 108542 PARAMETER Experiment Name: Zm_150mM_NaCl_P Parameter: Age (day) Value: 8
  misc_feature: MA Experiment 108542 PARAMETER Experiment Name: Zm_150mM_NaCl_P Parameter: Organism Value: Zea mays
  misc_feature: MA Experiment 108542 PARAMETER Experiment Name: Zm_150mM_NaCl_P Parameter: Plant Line Value: 35A19
  misc_feature: MA Experiment 108542 PARAMETER Experiment Name: Zm_150mM_NaCl_P Parameter: Timepoint (hr) Value: 6
  misc_feature: MA Experiment 108542 PARAMETER Experiment Name: Zm_150mM_NaCl_P Parameter: Tissue Value: Aerial
  misc_feature: MA Experiment 108542 PARAMETER Experiment Name: Zm_150mM_NaCl_P Parameter: Treatment Value: 150mM NaCl vs. No Treatment
  misc_feature: MA Experiment ID: 108543 Result: Up-regulated in Transcription
  misc_feature: MA Experiment ID: 108544 Result: Down-regulated in Transcription
  misc_feature: MA Experiment ID: 108556 Result: Down-regulated in Transcription
  misc_feature: MA Experiment 108556 PARAMETER Experiment Name: Zm_Drought_P Parameter: Age (day) Value: 9
  misc_feature: MA Experiment 108556 PARAMETER Experiment Name: Zm_Drought_P Parameter: Organism Value: Zea mays
  misc_feature: MA Experiment 108556 PARAMETER Experiment Name: Zm_Drought_P Parameter: Plant Line Value: 35A19
  misc_feature: MA Experiment 108556 PARAMETER Experiment Name: Zm_Drought_P Parameter: Timepoint (hr) Value: 24
  misc_feature: MA Experiment 108556 PARAMETER Experiment Name: Zm_Drought_P Parameter: Tissue Value: Aerial
  misc_feature: MA Experiment 108556 PARAMETER Experiment Name: Zm_Drought_P Parameter: Treatment Value: Drought vs. No Drought
  misc_feature: MA Experiment ID: 108597 Result: Down-regulated in Transcription
  misc_feature: MA Experiment 108597 PARAMETER Experiment Name: Zm_100uM_ABA_P Parameter: Age (day) Value: 9
  misc_feature: MA Experiment 108597 PARAMETER Experiment Name: Zm_100uM_ABA_P Parameter: Organism Value: Zea mays
  misc_feature: MA Experiment 108597 PARAMETER Experiment Name: Zm_100uM_ABA_P Parameter: Plant Line Value: 35A19
  misc_feature: MA Experiment 108597 PARAMETER Experiment Name: Zm_100uM_ABA_P Parameter: Timepoint (hr) Value: 24
  misc_feature: MA Experiment 108597 PARAMETER Experiment Name: Zm_100uM_ABA_P Parameter: Tissue Value: Aerial
  misc_feature: MA Experiment 108597 PARAMETER Experiment Name: Zm_100uM_ABA_P Parameter: Treatment Value: 100uM ABA vs. No Treatment
  misc_feature: MA Experiment ID: 20000478 Result: Down-regulated in Transcription
  misc_feature: MA Experiment 20000478 PARAMETER Experiment Name: Zm_5mM_SA_P Parameter: Age (day) Value: 11
  misc_feature: MA Experiment 20000478 PARAMETER Experiment Name: Zm_5mM_SA_P Parameter: Organism Value: Zea mays
  misc_feature: MA Experiment 20000478 PARAMETER Experiment Name: Zm_5mM_SA_P Parameter: Plant Line Value: 35A19
  misc_feature: MA Experiment 20000478 PARAMETER Experiment Name: Zm_5mM_SA_P Parameter: Timepoint (hr) Value: 72
  misc_feature: MA Experiment 20000478 PARAMETER Experiment Name: Zm_5mM_SA_P Parameter: Tissue Value: Aerial
  misc_feature: MA Experiment 20000478 PARAMETER Experiment Name: Zm_5mM_SA_P Parameter: Treatment Value: 5mM SA vs. No Treatment
  misc_feature: MA Experiment ID: 20000479 Result: Down-regulated in Transcription
  misc_feature: MA Experiment 20000479 PARAMETER Experiment Name: Zm_Drought_P Parameter: Age (day) Value: 10
  misc_feature: MA Experiment 20000479 PARAMETER Experiment Name: Zm_Drought_P Parameter: Organism Value: Zea mays
  misc_feature: MA Experiment 20000479 PARAMETER Experiment Name: Zm_Drought_P Parameter: Plant Line Value: 35A19
  misc_feature: MA Experiment 20000479 PARAMETER Experiment Name: Zm_Drought_P Parameter: Timepoint (hr) Value: 48
  misc_feature: MA Experiment 20000479 PARAMETER Experiment Name: Zm_Drought_P Parameter: Tissue Value: Aerial
  misc_feature: MA Experiment 20000479 PARAMETER Experiment Name: Zm_Drought_P Parameter: Treatment Value: Drought vs. No Drought
  misc_feature: MA Experiment ID: 20000632 Result: Down-regulated in Transcription
  misc_feature: MA Experiment 20000632 PARAMETER Experiment Name: Zm_Herbicide-Treatments_P Parameter: Timepoint (hr) Value: 4
  misc_feature: MA Experiment 20000632 PARAMETER Experiment Name: Zm_Herbicide-Treatments_P Parameter: Tissue Value: Aerial
  misc_feature: MA Experiment 20000632 PARAMETER Experiment Name: Zm_Herbicide-Treatments_P Parameter: Treatment Value: Glean vs. No Treatment
ctaatcgaaaaacctcagcactagtctcctcttcgcacgagcgcaacaccatccacccaccagttcgaagcggaggcgaccggcaacctgcggcggagatgtcaggcaggggcaagggcggcaaggggctcgggaagggcggcgcgaagcgtcaccggaaggtgctgcgcgacaacatccaggggatcacgaagccggcgatccggaggccgaggaggggtggcgtgaagcgcatctccgggctgatctacgaggagacccgcggcgtgctcaagatctttctcgagaatgtcatccgcgacgctgtgacctacacggagcacgcccgtcgcaaaaccgtcaccgctatggacgtcgtgtacgccctcaaacgccagggccgcactctctatggcttcggcggctaggttaggtgtgggtaattgcctgtccaggtgtctcggatctgtggtactagtttggctgccttcctgtgttcgtattgtagtagttgtggtagctggttgctttgtcgtcctgtagtcgtgcttctttgggtctgtaagaaccgctggttcgatgggattggattggacggtgaagtaggaatgttggcatgct

SEQ ID NO: 11190 - protein, 134 aa, Zea mays subsp. mays
  peptide (1)..(134): Ceres Seq. ID no. 12594989
  misc_feature (33)..(134): Homolog of NCBI NO: 462242 NR Description: Histone H4 >gi|166311|gb|AAC37355.1| histone H4 formosa] >gi|455652|gb|AAB28739.1| histone H4; H4 [Acropora
  misc_feature (33)..(134): Homolog of NCBI NO: 15226944 NR Description: histone H4; protein id: At2g28740.1, supported by
  misc_feature (33)..(134): Homolog of NCBI NO: 462243 NR Description: Histone H4 >gi|421921|pir||S32769 histone H4 - >gi|297150|emb|CAA48923.1| histone H4 [Lycopersicon esculentum] histone H4 [Lycopersicon esculentum] >gi|2746721|gb|AAB94924.1|
  misc_feature (33)..(134): Homolog of NCBI NO: 1806283 NR Description: Histone H4 homologue [Sesbania rostrata]
  misc_feature (28)..(134): Homolog of NCBI NO: 34858262 NR Description: similar to germinal histone H4 gene [Rattus
  misc_feature (32)..(134): Homolog of NCBI NO: 34876368 NR Description: similar to germinal histone H4 gene [Rattus
  misc_feature (33)..(134): Homolog of NCBI NO: 4504301 NR Description: H4 histone family, member A [Homo sapiens] H4 histone family, member B [Homo sapiens] H4 histone family, member C [Homo sapiens]
  misc_feature (33)..(134): Homolog of NCBI NO: 27692935 NR Description: Similar to germinal histone H4 gene [Mus musculus]
  misc_feature (33)..(134): Homolog of NCBI NO: 27692960 NR Description: Similar to germinal histone H4 gene [Mus musculus]
  misc_feature (33)..(134): Homolog of NCBI NO: 37590121 NR Description: Hist1h4h protein [Mus musculus]
NRKTSALVSSSHERNTIHPPVRSGGDRQPAAEMSGRGKGGKGLGKGGAKRHRKVLRDNIQGITKPAIRRPRRGGVKRISGLIYEETRGVLKIFLENVIRDAVTYTEHARRKTVTAMDVVYALKRQGRTLYGFGG

SEQ ID NO: 11191 - protein, 102 aa, Zea mays subsp. mays
  peptide (1)..(102): Ceres Seq. ID no. 12594990
  misc_feature (1)..(102): Homolog of NCBI NO: 15226944 NR Description: histone H4; protein id: At2g28740.1, supported by
  misc_feature (1)..(102): Homolog of NCBI NO: 462243 NR Description: Histone H4 >gi|421921|pir||S32769 histone H4 - >gi|297150|emb|CAA48923.1| histone H4 [Lycopersicon esculentum] histone H4 [Lycopersicon esculentum] >gi|2746721|gb|AAB94924.1|
  misc_feature (1)..(102): Homolog of NCBI NO: 1806283 NR Description: Histone H4 homologue [Sesbania rostrata]
  misc_feature (1)..(102): Homolog of NCBI NO: 34858262 NR Description: similar to germinal histone H4 gene [Rattus
  misc_feature (1)..(102): Homolog of NCBI NO: 34876368 NR Description: similar to germinal histone H4 gene [Rattus
  misc_feature (1)..(102): Homolog of NCBI NO: 4504301 NR Description: H4 histone family, member A [Homo sapiens] H4 histone family, member B [Homo sapiens] H4 histone family, member C [Homo sapiens]
  misc_feature (1)..(102): Homolog of NCBI NO: 27692935 NR Description: Similar to germinal histone H4 gene [Mus musculus]
  misc_feature (1)..(102): Homolog of NCBI NO: 27692960 NR Description: Similar to germinal histone H4 gene [Mus musculus]
  misc_feature (1)..(102): Homolog of NCBI NO: 37590121 NR Description: Hist1h4h protein [Mus musculus]
  misc_feature (1)..(102): Homolog of NCBI NO: 462242 NR Description: Histone H4 >gi|166311|gb|AAC37355.1| histone H4 formosa] >gi|455652|gb|AAB28739.1| histone H4; H4 [Acropora
MSGRGKGGKGLGKGGAKRHRKVLRDNIQGITKPAIRRPRRGGVKRISGLIYEETRGVLKIFLENVIRDAVTYTEHARRKTVTAMDVVYALKRQGRTLYGFGG

SEQ ID NO: 11192 - DNA, 886 bp, Zea mays subsp. mays
  misc_feature (1)..(886): Ceres Seq. ID no. 12413697
  misc_feature: MA Experiment ID: 20001608 Result: Down-regulated in Transcription
  misc_feature: MA Experiment 20001608 PARAMETER Experiment Name: Zm_50ppm_KNO3_L-to-H_P Parameter: Age (day) Value: 21
  misc_feature: MA Experiment 20001608 PARAMETER Experiment Name: Zm_50ppm_KNO3_L-to-H_P Parameter: Organism Value: Zea mays
  misc_feature: MA Experiment 20001608 PARAMETER Experiment Name: Zm_50ppm_KNO3_L-to-H_P Parameter: Plant Line Value: 35A19
  misc_feature: MA Experiment 20001608 PARAMETER Experiment Name: Zm_50ppm_KNO3_L-to-H_P Parameter: Timepoint (hr) Value: 48
  misc_feature: MA Experiment 20001608 PARAMETER Experiment Name: Zm_50ppm_KNO3_L-to-H_P Parameter: Tissue Value: Shoots
  misc_feature: MA Experiment 20001608 PARAMETER Experiment Name: Zm_50ppm_KNO3_L-to-H_P Parameter: Treatment Value: 50ppm KNO3 vs. 50ppm KCl
ataaataacttatgaggccaaactaaagagggcagggcaggcgaatcgaaggaaaagtagtcaggagaggcgtttccctcgcaatcgaccatcacagatcaaatcgctgcaactagctagggtttcgtcgcctcatctctcgtcgatccatcgatggcgtccgagggcgaaaacaagaggatgatcacgctcaggagctccgacttagaggagttcgaggtggaggaagcggtggccatggagtcgcagactctccgccacatgatcgaggacgactgcgccgacaacggcatcccgctccccaacgtcaactccaggatcctctctaaggtcatcgagtactgcaacagtcacgtccacgccgccgccaaacccgctgactccgctgcctccgagggcggcgaggacctcaagagctgggacgcgaagttcgtcaaggtggaccaggctacgctcttcgacctcatcctggctgccaactatctgaacatcaagggattgctggacctgacctgccagacggttgctgacatgatcaagggcaagactccggaggagatccgcaagacattcagcatcaagaacgacttcacccaagaggaggaggatgagatccgcatggagaaccagtgggccttcgagtgattgttgtcttcctttccctggtgatggtggtggttcttttacaagaacagatggatgtctgcactgcactctacaatgctagtctatctacttacgaaatagtagtgaaatagtagtataatggtcgtgatggttgtatccttttttggattggatgtatgtcaagctggtgggtgctagttcgtctgtctggacttgttactagttaatatctcataatacatatataaaagtggatctt

SEQ ID NO: 11193 - protein, 163 aa, Zea mays subsp. mays
  peptide (1)..(163): Ceres Seq. ID no. 12413698
  misc_feature (86)..(163): Pfam Name: Skp1 family, dimerisation domain Pfam Description: Skp1 family, dimerisation domain
  misc_feature (1)..(163): Homolog of NCBI NO: 40644754 NR Description: putative SKP1 protein [Triticum aestivum]
  misc_feature (1)..(163): Homolog of NCBI NO: 7378764 NR Description: putative kinetochore protein [Hordeum vulgare
  misc_feature (9)..(163): Homolog of NCBI NO: 3719211 NR Description: UIP2 [Arabidopsis thaliana]
  misc_feature (9)..(163): Homolog of NCBI NO: 18422184 NR Description: E3 ubiquitin ligase SCF complex subunit, (At2); protein id: At5g42190.1, supported by cDNA: gi_3068808
  misc_feature (9)..(163): Homolog of NCBI NO: 4959710 NR Description: Skp1 [Medicago sativa]
  misc_feature (9)..(163): Homolog of NCBI NO: 18410982 NR Description: E3 ubiquitin ligase SCF complex subunit, (At1); protein id: At1g75950.1, supported by cDNA: gi_1432082, by cDNA: gi_19424109, supported by cDNA: gi_21281126, supported
  misc_feature (2)..(163): Homolog of NCBI NO: 7489300 NR Description: fimbriata-associated protein 2 - garden snapdragon
  misc_feature (9)..(163): Homolog of NCBI NO: 7489299 NR Description: fimbriata-associated protein - garden snapdragon
  misc_feature (9)..(163): Homolog of NCBI NO: 3551838 NR Description: SKP1-like protein [Nicotiana clevelandii]
  misc_feature (9)..(163): Homolog of NCBI NO: 18958257 NR Description: kinetochore protein [Brassica juncea]
MASEGENKRMITLRSSDLEEFEVEEAVAMESQTLRHMIEDDCADNGIPLPNVNSRILSKVIEYCNSHVHAAAKPADSAASEGGEDLKSWDAKFVKVDQATLFDLILAANYLNIKGLLDLTCQTVADMIKGKTPEEIRKTFSIKNDFTQEEEDEIRMENQWAFE

SEQ ID NO: 11194 - protein, 154 aa, Zea mays subsp. mays
  peptide (1)..(154): Ceres Seq. ID no. 12413699
  misc_feature (77)..(154): Pfam Name: Skp1 family, dimerisation domain Pfam Description: Skp1 family, dimerisation domain
  misc_feature (1)..(154): Homolog of NCBI NO: 40644754 NR Description: putative SKP1 protein [Triticum aestivum]
  misc_feature (1)..(154): Homolog of NCBI NO: 7378764 NR Description: putative kinetochore protein [Hordeum vulgare
  misc_feature (1)..(154): Homolog of NCBI NO: 3719211 NR Description: UIP2 [Arabidopsis thaliana]
  misc_feature (1)..(154): Homolog of NCBI NO: 18422184 NR Description: E3 ubiquitin ligase SCF complex subunit, (At2); protein id: At5g42190.1, supported by cDNA: gi_3068808
  misc_feature (1)..(154): Homolog of NCBI NO: 4959710 NR Description: Skp1 [Medicago sativa]
  misc_feature (1)..(154): Homolog of NCBI NO: 18410982 NR Description: E3 ubiquitin ligase SCF complex subunit, (At1); protein id: At1g75950.1, supported by cDNA: gi_1432082, by cDNA: gi_19424109, supported by cDNA: gi_21281126, supported
  misc_feature (1)..(154): Homolog of NCBI NO: 7489300 NR Description: fimbriata-associated protein 2 - garden snapdragon
  misc_feature (1)..(154): Homolog of NCBI NO: 7489299 NR Description: fimbriata-associated protein - garden snapdragon
  misc_feature (1)..(154): Homolog of NCBI NO: 3551838 NR Description: SKP1-like protein [Nicotiana clevelandii]
  misc_feature (1)..(154): Homolog of NCBI NO: 18958257 NR Description: kinetochore protein [Brassica juncea]
MITLRSSDLEEFEVEEAVAMESQTLRHMIEDDCADNGIPLPNVNSRILSKVIEYCNSHVHAAAKPADSAASEGGEDLKSWDAKFVKVDQATLFDLILAANYLNIKGLLDLTCQTVADMIKGKTPEEIRKTFSIKNDFTQEEEDEIRMENQWAFE

SEQ ID NO: 11195 - protein, 135 aa, Zea mays subsp. mays
  peptide (1)..(135): Ceres Seq. ID no. 12413700
  misc_feature (58)..(135): Pfam Name: Skp1 family, dimerisation domain Pfam Description: Skp1 family, dimerisation domain
  misc_feature (1)..(135): Homolog of NCBI NO: 40644754 NR Description: putative SKP1 protein [Triticum aestivum]
  misc_feature (1)..(135): Homolog of NCBI NO: 7378764 NR Description: putative kinetochore protein [Hordeum vulgare
  misc_feature (1)..(135): Homolog of NCBI NO: 3719211 NR Description: UIP2 [Arabidopsis thaliana]
  misc_feature (1)..(135): Homolog of NCBI NO: 18422184 NR Description: E3 ubiquitin ligase SCF complex subunit, (At2); protein id: At5g42190.1, supported by cDNA: gi_3068808
  misc_feature (1)..(135): Homolog of NCBI NO: 4959710 NR Description: Skp1 [Medicago sativa]
  misc_feature (1)..(135): Homolog of NCBI NO: 18410982 NR Description: E3 ubiquitin ligase SCF complex subunit, (At1); protein id: At1g75950.1, supported by cDNA: gi_1432082, by cDNA: gi_19424109, supported by cDNA: gi_21281126, supported
  misc_feature (1)..(135): Homolog of NCBI NO: 7489300 NR Description: fimbriata-associated protein 2 - garden snapdragon
  misc_feature (1)..(135): Homolog of NCBI NO: 7489299 NR Description: fimbriata-associated protein - garden snapdragon
  misc_feature (1)..(135): Homolog of NCBI NO: 3551838 NR Description: SKP1-like protein [Nicotiana clevelandii]
  misc_feature (1)..(135): Homolog of NCBI NO: 18958257 NR Description: kinetochore protein [Brassica juncea]
MESQTLRHMIEDDCADNGIPLPNVNSRILSKVIEYCNSHVHAAAKPADSAASEGGEDLKSWDAKFVKVDQATLFDLILAANYLNIKGLLDLTCQTVADMIKGKTPEEIRKTFSIKNDFTQEEEDEIRMENQWAFE

SEQ ID NO: 11196 - DNA, 1103 bp, Zea mays subsp. mays
  misc_feature (1)..(1103): Ceres Seq. ID no. 12345090
  misc_feature: MA Experiment ID: 108527 Result: Up-regulated in Transcription
  misc_feature: MA Experiment 108527 PARAMETER Experiment Name: Zm_5mM_NO_P Parameter: Age (day) Value: 8
  misc_feature: MA Experiment 108527 PARAMETER Experiment Name: Zm_5mM_NO_P Parameter: Organism Value: Zea mays
  misc_feature: MA Experiment 108527 PARAMETER Experiment Name: Zm_5mM_NO_P Parameter: Plant Line Value: 35A19
  misc_feature: MA Experiment 108527 PARAMETER Experiment Name: Zm_5mM_NO_P Parameter: Timepoint (hr) Value: 6
  misc_feature: MA Experiment 108527 PARAMETER Experiment Name: Zm_5mM_NO_P Parameter: Tissue Value: Aerial
  misc_feature: MA Experiment 108527 PARAMETER Experiment Name: Zm_5mM_NO_P Parameter: Treatment Value: 5mM NO vs. No Treatment
  misc_feature: MA Experiment ID: 108530 Result: Down-regulated in Transcription
  misc_feature: MA Experiment 108530 PARAMETER Experiment Name: Zm_Imbibed_Seeds_P Parameter: Age (day) Value: 6 vs. 2
  misc_feature: MA Experiment 108530 PARAMETER Experiment Name: Zm_Imbibed_Seeds_P Parameter: Organism Value: Zea mays
  misc_feature: MA Experiment 108530 PARAMETER Experiment Name: Zm_Imbibed_Seeds_P Parameter: Plant Line Value: 35A19
  misc_feature: MA Experiment 108530 PARAMETER Experiment Name: Zm_Imbibed_Seeds_P Parameter: Tissue Value: Aerial vs. Embryo
  misc_feature: MA Experiment ID: 108535 Result: Down-regulated in Transcription
  misc_feature: MA Experiment 108535 PARAMETER Experiment Name: Zm_Meristem_P Parameter: Age (day) Value: 8
  misc_feature: MA Experiment 108535 PARAMETER Experiment Name: Zm_Meristem_P Parameter: Organism Value: Zea mays
  misc_feature: MA Experiment 108535 PARAMETER Experiment Name: Zm_Meristem_P Parameter: Plant Line Value: 35A19
  misc_feature: MA Experiment 108535 PARAMETER Experiment Name: Zm_Meristem_P Parameter: Tissue Value: Root Meristem vs. Above Root Meristem
  misc_feature: MA Experiment ID: 108544 Result: Down-regulated in Transcription
  misc_feature: MA Experiment ID: 108545 Result: Down-regulated in Transcription
  misc_feature: MA Experiment 108545 PARAMETER Experiment Name: Zm_Imbibed_Seeds_P Parameter: Age (day) Value: 3 vs. 2
  misc_feature: MA Experiment 108545 PARAMETER Experiment Name: Zm_Imbibed_Seeds_P Parameter: Organism Value: Zea mays
  misc_feature: MA Experiment 108545 PARAMETER Experiment Name: Zm_Imbibed_Seeds_P Parameter: Plant Line Value: 35A19
  misc_feature: MA Experiment 108545 PARAMETER Experiment Name: Zm_Imbibed_Seeds_P Parameter: Tissue Value: Aerial vs. Embryo
  misc_feature: MA Experiment ID: 108559 Result: Up-regulated in Transcription
  misc_feature: MA Experiment 108559 PARAMETER Experiment Name: Zm_5mM_NO_P Parameter: Age (day) Value: 8
  misc_feature: MA Experiment 108559 PARAMETER Experiment Name: Zm_5mM_NO_P Parameter: Organism Value: Zea mays
  misc_feature: MA Experiment 108559 PARAMETER Experiment Name: Zm_5mM_NO_P Parameter: Plant Line Value: 35A19
  misc_feature: MA Experiment 108559 PARAMETER Experiment Name: Zm_5mM_NO_P Parameter: Timepoint (hr) Value: 12
  misc_feature: MA Experiment 108559 PARAMETER Experiment Name: Zm_5mM_NO_P Parameter: Tissue Value: Aerial
  misc_feature: MA Experiment 108559 PARAMETER Experiment Name: Zm_5mM_NO_P Parameter: Treatment Value: 5mM NO vs. No Treatment
  misc_feature: MA Experiment ID: 20000479 Result: Up-regulated in Transcription
  misc_feature: MA Experiment 20000479 PARAMETER Experiment Name: Zm_Drought_P Parameter: Age (day) Value: 10
  misc_feature: MA Experiment 20000479 PARAMETER Experiment Name: Zm_Drought_P Parameter: Organism Value: Zea mays
  misc_feature: MA Experiment 20000479 PARAMETER Experiment Name: Zm_Drought_P Parameter: Plant Line Value: 35A19
  misc_feature: MA Experiment 20000479 PARAMETER Experiment Name: Zm_Drought_P Parameter: Timepoint (hr) Value: 48
  misc_feature: MA Experiment 20000479 PARAMETER Experiment Name: Zm_Drought_P Parameter: Tissue Value: Aerial
  misc_feature: MA Experiment 20000479 PARAMETER Experiment Name: Zm_Drought_P Parameter: Treatment Value: Drought vs. No Drought
  misc_feature: MA Experiment ID: 20000535 Result: Down-regulated in Transcription
  misc_feature: MA Experiment 20000535 PARAMETER Experiment Name: Zm_Hybrid_Seed_Dev_P Parameter: DAP Value: 30 vs. 12
  misc_feature: MA Experiment 20000535 PARAMETER Experiment Name: Zm_Hybrid_Seed_Dev_P Parameter: Organism Value: Zea mays
  misc_feature: MA Experiment 20000535 PARAMETER Experiment Name: Zm_Hybrid_Seed_Dev_P Parameter: Plant Line Value: 35A19
  misc_feature: MA Experiment 20000535 PARAMETER Experiment Name: Zm_Hybrid_Seed_Dev_P Parameter: Tissue Value: Embryo vs. Unfert Floret
  misc_feature: MA Experiment ID: 20000630 Result: Up-regulated in Transcription
  misc_feature: MA Experiment 20000630 PARAMETER Experiment Name: Zm_Herbicide-Treatments_P Parameter: Timepoint (hr) Value: 4
  misc_feature: MA Experiment 20000630 PARAMETER Experiment Name: Zm_Herbicide-Treatments_P Parameter: Tissue Value: Aerial
  misc_feature: MA Experiment 20000630 PARAMETER Experiment Name: Zm_Herbicide-Treatments_P Parameter: Treatment Value: Roundup vs. No Treatment
atgcatactctatcaactaacattgcgctgcattgcattgcaggccccgccgtctccgtggggcgacctggaggaggtgctggcgcgcgcggcgaccaaggaccgcacggtgatcatgacgcagatcaacgcggcgtggacgcgcccgggctcgctgctggacctcttcttcgagagcttccgcacgggggaaggcggcgtggcgcgcctcctggaccacctggtcatcgtcaccatggacccggccgcctacgagggctgcagggccgtgcacagccactgctacttcctccgcacgggcaacgccgtcgactaccgatcagagaaggtgttcatgagcaaggactacctggagatgatgtggggacgcaaccgcttccagcagacggtgctggagctgggatacaacttcctattcacggacgttgacgtgatgtggttccgcgacccgttccgccacatctccatggcggcggacatcgccatctccagcgacgtgtacatgggcgacccctacagcctgcgcaacttccccaacggcggcttcctcttcgtgcgggcgtcggacaagacggtcgccttctaccgggcgtggcagcaggggcggtggcgcttcctggggaagcacgagcaggacgtgttcaacctcatcaagcacgaggaggcgcccaggctggacctcgccatccagttcctcgacacagcctacatcagcggcttctgccagctcagcaaggacctcaacaggatctgcacgctccacgccaactgctgcgtcggcctcggcgccaagctccacgacctccgcggggtcctcgacgtctggaggaactacaccgccggcacacccgaggagcgacgcgcgggaaagttccagtggaagctaccgggcatctgcatccactgatatccattctttctcagccggcctctcgcctccttggtagtaaaagatccattcttttgattccatcatcaacaaattaaaggttatatatatactagtaacagatagttagaatttcatagctataagtatacagtagcagtatatgtttgtaatatatctgcacctgcaaatcaatttcattgtcggtaacccc

SEQ ID NO: 11197 - protein, 301 aa, Zea mays subsp. mays
  peptide (1)..(301): Ceres Seq. ID no. 12345091
  misc_feature (15)..(301): Homolog of NCBI NO: 34897442 NR Description: putative regulatory protein [Oryza sativa
  misc_feature (22)..(301): Homolog of NCBI NO: 19386737 NR Description: P0678F11.26 [Oryza sativa (japonica
  misc_feature (15)..(301): Homolog of NCBI NO: 34904674 NR Description: P0446G09.1 [Oryza sativa (japonica >gi|28564589|dbj|BAC57756.1| putative regulatory protein [Oryza
  misc_feature (23)..(301): Homolog of NCBI NO: 34897440 NR Description: putative regulatory protein [Oryza sativa
  misc_feature (18)..(290): Homolog of NCBI NO: 19386738 NR Description: P0678F11.28 [Oryza sativa (japonica
  misc_feature (23)..(299): Homolog of NCBI NO: 18395292 NR Description: unknown protein; protein id: At2g02060.1
  misc_feature (23)..(299): Homolog of NCBI NO: 15223826 NR Description: hypothetical protein common family; protein id:
  misc_feature (23)..(299): Homolog of NCBI NO: 19386741 NR Description: P0678F11.31 [Oryza sativa (japonica
  misc_feature (25)..(299): Homolog of NCBI NO: 15235236 NR Description: hypothetical protein common family; protein id:
  misc_feature (23)..(299): Homolog of NCBI NO: 38344278 NR Description: OSJNBa0013K16.10 [Oryza sativa (japonica
CILYQLTLRCIALQAPPSPWGDLEEVLARAATKDRTVIMTQINAAWTRPGSLLDLFFESFRTGEGGVARLLDHLVIVTMDPAAYEGCRAVHSHCYFLRTGNAVDYRSEKVFMSKDYLEMMWGRNRFQQTVLELGYNFLFTDVDVMWFRDPFRHISMAADIAISSDVYMGDPYSLRNFPNGGFLFVRASDKTVAFYRAWQQGRWRFLGKHEQDVFNLIKHEEAPRLDLAIQFLDTAYISGFCQLSKDLNRICTLHANCCVGLGAKLHDLRGVLDVWRNYTAGTPEERRAGKFQWKLPGICIH

SEQ ID NO: 11198 - protein, 263 aa, Zea mays subsp. mays
  peptide (1)..(263): Ceres Seq. ID no. 12345092
  misc_feature (1)..(263): Homolog of NCBI NO: 34897442 NR Description: putative regulatory protein [Oryza sativa
  misc_feature (1)..(263): Homolog of NCBI NO: 19386737 NR Description: P0678F11.26 [Oryza sativa (japonica
  misc_feature (1)..(263): Homolog of NCBI NO: 34904674 NR Description: P0446G09.1 [Oryza sativa (japonica >gi|28564589|dbj|BAC57756.1| putative regulatory protein [Oryza
  misc_feature (1)..(263): Homolog of NCBI NO: 34897440 NR Description: putative regulatory protein [Oryza sativa
  misc_feature (1)..(252): Homolog of NCBI NO: 19386738 NR Description: P0678F11.28 [Oryza sativa (japonica
  misc_feature (1)..(261): Homolog of NCBI NO: 18395292 NR Description: unknown protein; protein id: At2g02060.1
  misc_feature (1)..(261): Homolog of NCBI NO: 15223826 NR Description: hypothetical protein common family; protein id:
  misc_feature (1)..(261): Homolog of NCBI NO: 19386741 NR Description: P0678F11.31 [Oryza sativa (japonica
  misc_feature (1)..(261): Homolog of NCBI NO: 15235236 NR Description: hypothetical protein common family; protein id:
  misc_feature (1)..(261): Homolog of NCBI NO: 38344278 NR Description: OSJNBa0013K16.10 [Oryza sativa (japonica
MTQINAAWTRPGSLLDLFFESFRTGEGGVARLLDHLVIVTMDPAAYEGCRAVHSHCYFLRTGNAVDYRSEKVFMSKDYLEMMWGRNRFQQTVLELGYNFLFTDVDVMWFRDPFRHISMAADIAISSDVYMGDPYSLRNFPNGGFLFVRASDKTVAFYRAWQQGRWRFLGKHEQDVFNLIKHEEAPRLDLAIQFLDTAYISGFCQLSKDLNRICTLHANCCVGLGAKLHDLRGVLDVWRNYTAGTPEERRAGKFQWKLPGICIH

SEQ ID NO: 11199 - protein, 223 aa, Zea mays subsp. mays
  peptide (1)..(223): Ceres Seq. ID no. 12345093
  misc_feature (1)..(223): Homolog of NCBI NO: 34897442 NR Description: putative regulatory protein [Oryza sativa
  misc_feature (1)..(223): Homolog of NCBI NO: 19386737 NR Description: P0678F11.26 [Oryza sativa (japonica
  misc_feature (1)..(223): Homolog of NCBI NO: 34904674 NR Description: P0446G09.1 [Oryza sativa (japonica >gi|28564589|dbj|BAC57756.1| putative regulatory protein [Oryza
  misc_feature (1)..(223): Homolog of NCBI NO: 34897440 NR Description: putative regulatory protein [Oryza sativa
  misc_feature (1)..(212): Homolog of NCBI NO: 19386738 NR Description: P0678F11.28 [Oryza sativa (japonica
  misc_feature (1)..(221): Homolog of NCBI NO: 18395292 NR Description: unknown protein; protein id: At2g02060.1
  misc_feature (1)..(221): Homolog of NCBI NO: 15223826 NR Description: hypothetical protein common family; protein id:
  misc_feature (1)..(221): Homolog of NCBI NO: 19386741 NR Description: P0678F11.31 [Oryza sativa (japonica
  misc_feature (1)..(221): Homolog of NCBI NO: 15235236 NR Description: hypothetical protein common family; protein id:
  misc_feature (1)..(221): Homolog of NCBI NO: 38344278 NR Description: OSJNBa0013K16.10 [Oryza sativa (japonica
MDPAAYEGCRAVHSHCYFLRTGNAVDYRSEKVFMSKDYLEMMWGRNRFQQTVLELGYNFLFTDVDVMWFRDPFRHISMAADIAISSDVYMGDPYSLRNFPNGGFLFVRASDKTVAFYRAWQQGRWRFLGKHEQDVFNLIKHEEAPRLDLAIQFLDTAYISGFCQLSKDLNRICTLHANCCVGLGAKLHDLRGVLDVWRNYTAGTPEERRAGKFQWKLPGICIH

SEQ ID NO: 11200 - DNA, 1714 bp, Zea mays subsp. mays
  misc_feature (1)..(1714): Ceres Seq. ID no. 12341046
  misc_feature: MA Experiment ID: 108515 Result: Up-regulated in Transcription
  misc_feature: MA Experiment 108515 PARAMETER Experiment Name: Zm_2mM_SA_P Parameter: Age (day) Value: 8
  misc_feature: MA Experiment 108515 PARAMETER Experiment Name: Zm_2mM_SA_P Parameter: Organism Value: Zea mays
  misc_feature: MA Experiment 108515 PARAMETER Experiment Name: Zm_2mM_SA_P Parameter: Plant Line Value: 35A19
  misc_feature: MA Experiment 108515 PARAMETER Experiment Name: Zm_2mM_SA_P Parameter: Timepoint (hr) Value: 12
  misc_feature: MA Experiment 108515 PARAMETER Experiment Name: Zm_2mM_SA_P Parameter: Tissue Value: Aerial
  misc_feature: MA Experiment 108515 PARAMETER Experiment Name: Zm_2mM_SA_P Parameter: Treatment Value: 2mM SA vs. No Treatment
  misc_feature: MA Experiment ID: 108527 Result: Up-regulated in Transcription
  misc_feature: MA Experiment 108527 PARAMETER Experiment Name: Zm_5mM_NO_P Parameter: Age (day) Value: 8
  misc_feature: MA Experiment 108527 PARAMETER Experiment Name: Zm_5mM_NO_P Parameter: Organism Value: Zea mays
  misc_feature: MA Experiment 108527 PARAMETER Experiment Name: Zm_5mM_NO_P Parameter: Plant Line Value: 35A19
  misc_feature: MA Experiment 108527 PARAMETER Experiment Name: Zm_5mM_NO_P Parameter: Timepoint (hr) Value: 6
  misc_feature: MA Experiment 108527 PARAMETER Experiment Name: Zm_5mM_NO_P Parameter: Tissue Value: Aerial
  misc_feature: MA Experiment 108527 PARAMETER Experiment Name: Zm_5mM_NO_P Parameter: Treatment Value: 5mM NO vs. No Treatment
  misc_feature: MA Experiment ID: 108528 Result: Down-regulated in Transcription
  misc_feature: MA Experiment 108528 PARAMETER Experiment Name: Zm_Imbibed_Seeds_P Parameter: Age (day) Value: 5 vs. 2
  misc_feature: MA Experiment 108528 PARAMETER Experiment Name: Zm_Imbibed_Seeds_P Parameter: Organism Value: Zea mays
  misc_feature: MA Experiment 108528 PARAMETER Experiment Name: Zm_Imbibed_Seeds_P Parameter: Plant Line Value: 35A19
  misc_feature: MA Experiment 108528 PARAMETER Experiment Name: Zm_Imbibed_Seeds_P Parameter: Tissue Value: Aerial vs. Embryo
  misc_feature: MA Experiment ID: 108530 Result: Down-regulated in Transcription
  misc_feature: MA Experiment 108530 PARAMETER Experiment Name: Zm_Imbibed_Seeds_P Parameter: Age (day) Value: 6 vs. 2
  misc_feature: MA Experiment 108530 PARAMETER Experiment Name: Zm_Imbibed_Seeds_P Parameter: Organism Value: Zea mays
  misc_feature: MA Experiment 108530 PARAMETER Experiment Name: Zm_Imbibed_Seeds_P Parameter: Plant Line Value: 35A19
  misc_feature: MA Experiment 108530 PARAMETER Experiment Name: Zm_Imbibed_Seeds_P Parameter: Tissue Value: Aerial vs. Embryo
  misc_feature: MA Experiment ID: 108536 Result: Up-regulated in Transcription
  misc_feature: MA Experiment 108536 PARAMETER Experiment Name: Zm_Meristem_P Parameter: Age (day) Value: 8
  misc_feature: MA Experiment 108536 PARAMETER Experiment Name: Zm_Meristem_P Parameter: Organism Value: Zea mays
  misc_feature: MA Experiment 108536 PARAMETER Experiment Name: Zm_Meristem_P Parameter: Plant Line Value: 35A19
  misc_feature: MA Experiment 108536 PARAMETER Experiment Name: Zm_Meristem_P Parameter: Tissue Value: Shoot Meristem vs. Above Shoot Meristem
  misc_feature: MA Experiment ID: 108543 Result: Down-regulated in Transcription
  misc_feature: MA Experiment ID: 108544 Result: Down-regulated in Transcription
  misc_feature: MA Experiment ID: 108545 Result: Down-regulated in Transcription
  misc_feature: MA Experiment 108545 PARAMETER Experiment Name: Zm_Imbibed_Seeds_P Parameter: Age (day) Value: 3 vs. 2
  misc_feature: MA Experiment 108545 PARAMETER Experiment Name: Zm_Imbibed_Seeds_P Parameter: Organism Value: Zea mays
  misc_feature: MA Experiment 108545 PARAMETER Experiment Name: Zm_Imbibed_Seeds_P Parameter: Plant Line Value: 35A19
  misc_feature: MA Experiment 108545 PARAMETER Experiment Name: Zm_Imbibed_Seeds_P Parameter: Tissue Value: Aerial vs. Embryo
  misc_feature: MA Experiment ID: 108547 Result: Down-regulated in Transcription
  misc_feature: MA Experiment 108547 PARAMETER Experiment Name: Zm_Imbibed_Seeds_P Parameter: Age (day) Value: 4 vs. 2
  misc_feature: MA Experiment 108547 PARAMETER Experiment Name: Zm_Imbibed_Seeds_P Parameter: Organism Value: Zea mays
  misc_feature: MA Experiment 108547 PARAMETER Experiment Name: Zm_Imbibed_Seeds_P Parameter: Plant Line Value: 35A19
  misc_feature: MA Experiment 108547 PARAMETER Experiment Name: Zm_Imbibed_Seeds_P Parameter: Tissue Value: Aerial vs. Embryo
  misc_feature: MA Experiment ID: 108559 Result: Up-regulated in Transcription
  misc_feature: MA Experiment 108559 PARAMETER Experiment Name: Zm_5mM_NO_P Parameter: Age (day) Value: 8
  misc_feature: MA Experiment 108559 PARAMETER Experiment Name: Zm_5mM_NO_P Parameter: Organism Value: Zea mays
  misc_feature: MA Experiment 108559 PARAMETER Experiment Name: Zm_5mM_NO_P Parameter: Plant Line Value: 35A19
  misc_feature: MA Experiment 108559 PARAMETER Experiment Name: Zm_5mM_NO_P Parameter: Timepoint (hr) Value: 12
  misc_feature: MA Experiment 108559 PARAMETER Experiment Name: Zm_5mM_NO_P Parameter: Tissue Value: Aerial
  misc_feature: MA Experiment 108559 PARAMETER Experiment Name: Zm_5mM_NO_P Parameter: Treatment Value: 5mM NO vs. No Treatment
  misc_feature: MA Experiment ID: 20000533 Result: Up-regulated in Transcription
  misc_feature: MA Experiment 20000533 PARAMETER Experiment Name: Zm_0.001percent_MeJA_P Parameter: Age (day) Value: 11
  misc_feature: MA Experiment 20000533 PARAMETER Experiment Name: Zm_0.001percent_MeJA_P Parameter: Organism Value: Zea mays
  misc_feature: MA Experiment 20000533 PARAMETER Experiment Name: Zm_0.001percent_MeJA_P Parameter: Plant Line Value: 35A19
  misc_feature: MA Experiment 20000533 PARAMETER Experiment Name: Zm_0.001percent_MeJA_P Parameter: Timepoint (hr) Value: 72
  misc_feature: MA Experiment 20000533 PARAMETER Experiment Name: Zm_0.001percent_MeJA_P Parameter: Tissue Value: Aerial
  misc_feature: MA Experiment 20000533 PARAMETER Experiment Name: Zm_0.001percent_MeJA_P Parameter: Treatment Value: 0.001percent MeJA vs. No Treatment
  misc_feature: MA Experiment ID: 20000626 Result: Up-regulated in Transcription
  misc_feature: MA Experiment 20000626 PARAMETER Experiment Name: Zm_Herbicide-Treatments_P Parameter: Timepoint (hr) Value: 12
  misc_feature: MA Experiment 20000626 PARAMETER Experiment Name: Zm_Herbicide-Treatments_P Parameter: Tissue Value: Aerial
  misc_feature: MA Experiment 20000626 PARAMETER Experiment Name: Zm_Herbicide-Treatments_P Parameter: Treatment Value: Roundup vs. No Treatment
  misc_feature: MA Experiment ID: 20000632 Result: Down-regulated in Transcription
  misc_feature: MA Experiment 20000632 PARAMETER Experiment Name: Zm_Herbicide-Treatments_P Parameter: Timepoint (hr) Value: 4
  misc_feature: MA Experiment 20000632 PARAMETER Experiment Name: Zm_Herbicide-Treatments_P Parameter: Tissue Value: Aerial
  misc_feature: MA Experiment 20000632 PARAMETER Experiment Name: Zm_Herbicide-Treatments_P Parameter: Treatment Value: Glean vs. No Treatment
  misc_feature: MA Experiment ID: 20001612 Result: Up-regulated in Transcription
  misc_feature: MA Experiment 20001612 PARAMETER Experiment Name: Zm_50ppm_KNO3_L-to-H_P Parameter: Age (day) Value: 19
  misc_feature: MA Experiment 20001612 PARAMETER Experiment Name: Zm_50ppm_KNO3_L-to-H_P Parameter: Organism Value: Zea mays
  misc_feature: MA Experiment 20001612 PARAMETER Experiment Name: Zm_50ppm_KNO3_L-to-H_P Parameter: Plant Line Value: 35A19
  misc_feature: MA Experiment 20001612 PARAMETER Experiment Name: Zm_50ppm_KNO3_L-to-H_P Parameter: Timepoint (hr) Value: 8
  misc_feature: MA Experiment 20001612 PARAMETER Experiment Name: Zm_50ppm_KNO3_L-to-H_P Parameter: Tissue Value: Roots
  misc_feature: MA Experiment 20001612 PARAMETER Experiment Name: Zm_50ppm_KNO3_L-to-H_P Parameter: Treatment Value: 50ppm KNO3 vs. 50ppm KCl
aggcggccaaaccgcaccctccttcccgtcgtttcccatctcttcctcctttagagctaccactatataaatcagggctcattttctcgctcctcacaggctcatctcgctttggatcgattggtttcgtaactggtgaaggactgagggtctcggagtggatcgatttgggattctgttcgaagatttgcggaggggggcaatggcgaccgcggggaaggtgatcaagtgcaaagctgcggtggcatgggaggccggcaagccactgtcgatcgaggaggtggaggtagcgcctccgcaggccatggaggtgcgcgtcaagatcctcttcacctcgctctgccacaccgacgtctacttctgggaggccaaggggcagactcccgtgttccctcggatctttggccacgaggctggaggtatcatagagagtgttggagagggtgtgactgacgtagctccgggcgaccatgtccttcctgtgttcactggggagtgcaaggagtgtgcccactgcaagtcggcagagagcaacatgtgtgatctgctcaggatcaacaccgaccgcggtgtgatgattgccgatggcaagtcgcggttttcaatcaatgggaagcctatctaccactttgttgggacttccaccttcagcgagtacaccgtcatgcatgtgggttgtgttgcaaagatcaaccctcaggctccccttgataaagtttgcgtccttagctgtggtatttctaccggtcttggtgcatcaattaatgttgcaaaacctccgaagggttcgacagtggctgttttcggtttaggagccgttggtcttgccgctgcagaaggtgcaaggattgctggagcgtcaaggatcattggtgtcgacctgaaccccagcagattcgaagaagctaggaagttcggttgcactgaatttgtgaacccaaaagaccacaacaagccagtgcaggaggtacttgctgagatgaccaacggaggggtcgaccgcagtgtggaatgcactggcaacattaatgctatgatccaagctttcgaatgtgttcatgatggctggggtgttgctgtgctggtgggtgtgccacataaggacgctgagttcaagacccacccgatgaacttcctgaacgaaaggaccctgaaggggaccttctttggcaactataagccacgcactgatctgccaaatgtggtggagctgtacatgaaaaaggagctggaggtggagaagttcatcacgcacagcgtcccgttcgccgagatcaacaaggcgttcgacctgatggccaagggggagggcatccgctgcatcatccgcatggagaactagatttcgctgtctagtttgtgatctggcctaggcttggggttaataaaggaggcaatgctagcctgccctttcgatgaggaggtacatacacgctggcgatggaccgcgcttgtgtgtcgcgttcagtttggcttttgccaagcactagggtagcttcccgtgtcggtaattatatggtatgaaccatcaccttttggctctacacggtatgaacgtaagatacaaattccaactacctctagctcgcttgtgtggtatctgtatcagtatacatgtgtttgtttgcttatgtgtttgtttgcttgtatttgctggtgtctgtatcgcgggatgcaatgagttgttgtttggttgtgtcaaccaggctcaaat

SEQ ID NO: 11201 - protein, 379 aa, Zea mays subsp. mays
  peptide (1)..(379): Ceres Seq. ID no. 12341047
  misc_feature (1)..(379): Homolog of NCBI NO: 22122 NR Description: alcohol dehydrogenase 1 [Zea mays] alcohol dehydrogenase 1 [Zea mays]
  misc_feature (1)..(379): Homolog of NCBI NO: 113359 NR Description: Alcohol dehydrogenase 1 >gi|22120|emb|CAA25239.1|
  misc_feature (1)..(379): Homolog of NCBI NO: 82669 NR Description: alcohol dehydrogenase (EC 1.1.1.1) 1 - maize
  misc_feature (1)..(379): Homolog of NCBI NO: 168407 NR Description: alcohol dehydrogenase
  misc_feature (1)..(379): Homolog of NCBI NO: 388053 NR Description: alcohol dehydrogenase
  misc_feature (1)..(379): Homolog of NCBI NO: 3420019 NR Description: putative alcohol dehydrogenase 1 [Sorghum bicolor]
  misc_feature (1)..(379): Homolog of NCBI NO: 113362 NR Description: Alcohol dehydrogenase 1 (ADH slow-allele)
  misc_feature (1)..(379): Homolog of NCBI NO: 13872817 NR Description: alcohol dehydrogenase [Pennisetum glaucum]
  misc_feature (1)..(379): Homolog of NCBI NO: 13872815 NR Description: alcohol dehydrogenase [Pennisetum glaucum]
  misc_feature (1)..(379): Homolog of NCBI NO: 6979321 NR Description: alcohol dehydrogenase 1 [Oryza sativa]
MATAGKVIKCKAAVAWEAGKPLSIEEVEVAPPQAMEVRVKILFTSLCHTDVYFWEAKGQTPVFPRIFGHEAGGIIESVGEGVTDVAPGDHVLPVFTGECKECAHCKSAESNMCDLLRINTDRGVMIADGKSRFSINGKPIYHFVGTSTFSEYTVMHVGCVAKINPQAPLDKVCVLSCGISTGLGASINVAKPPKGSTVAVFGLGAVGLAAAEGARIAGASRIIGVDLNPSRFEEARKFGCTEFVNPKDHNKPVQEVLAEMTNGGVDRSVECTGNINAMIQAFECVHDGWGVAVLVGVPHKDAEFKTHPMNFLNERTLKGTFFGNYKPRTDLPNVVELYMKKELEVEKFITHSVPFAEINKAFDLMAKGEGIRCIIRMEN

SEQ ID NO: 11202 - protein, 345 aa, Zea mays subsp. mays
  peptide (1)..(345): Ceres Seq. ID no. 12341048
  misc_feature (1)..(345): Homolog of NCBI NO: 22122 NR Description: alcohol dehydrogenase 1 [Zea mays] alcohol dehydrogenase 1 [Zea mays]
  misc_feature (1)..(345): Homolog of NCBI NO: 113359 NR Description: Alcohol dehydrogenase 1 >gi|22120|emb|CAA25239.1|
  misc_feature (1)..(345): Homolog of NCBI NO: 82669 NR Description: alcohol dehydrogenase (EC 1.1.1.1) 1 - maize
  misc_feature (1)..(345): Homolog of NCBI NO: 168407 NR Description: alcohol dehydrogenase
  misc_feature (1)..(345): Homolog of NCBI NO: 388053 NR Description: alcohol dehydrogenase
  misc_feature (1)..(345): Homolog of NCBI NO: 3420019 NR Description: putative alcohol dehydrogenase 1 [Sorghum bicolor]
  misc_feature (1)..(345): Homolog of NCBI NO: 113362 NR Description: Alcohol dehydrogenase 1 (ADH slow-allele)
  misc_feature (1)..(345): Homolog of NCBI NO: 13872817 NR Description: alcohol dehydrogenase [Pennisetum glaucum]
  misc_feature (1)..(345): Homolog of NCBI NO: 13872815 NR Description: alcohol dehydrogenase [Pennisetum glaucum]
  misc_feature (1)..(345): Homolog of NCBI NO: 6979321 NR Description: alcohol dehydrogenase 1 [Oryza sativa]
MEVRVKILFTSLCHTDVYFWEAKGQTPVFPRIFGHEAGGIIESVGEGVTDVAPGDHVLPVFTGECKECAHCKSAESNMCDLLRINTDRGVMIADGKSRFSINGKPIYHFVGTSTFSEYTVMHVGCVAKINPQAPLDKVCVLSCGISTGLGASINVAKPPKGSTVAVFGLGAVGLAAAEGARIAGASRIIGVDLNPSRFEEARKFGCTEFVNPKDHNKPVQEVLAEMTNGGVDRSVECTGNINAMIQAFECVHDGWGVAVLVGVPHKDAEFKTHPMNFLNERTLKGTFFGNYKPRTDLPNVVELYMKKELEVEKFITHSVPFAEINKAFDLMAKGEGIRCIIRMEN

SEQ ID NO: 11203 - protein, 268 aa, Zea mays subsp. mays
  peptide (1)..(268): Ceres Seq. ID no. 12341049
  misc_feature (1)..(268): Homolog of NCBI NO: 22122 NR Description: alcohol dehydrogenase 1 [Zea mays] alcohol dehydrogenase 1 [Zea mays]
  misc_feature (1)..(268): Homolog of NCBI NO: 113359 NR Description: Alcohol dehydrogenase 1 >gi|22120|emb|CAA25239.1|
  misc_feature (1)..(268): Homolog of NCBI NO: 82669 NR Description: alcohol dehydrogenase (EC 1.1.1.1) 1 - maize
  misc_feature (1)..(268): Homolog of NCBI NO: 168407 NR Description: alcohol dehydrogenase
  misc_feature (1)..(268): Homolog of NCBI NO: 388053 NR Description: alcohol dehydrogenase
  misc_feature (1)..(268): Homolog of NCBI NO: 3420019 NR Description: putative alcohol dehydrogenase 1 [Sorghum bicolor]
  misc_feature (1)..(268): Homolog of NCBI NO: 113362 NR Description: Alcohol dehydrogenase 1 (ADH slow-allele)
  misc_feature (1)..(268): Homolog of NCBI NO: 13872817 NR Description: alcohol dehydrogenase [Pennisetum glaucum]
  misc_feature (1)..(268): Homolog of NCBI NO: 13872815 NR Description: alcohol dehydrogenase [Pennisetum glaucum]
  misc_feature (1)..(268): Homolog of NCBI NO: 6979321 NR Description: alcohol dehydrogenase 1 [Oryza sativa]
MCDLLRINTDRGVMIADGKSRFSINGKPIYHFVGTSTFSEYTVMHVGCVAKINPQAPLDKVCVLSCGISTGLGASINVAKPPKGSTVAVFGLGAVGLAAAEGARIAGASRIIGVDLNPSRFEEARKFGCTEFVNPKDHNKPVQEVLAEMTNGGVDRSVECTGNINAMIQAFECVHDGWGVAVLVGVPHKDAEFKTHPMNFLNERTLKGTFFGNYKPRTDLPNVVELYMKKELEVEKFITHSVPFAEINKAFDLMAKGEGIRCIIRMEN

SEQ ID NO: 11204 - DNA, 1661 bp, Zea mays subsp. mays
  misc_feature (1)..(1661): Ceres Seq. ID no. 12342131
  misc_feature: MA Experiment ID: 20000492 Result: Down-regulated in Transcription
  misc_feature: MA Experiment 20000492 PARAMETER Experiment Name: Zm_Hybrid_Seed_Dev_P Parameter: DAP Value: 12
  misc_feature: MA Experiment 20000492 PARAMETER Experiment Name: Zm_Hybrid_Seed_Dev_P Parameter: Organism Value: Zea mays
  misc_feature: MA Experiment 20000492 PARAMETER Experiment Name: Zm_Hybrid_Seed_Dev_P Parameter: Plant Line Value: 35A19
  misc_feature: MA Experiment 20000492 PARAMETER Experiment Name: Zm_Hybrid_Seed_Dev_P Parameter: Tissue Value: Fert Kernel vs. Unfert Floret
aacgagcgccaccgccttgatcccgcccgctcctccccagatctcctcgccattgccgccgccctgccaggattcgcgccctactcgcccagatccgaccgcggctctgattttccaactgacgcaggagcggtgggtctgaccgggcgcgacccgtcttctcatgggcgagacagcgtgatccctgcggctcgattgtaaattcgtgatctttcggggcattccttggtttgtctgtcggtgctggtggtgctgcgtttggagggccgcggagatgggcgtcggcggggagaagttccagctggggacggtgggggcgctgagcctctccgtggtgtcctctgtctccattgtcatctgcaacaaggcgctcatgagctccctcggctttaacttcgccactaccttgacgagctggcatctgctggttacattctgctcccttcatgtagcattatggatgaagttctttgagcataagccttttgattcaagaactgtcatgggatttggagtacttaacggaatctccattgggctcctcaacttgagtcttggcttcaactctgttgggttttaccagatgactaagctggcaatcatcccgtgcactgtcattttagagacacttttcttcaggaagaagttcagtcggagtatccagatgtccctttctgtgcttcttcttggtgttggtgttgcaactgtcactgatctgcaactcaatgctgtgggatccatactgtccttgctggcaattatcacgacttgcattgctcaaattatgacaaacactatccagaagaagttcaaggtctcatcaacccaactgctttaccagtcttgcccttaccaatcactgaccctgtttctcattggccccttccttgatggctttttgactaaccaaaatgtctttgcttttaattatacatctcaagttgtgtttttcatcgtcctgtcatgcttgatatctgtttcagtgaacttcagcactttccttgtgatcggaaagacatctcctgttacttaccaagtcctgggccatcttaaaacatgccttgttcttgcttttggttatgttttgcttcacgatccgtttagctggagaaacatacttggaatcctaattgctgtagttggaatggtcttgtattcatacttctgcacagtggagacccagcaaaaaaatgttgaagtctccccacaacaggtgaaagaaagcgaggcaggccctttgatcgcagactctatgagcaaagttgaaaacgggggtggtggtgttgatgacgagcctttgaaggtacccatgtggagctcaaagtactcgcgggagtgaaaaggtcacgatggcatggcaccatacaggattcaatttagtaggcagatagtagggttggaagccaacccagagtgtaatgaacatttcagttacatttttgggcttctttagtgtcgcagtctactagcagttaaaggatctgtttcttggaaggatcctaccttcagggctctcagacctaccttgaaactagacagcaggtattgtatgattgtatctcgatatgctccacatcctcttactgtaacttccaactggtacatggcgtgcctatatccaaagatagacctcattctttttgtatcaagaagatccgggt

SEQ ID NO: 11205 - protein, 354 aa, Zea mays subsp. mays
  peptide (1)..(354): Ceres Seq. ID no. 12342132
  misc_feature (1)..(353): Homolog of NCBI NO: 13699188 NR Description: putative glucose-6-phosphate/phosphate-tranlocat
  misc_feature (1)..(353): Homolog of NCBI NO: 34896140 NR Description: P0701D05.25 [Oryza sativa (japonica >gi|13486667|dbj|BAB39904.1| contains ESTs
  misc_feature (5)..(349): Homolog of NCBI NO: 22329373 NR Description: unknown protein; protein id: At1g06890.1, by cDNA: gi_19423945 [Arabidopsis thaliana] unknown protein [Arabidopsis thaliana]
  misc_feature (6)..(349): Homolog of NCBI NO: 27311731 NR Description: putative integral membrane protein [Arabidopsis
  misc_feature (6)..(323): Homolog of NCBI NO: 30683853 NR Description: transporter-related [Arabidopsis thaliana]
  misc_feature (5)..(335): Homolog of NCBI NO: 13384378 NR Description: putative phosphate translocator [Oryza sativa
  misc_feature (104)..(349): Homolog of NCBI NO: 25406945 NR Description: hypothetical protein [imported] - Arabidopsis >gi|7523696|gb|AAF63135.1|AC011001_5 Hypothetical protein
  misc_feature (104)..(335): Homolog of NCBI NO: 37535412 NR Description: putative
  misc_feature (5)..(82): Homolog of NCBI NO: 37535412 NR Description: putative
  misc_feature (6)..(311): Homolog of NCBI NO: 18411172 NR Description: expressed protein; protein id: At1g76670.1, by cDNA: gi_14532697, supported by cDNA: gi_16604379, supported cDNA: gi_18491194 [Arabidopsis thaliana] >gi|25354481|pir||A96795
MGVGGEKFQLGTVGALSLSVVSSVSIVICNKALMSSLGFNFATTLTSWHLLVTFCSLHVALWMKFFEHKPFDSRTVMGFGVLNGISIGLLNLSLGFNSVGFYQMTKLAIIPCTVILETLFFRKKFSRSIQMSLSVLLLGVGVATVTDLQLNAVGSILSLLAIITTCIAQIMTNTIQKKFKVSSTQLLYQSCPYQSLTLFLIGPFLDGFLTNQNVFAFNYTSQVVFFIVLSCLISVSVNFSTFLVIGKTSPVTYQVLGHLKTCLVLAFGYVLLHDPFSWRNILGILIAVVGMVLYSYFCTVETQQKNVEVSPQQVKESEAGPLIADSMSKVENGGGGVDDEPLKVPMWSSKYSRE

SEQ ID NO: 11206 - protein, 321 aa, Zea mays subsp. mays
  peptide (1)..(321): Ceres Seq. ID no. 12342133
  misc_feature (1)..(320): Homolog of NCBI NO: 13699188 NR Description: putative glucose-6-phosphate/phosphate-tranlocat
  misc_feature (1)..(320): Homolog of NCBI NO: 34896140 NR Description: P0701D05.25 [Oryza sativa (japonica >gi|13486667|dbj|BAB39904.1| contains ESTs
  misc_feature (1)..(316): Homolog of NCBI NO: 22329373 NR Description: unknown protein; protein id: At1g06890.1, by cDNA: gi_19423945 [Arabidopsis thaliana] unknown protein [Arabidopsis thaliana]
  misc_feature (1)..(316): Homolog of NCBI NO: 27311731 NR Description: putative integral membrane protein [Arabidopsis
  misc_feature (1)..(290): Homolog of NCBI NO: 30683853 NR Description: transporter-related [Arabidopsis thaliana]
  misc_feature (1)..(302): Homolog of NCBI NO: 13384378 NR Description: putative phosphate translocator [Oryza sativa
  misc_feature (71)..(316): Homolog of NCBI NO: 25406945 NR Description: hypothetical protein [imported] - Arabidopsis >gi|7523696|gb|AAF63135.1|AC011001_5 Hypothetical protein
  misc_feature (71)..(302): Homolog of NCBI NO: 37535412 NR Description: putative
  misc_feature (1)..(49): Homolog of NCBI NO: 37535412 NR Description: putative
  misc_feature (1)..(278): Homolog of NCBI NO: 18411172 NR Description: expressed protein; protein id: At1g76670.1, by cDNA: gi_14532697, supported by cDNA: gi_16604379, supported cDNA: gi_18491194 [Arabidopsis thaliana] >gi|25354481|pir||A96795
MSSLGFNFATTLTSWHLLVTFCSLHVALWMKFFEHKPFDSRTVMGFGVLNGISIGLLNLSLGFNSVGFYQMTKLAIIPCTVILETLFFRKKFSRSIQMSLSVLLLGVGVATVTDLQLNAVGSILSLLAIITTCIAQIMTNTIQKKFKVSSTQLLYQSCPYQSLTLFLIGPFLDGFLTNQNVFAFNYTSQVVFFIVLSCLISVSVNFSTFLVIGKTSPVTYQVLGHLKTCLVLAFGYVLLHDPFSWRNILGILIAVVGMVLYSYFCTVETQQKNVEVSPQQVKESEAGPLIADSMSKVENGGGGVDDEPLKVPMWSSKYSRE

SEQ ID NO: 11207 - protein, 292 aa, Zea mays subsp. mays
  peptide (1)..(292): Ceres Seq. ID no. 12342134
  misc_feature (1)..(287): Homolog of NCBI NO: 22329373 NR Description: unknown protein; protein id: At1g06890.1, by cDNA: gi_19423945 [Arabidopsis thaliana] unknown protein [Arabidopsis thaliana]
  misc_feature (1)..(287): Homolog of NCBI NO: 27311731 NR Description: putative integral membrane protein [Arabidopsis
  misc_feature (1)..(261): Homolog of NCBI NO: 30683853 NR Description: transporter-related [Arabidopsis thaliana]
  misc_feature (1)..(273): Homolog of NCBI NO: 13384378 NR Description: putative phosphate translocator [Oryza sativa
  misc_feature (42)..(287): Homolog of NCBI NO: 25406945 NR Description: hypothetical protein [imported] - Arabidopsis >gi|7523696|gb|AAF63135.1|AC011001_5 Hypothetical protein
  misc_feature (42)..(273): Homolog of NCBI NO: 37535412 NR Description: putative
  misc_feature (1)..(20): Homolog of NCBI NO: 37535412 NR Description: putative
  misc_feature (1)..(249): Homolog of NCBI NO: 18411172 NR Description: expressed protein; protein id: At1g76670.1, by cDNA: gi_14532697, supported by cDNA: gi_16604379, supported cDNA: gi_18491194 [Arabidopsis thaliana] >gi|25354481|pir||A96795
  misc_feature (1)..(291): Homolog of NCBI NO: 13699188 NR Description: putative glucose-6-phosphate/phosphate-tranlocat
  misc_feature (1)..(291): Homolog of NCBI NO: 34896140 NR Description: P0701D05.25 [Oryza sativa (japonica >gi|13486667|dbj|BAB39904.1| contains ESTs
MKFFEHKPFDSRTVMGFGVLNGISIGLLNLSLGFNSVGFYQMTKLAIIPCTVILETLFFRKKFSRSIQMSLSVLLLGVGVATVTDLQLNAVGSILSLLAIITTCIAQIMTNTIQKKFKVSSTQLLYQSCPYQSLTLFLIGPFLDGFLTNQNVFAFNYTSQVVFFIVLSCLISVSVNFSTFLVIGKTSPVTYQVLGHLKTCLVLAFGYVLLHDPFSWRNILGILIAVVGMVLYSYFCTVETQQKNVEVSPQQVKESEAGPLIADSMSKVENGGGGVDDEPLKVPMWSSKYSRE

SEQ ID NO: 11208 - DNA, 1674 bp, Zea mays subsp. mays; identical to SEQ ID NO: 11135
  misc_feature (1)..(1674): Ceres Seq. ID no. 13573191
  misc_feature: MA Experiment ID: 108504 Result: Up-regulated in Transcription
  misc_feature: MA Experiment 108504 PARAMETER Experiment Name: Zm_Drought_P Parameter: Age (day) Value: 8
  misc_feature: MA Experiment 108504 PARAMETER Experiment Name: Zm_Drought_P Parameter: Organism Value: Zea mays
  misc_feature: MA Experiment 108504 PARAMETER Experiment Name: Zm_Drought_P Parameter: Plant Line Value: 35A19
  misc_feature: MA Experiment 108504 PARAMETER Experiment Name: Zm_Drought_P Parameter: Timepoint (hr) Value: 12
  misc_feature: MA Experiment 108504 PARAMETER Experiment Name: Zm_Drought_P Parameter: Tissue Value: Aerial
  misc_feature: MA Experiment 108504 PARAMETER Experiment Name: Zm_Drought_P Parameter: Treatment Value: Drought vs. No Drought
  misc_feature: MA Experiment ID: 108522 Result: Up-regulated in Transcription
  misc_feature: MA Experiment 108522 PARAMETER Experiment Name: Zm_42deg_Heat_P Parameter: Age (day) Value: 8
  misc_feature: MA Experiment 108522 PARAMETER Experiment Name: Zm_42deg_Heat_P Parameter: Organism Value: Zea mays
  misc_feature: MA Experiment 108522 PARAMETER Experiment Name: Zm_42deg_Heat_P Parameter: Plant Line Value: 35A19
  misc_feature: MA Experiment 108522 PARAMETER Experiment Name: Zm_42deg_Heat_P Parameter: Temperature (deg C) Value: 42 vs. 22
  misc_feature: MA Experiment 108522 PARAMETER Experiment Name: Zm_42deg_Heat_P Parameter: Timepoint (hr) Value: 1
  misc_feature: MA Experiment 108522 PARAMETER Experiment Name: Zm_42deg_Heat_P Parameter: Tissue Value: Aerial
  misc_feature: MA Experiment ID: 108523 Result: Up-regulated in Transcription
  misc_feature: MA Experiment 108523 PARAMETER Experiment Name: Zm_42deg_Heat_P Parameter: Age (day) Value: 8
  misc_feature: MA Experiment 108523 PARAMETER Experiment Name: Zm_42deg_Heat_P Parameter: Organism Value: Zea mays
  misc_feature: MA Experiment 108523 PARAMETER Experiment Name: Zm_42deg_Heat_P Parameter: Plant Line Value: 35A19
  misc_feature: MA Experiment 108523 PARAMETER Experiment Name: Zm_42deg_Heat_P Parameter: Temperature (deg C) Value: 42 vs. 22
  misc_feature: MA Experiment 108523 PARAMETER Experiment Name: Zm_42deg_Heat_P Parameter: Timepoint (hr) Value: 6
  misc_feature: MA Experiment 108523 PARAMETER Experiment Name: Zm_42deg_Heat_P Parameter: Tissue Value: Aerial
  misc_feature: MA Experiment ID: 108536 Result: Up-regulated in Transcription
  misc_feature: MA Experiment 108536 PARAMETER Experiment Name: Zm_Meristem_P Parameter: Age (day) Value: 8
  misc_feature: MA Experiment 108536 PARAMETER Experiment Name: Zm_Meristem_P Parameter: Organism Value: Zea mays
  misc_feature: MA Experiment 108536 PARAMETER Experiment Name: Zm_Meristem_P Parameter: Plant Line Value: 35A19
  misc_feature: MA Experiment 108536 PARAMETER Experiment Name: Zm_Meristem_P Parameter: Tissue Value: Shoot Meristem vs. Above Shoot Meristem
  misc_feature: MA Experiment ID: 108556 Result: Up-regulated in Transcription
  misc_feature: MA Experiment 108556 PARAMETER Experiment Name: Zm_Drought_P Parameter: Age (day) Value: 9
  misc_feature: MA Experiment 108556 PARAMETER Experiment Name: Zm_Drought_P Parameter: Organism Value: Zea mays
  misc_feature: MA Experiment 108556 PARAMETER Experiment Name: Zm_Drought_P Parameter: Plant Line Value: 35A19
  misc_feature: MA Experiment 108556 PARAMETER Experiment Name: Zm_Drought_P Parameter: Timepoint (hr) Value: 24
  misc_feature: MA Experiment 108556 PARAMETER Experiment Name: Zm_Drought_P Parameter: Tissue Value: Aerial
  misc_feature: MA Experiment 108556 PARAMETER Experiment Name: Zm_Drought_P Parameter: Treatment Value: Drought vs. No Drought
  misc_feature: MA Experiment ID: 108559 Result: Up-regulated in Transcription
  misc_feature: MA Experiment 108559 PARAMETER Experiment Name: Zm_5mM_NO_P Parameter: Age (day) Value: 8
  misc_feature: MA Experiment 108559 PARAMETER Experiment Name: Zm_5mM_NO_P Parameter: Organism Value: Zea mays
  misc_feature: MA Experiment 108559 PARAMETER Experiment Name: Zm_5mM_NO_P Parameter: Plant Line Value: 35A19
  misc_feature: MA Experiment 108559 PARAMETER Experiment Name: Zm_5mM_NO_P Parameter: Timepoint (hr) Value: 12
  misc_feature: MA Experiment 108559 PARAMETER Experiment Name: Zm_5mM_NO_P Parameter: Tissue Value: Aerial
  misc_feature: MA Experiment 108559 PARAMETER Experiment Name: Zm_5mM_NO_P Parameter: Treatment Value: 5mM NO vs. No Treatment
  misc_feature: MA Experiment ID: 20000477 Result: Up-regulated in Transcription
  misc_feature: MA Experiment 20000477 PARAMETER Experiment Name: Zm_5mM_SA_P Parameter: Age (day) Value: 10
  misc_feature: MA Experiment 20000477 PARAMETER Experiment Name: Zm_5mM_SA_P Parameter: Organism Value: Zea mays
  misc_feature: MA Experiment 20000477 PARAMETER Experiment Name: Zm_5mM_SA_P Parameter: Plant Line Value: 35A19
  misc_feature: MA Experiment 20000477 PARAMETER Experiment Name: Zm_5mM_SA_P Parameter: Timepoint (hr) Value: 48
  misc_feature: MA Experiment 20000477 PARAMETER Experiment Name: Zm_5mM_SA_P Parameter: Tissue Value: Aerial
  misc_feature: MA Experiment 20000477 PARAMETER Experiment Name: Zm_5mM_SA_P Parameter: Treatment Value: 5mM SA vs. No Treatment
  misc_feature: MA Experiment ID: 20000478 Result: Up-regulated in Transcription
  misc_feature: MA Experiment 20000478 PARAMETER Experiment Name: Zm_5mM_SA_P Parameter: Age (day) Value: 11
  misc_feature: MA Experiment 20000478 PARAMETER Experiment Name: Zm_5mM_SA_P Parameter: Organism Value: Zea mays
  misc_feature: MA Experiment 20000478 PARAMETER Experiment Name: Zm_5mM_SA_P Parameter: Plant Line Value: 35A19
  misc_feature: MA Experiment 20000478 PARAMETER Experiment Name: Zm_5mM_SA_P Parameter: Timepoint (hr) Value: 72
  misc_feature: MA Experiment 20000478 PARAMETER Experiment Name: Zm_5mM_SA_P Parameter: Tissue Value: Aerial
  misc_feature: MA Experiment 20000478 PARAMETER Experiment Name: Zm_5mM_SA_P Parameter: Treatment Value: 5mM SA vs. No Treatment
  misc_feature: MA Experiment ID: 20000479 Result: Up-regulated in Transcription
  misc_feature: MA Experiment 20000479 PARAMETER Experiment Name: Zm_Drought_P Parameter: Age (day) Value: 10
  misc_feature: MA Experiment 20000479 PARAMETER Experiment Name: Zm_Drought_P Parameter: Organism Value: Zea mays
  misc_feature: MA Experiment 20000479 PARAMETER Experiment Name: Zm_Drought_P Parameter: Plant Line Value: 35A19
  misc_feature: MA Experiment 20000479 PARAMETER Experiment Name: Zm_Drought_P Parameter: Timepoint (hr) Value: 48
  misc_feature: MA Experiment 20000479 PARAMETER Experiment Name: Zm_Drought_P Parameter: Tissue Value: Aerial
  misc_feature: MA Experiment 20000479 PARAMETER Experiment Name: Zm_Drought_P Parameter: Treatment Value: Drought vs. No Drought
  misc_feature: MA Experiment ID: 20000480 Result: Up-regulated in Transcription
  misc_feature: MA Experiment 20000480 PARAMETER Experiment Name: Zm_Drought_P Parameter: Age (day) Value: 11
  misc_feature: MA Experiment 20000480 PARAMETER Experiment Name: Zm_Drought_P Parameter: Organism Value: Zea mays
  misc_feature: MA Experiment 20000480 PARAMETER Experiment Name: Zm_Drought_P Parameter: Plant Line Value: 35A19
  misc_feature: MA Experiment 20000480 PARAMETER Experiment Name: Zm_Drought_P Parameter: Timepoint (hr) Value: 72
  misc_feature: MA Experiment 20000480 PARAMETER Experiment Name: Zm_Drought_P Parameter: Tissue Value: Aerial
  misc_feature: MA Experiment 20000480 PARAMETER Experiment Name: Zm_Drought_P Parameter: Treatment Value: Drought vs. No Drought
  misc_feature: MA Experiment ID: 20000487 Result: Up-regulated in Transcription
  misc_feature: MA Experiment 20000487 PARAMETER Experiment Name: Zm_50mM_NH4NO3_L_to_H_P Parameter: Organism Value: Zea mays
  misc_feature: MA Experiment 20000487 PARAMETER Experiment Name: Zm_50mM_NH4NO3_L_to_H_P Parameter: Timepoint (hr) Value: 4
  misc_feature: MA Experiment 20000487 PARAMETER Experiment Name: Zm_50mM_NH4NO3_L_to_H_P Parameter: Tissue Value: Leaves
  misc_feature: MA Experiment 20000487 PARAMETER Experiment Name: Zm_50mM_NH4NO3_L_to_H_P Parameter: Treatment Value: 50mM NH4NO3 vs. 100mM Mannitol
  misc_feature: MA Experiment ID: 20000534 Result: Up-regulated in Transcription
  misc_feature: MA Experiment 20000534 PARAMETER Experiment Name: Zm_Hybrid_Pollen_P Parameter: Age (day) Value: 8
  misc_feature: MA Experiment 20000534 PARAMETER Experiment Name: Zm_Hybrid_Pollen_P Parameter: Organism Value: Zea mays
  misc_feature: MA Experiment 20000534 PARAMETER Experiment Name: Zm_Hybrid_Pollen_P Parameter: Plant Line Value: 35A19
  misc_feature: MA Experiment 20000534 PARAMETER Experiment Name: Zm_Hybrid_Pollen_P Parameter: Tissue Value: Pollen vs. Aerial
  misc_feature: MA Experiment ID: 20000629 Result: Down-regulated in Transcription
  misc_feature: MA Experiment 20000629 PARAMETER Experiment Name: Zm_Herbicide-Treatments_P Parameter: Timepoint (hr) Value: 12
  misc_feature: MA Experiment 20000629 PARAMETER Experiment Name: Zm_Herbicide-Treatments_P Parameter: Tissue Value: Aerial
  misc_feature: MA Experiment 20000629 PARAMETER Experiment Name: Zm_Herbicide-Treatments_P Parameter: Treatment Value: Trimec vs. No Treatment
  misc_feature: MA Experiment ID: 20001613 Result: Up-regulated in Transcription
  misc_feature: MA Experiment 20001613 PARAMETER Experiment Name: Zm_50ppm_KNO3_L-to-H_P Parameter: Age (day) Value: 20
  misc_feature: MA Experiment 20001613 PARAMETER Experiment Name: Zm_50ppm_KNO3_L-to-H_P Parameter: Organism Value: Zea mays
  misc_feature: MA Experiment 20001613 PARAMETER Experiment Name: Zm_50ppm_KNO3_L-to-H_P Parameter: Plant Line Value: 35A19
  misc_feature: MA Experiment 20001613 PARAMETER Experiment Name: Zm_50ppm_KNO3_L-to-H_P Parameter: Timepoint (hr) Value: 24
  misc_feature: MA Experiment 20001613 PARAMETER Experiment Name: Zm_50ppm_KNO3_L-to-H_P Parameter: Tissue Value: Roots
  misc_feature: MA Experiment 20001613 PARAMETER Experiment Name: Zm_50ppm_KNO3_L-to-H_P Parameter: Treatment Value: 50ppm KNO3 vs. 50ppm KCl

SEQ ID NO: 11209 - protein, 300 aa, Zea mays subsp. mays; identical to SEQ ID NO: 11136
  peptide (1)..(300): Ceres Seq. ID no. 13573192
  misc_feature (59)..(142): Pfam Name: CHY zinc finger Pfam Description: CHY zinc finger
  misc_feature (59)..(142): Pfam Name: CHY zinc finger Pfam Description: CHY zinc finger
  misc_feature (4)..(300): Homolog of NCBI NO: 34910658 NR Description: putative PGPD14 protein (pollen germination
  misc_feature (37)..(299): Homolog of NCBI NO: 4105798 NR Description: PGPD14 [Petunia x hybrida]
  misc_feature (40)..(300): Homolog of NCBI NO: 15237169 NR Description: PGPD14 protein [Arabidopsis thaliana] PGPD14 protein [Arabidopsis thaliana] >gi|15450521|gb|AAK96553.1| [Arabidopsis thaliana] >gi|27363264|gb|AAO11551.1|
  misc_feature (51)..(300): Homolog of NCBI NO: 21593716 NR Description: PGPD14 protein [Arabidopsis thaliana]
  misc_feature (57)..(299): Homolog of NCBI NO: 37535002 NR Description: putative PGPD14 protein (pollen germination
  misc_feature (37)..(299): Homolog of NCBI NO: 4105798 NR Description: PGPD14 [Petunia x hybrida]
  misc_feature (51)..(300): Homolog of NCBI NO: 21593716 NR Description: PGPD14 protein [Arabidopsis thaliana]
  misc_feature (6)..(299): Homolog of NCBI NO: 24582224 NR Description: CG16947-PA [Drosophila melanogaster]
  misc_feature (26)..(300): Homolog of NCBI NO: 11358168 NR Description: hypothetical protein T20O10.70 - Arabidopsis >gi|7573426|emb|CAB87742.1| putative protein [Arabidopsis
  misc_feature (53)..(300): Homolog of NCBI NO: 30102616 NR Description: At3g62970 [Arabidopsis thaliana]
  misc_feature (26)..(300): Homolog of NCBI NO: 30695702 NR Description: expressed protein [Arabidopsis thaliana]
  misc_feature (42)..(300): Homolog of NCBI NO: 15238890 NR Description: expressed protein [Arabidopsis thaliana] unknown protein [Arabidopsis thaliana]
  misc_feature (57)..(299): Homolog of NCBI NO: 37535002 NR Description: putative PGPD14 protein (pollen germination
  misc_feature (40)..(300): Homolog of NCBI NO: 15237169 NR Description: PGPD14 protein [Arabidopsis thaliana] PGPD14 protein [Arabidopsis thaliana] >gi|15450521|gb|AAK96553.1| [Arabidopsis thaliana] >gi|27363264|gb|AAO11551.1|
  misc_feature (4)..(300): Homolog of NCBI NO: 34910658 NR Description: putative PGPD14 protein (pollen germination
  misc_feature (42)..(300): Homolog of NCBI NO: 15238890 NR Description: expressed protein [Arabidopsis thaliana] unknown protein [Arabidopsis thaliana]
  misc_feature (26)..(300): Homolog of NCBI NO: 30695702 NR Description: expressed protein [Arabidopsis thaliana]
  misc_feature (53)..(300): Homolog of NCBI NO: 30102616 NR Description: At3g62970 [Arabidopsis thaliana]
  misc_feature (26)..(300): Homolog of NCBI NO: 11358168 NR Description: hypothetical protein T20O10.70 - Arabidopsis >gi|7573426|emb|CAB87742.1| putative protein [Arabidopsis
  misc_feature (6)..(299): Homolog of NCBI NO: 24582224 NR Description: CG16947-PA [Drosophila melanogaster]

SEQ ID NO: 11210 - protein, 246 aa, Zea mays subsp. mays; identical to SEQ ID NO: 11137
  peptide (1)..(246): Ceres Seq. ID no. 13573193
  misc_feature (5)..(88): Pfam Name: CHY zinc finger Pfam Description: CHY zinc finger
  misc_feature (5)..(88): Pfam Name: CHY zinc finger Pfam Description: CHY zinc finger
  misc_feature (1)..(246): Homolog of NCBI NO: 34910658 NR Description: putative PGPD14 protein (pollen germination
  misc_feature (1)..(245): Homolog of NCBI NO: 4105798 NR Description: PGPD14 [Petunia x hybrida]
  misc_feature (1)..(246): Homolog of NCBI NO: 15237169 NR Description: PGPD14 protein [Arabidopsis thaliana] PGPD14 protein [Arabidopsis thaliana] >gi|15450521|gb|AAK96553.1| [Arabidopsis thaliana] >gi|27363264|gb|AAO11551.1|
  misc_feature (1)..(246): Homolog of NCBI NO: 21593716 NR Description: PGPD14 protein [Arabidopsis thaliana]
  misc_feature (3)..(245): Homolog of NCBI NO: 37535002 NR Description: putative PGPD14 protein (pollen germination
  misc_feature (1)..(245): Homolog of NCBI NO: 4105798 NR Description: PGPD14 [Petunia x hybrida]
  misc_feature (1)..(246): Homolog of NCBI NO: 21593716 NR Description: PGPD14 protein [Arabidopsis thaliana]
  misc_feature (1)..(245): Homolog of NCBI NO: 24582224 NR Description: CG16947-PA [Drosophila melanogaster]
  misc_feature (1)..(246): Homolog of NCBI NO: 11358168 NR Description: hypothetical protein T20O10.70 - Arabidopsis >gi|7573426|emb|CAB87742.1| putative protein [Arabidopsis
  misc_feature (1)..(246): Homolog of NCBI NO: 30102616 NR Description: At3g62970 [Arabidopsis thaliana]
  misc_feature (1)..(246): Homolog of NCBI NO: 30695702 NR Description: expressed protein [Arabidopsis thaliana]
  misc_feature (1)..(246): Homolog of NCBI NO: 15238890 NR Description: expressed protein [Arabidopsis thaliana] unknown protein [Arabidopsis thaliana]
  misc_feature (3)..(245): Homolog of NCBI NO: 37535002 NR Description: putative PGPD14 protein (pollen germination
  misc_feature (1)..(246): Homolog of NCBI NO: 15237169 NR Description: PGPD14 protein [Arabidopsis thaliana] PGPD14 protein [Arabidopsis thaliana] >gi|15450521|gb|AAK96553.1| [Arabidopsis thaliana] >gi|27363264|gb|AAO11551.1|
  misc_feature (1)..(246): Homolog of NCBI NO: 34910658 NR Description: putative PGPD14 protein (pollen germination
  misc_feature (1)..(246): Homolog of NCBI NO: 15238890 NR Description: expressed protein [Arabidopsis thaliana] unknown protein [Arabidopsis thaliana]
  misc_feature (1)..(246): Homolog of NCBI NO: 30695702 NR Description: expressed protein [Arabidopsis thaliana]
  misc_feature (1)..(246): Homolog of NCBI NO: 30102616 NR Description: At3g62970 [Arabidopsis thaliana]
  misc_feature (1)..(246): Homolog of NCBI NO: 11358168 NR Description: hypothetical protein T20O10.70 - Arabidopsis >gi|7573426|emb|CAB87742.1| putative protein [Arabidopsis
  misc_feature (1)..(245): Homolog of NCBI NO: 24582224 NR Description: CG16947-PA [Drosophila melanogaster]

SEQ ID NO: 11211 - protein, 206 aa, Zea mays subsp. mays; identical to SEQ ID NO: 11138
  peptide (1)..(206): Ceres Seq. ID no. 13573194
  misc_feature (101)..(143): Pfam Name: Zinc finger, C3HC4 type (RING finger) Pfam Description: Zinc finger, C3HC4 type (RING finger)
  misc_feature (101)..(143): Pfam Name: Zinc finger, C3HC4 type (RING finger) Pfam Description: Zinc finger, C3HC4 type (RING finger)
  misc_feature (1)..(206): Homolog of NCBI NO: 34910658 NR Description: putative PGPD14 protein (pollen germination
  misc_feature (1)..(205): Homolog of NCBI NO: 4105798 NR Description: PGPD14 [Petunia x hybrida]
  misc_feature (1)..(206): Homolog of NCBI NO: 15237169 NR Description: PGPD14 protein [Arabidopsis thaliana] PGPD14 protein [Arabidopsis thaliana] >gi|15450521|gb|AAK96553.1| [Arabidopsis thaliana] >gi|27363264|gb|AAO11551.1|
  misc_feature (1)..(206): Homolog of NCBI NO: 21593716 NR Description: PGPD14 protein [Arabidopsis thaliana]
  misc_feature (1)..(205): Homolog of NCBI NO: 37535002 NR Description: putative PGPD14 protein (pollen germination
  misc_feature (1)..(205): Homolog of NCBI NO: 4105798 NR Description: PGPD14 [Petunia x hybrida]
  misc_feature (1)..(206): Homolog of NCBI NO: 21593716 NR Description: PGPD14 protein [Arabidopsis thaliana]
  misc_feature (1)..(205): Homolog of NCBI NO: 24582224 NR Description: CG16947-PA [Drosophila melanogaster]
  misc_feature (1)..(206): Homolog of NCBI NO: 11358168 NR Description: hypothetical protein T20O10.70 - Arabidopsis >gi|7573426|emb|CAB87742.1| putative protein [Arabidopsis
  misc_feature (1)..(206): Homolog of NCBI NO: 30102616 NR Description: At3g62970 [Arabidopsis thaliana]
  misc_feature (1)..(206): Homolog of NCBI NO: 30695702 NR Description: expressed protein [Arabidopsis thaliana]
  misc_feature (1)..(206): Homolog of NCBI NO: 15238890 NR Description: expressed protein [Arabidopsis thaliana] unknown protein [Arabidopsis thaliana]
  misc_feature (1)..(205): Homolog of NCBI NO: 37535002 NR Description: putative PGPD14 protein (pollen germination
  misc_feature (1)..(206): Homolog of NCBI NO: 15237169 NR Description: PGPD14 protein [Arabidopsis thaliana] PGPD14 protein [Arabidopsis thaliana] >gi|15450521|gb|AAK96553.1| [Arabidopsis thaliana] >gi|27363264|gb|AAO11551.1|
  misc_feature (1)..(206): Homolog of NCBI NO: 34910658 NR Description: putative PGPD14 protein (pollen germination
  misc_feature (1)..(206): Homolog of NCBI NO: 15238890 NR Description: expressed protein [Arabidopsis thaliana] unknown protein [Arabidopsis thaliana]
  misc_feature (1)..(206): Homolog of NCBI NO: 30695702 NR Description: expressed protein [Arabidopsis thaliana]
  misc_feature (1)..(206): Homolog of NCBI NO: 30102616 NR Description: At3g62970 [Arabidopsis thaliana]
  misc_feature (1)..(206): Homolog of NCBI NO: 11358168 NR Description: hypothetical protein T20O10.70 - Arabidopsis >gi|7573426|emb|CAB87742.1| putative protein [Arabidopsis
  misc_feature (1)..(205): Homolog of NCBI NO: 24582224 NR Description: CG16947-PA [Drosophila melanogaster]

SEQ ID NO: 11212 - DNA, 1179 bp, Zea mays subsp. mays
  misc_feature (1)..(1179): Ceres Seq. ID no. 12355619
  misc_feature: MA Experiment ID: 108504 Result: Down-regulated in Transcription
  misc_feature: MA Experiment 108504 PARAMETER Experiment Name: Zm_Drought_P Parameter: Age (day) Value: 8
  misc_feature: MA Experiment 108504 PARAMETER Experiment Name: Zm_Drought_P Parameter: Organism Value: Zea mays
  misc_feature: MA Experiment 108504 PARAMETER Experiment Name: Zm_Drought_P Parameter: Plant Line Value: 35A19
  misc_feature: MA Experiment 108504 PARAMETER Experiment Name: Zm_Drought_P Parameter: Timepoint (hr) Value: 12
  misc_feature: MA Experiment 108504 PARAMETER Experiment Name: Zm_Drought_P Parameter: Tissue Value: Aerial
  misc_feature: MA Experiment 108504 PARAMETER Experiment Name: Zm_Drought_P Parameter: Treatment Value: Drought vs. No Drought
  misc_feature: MA Experiment ID: 108523 Result: Down-regulated in Transcription
  misc_feature: MA Experiment 108523 PARAMETER Experiment Name: Zm_42deg_Heat_P Parameter: Age (day) Value: 8
  misc_feature: MA Experiment 108523 PARAMETER Experiment Name: Zm_42deg_Heat_P Parameter: Organism Value: Zea mays
  misc_feature: MA Experiment 108523 PARAMETER Experiment Name: Zm_42deg_Heat_P Parameter: Plant Line Value: 35A19
  misc_feature: MA Experiment 108523 PARAMETER Experiment Name: Zm_42deg_Heat_P Parameter: Temperature (deg C) Value: 42 vs. 22
  misc_feature: MA Experiment 108523 PARAMETER Experiment Name: Zm_42deg_Heat_P Parameter: Timepoint (hr) Value: 6
  misc_feature: MA Experiment 108523 PARAMETER Experiment Name: Zm_42deg_Heat_P Parameter: Tissue Value: Aerial
  misc_feature: MA Experiment ID: 108543 Result: Up-regulated in Transcription
  misc_feature: MA Experiment ID: 108556 Result: Down-regulated in Transcription
  misc_feature: MA Experiment 108556 PARAMETER Experiment Name: Zm_Drought_P Parameter: Age (day) Value: 9
  misc_feature: MA Experiment 108556 PARAMETER Experiment Name: Zm_Drought_P Parameter: Organism Value: Zea mays
  misc_feature: MA Experiment 108556 PARAMETER Experiment Name: Zm_Drought_P Parameter: Plant Line Value: 35A19
  misc_feature: MA Experiment 108556 PARAMETER Experiment Name: Zm_Drought_P Parameter: Timepoint (hr) Value: 24
  misc_feature: MA Experiment 108556 PARAMETER Experiment Name: Zm_Drought_P Parameter: Tissue Value: Aerial
  misc_feature: MA Experiment 108556 PARAMETER Experiment Name: Zm_Drought_P Parameter: Treatment Value: Drought vs. No Drought
  misc_feature: MA Experiment ID: 108597 Result: Down-regulated in Transcription
  misc_feature: MA Experiment 108597 PARAMETER Experiment Name: Zm_100uM_ABA_P Parameter: Age (day) Value: 9
  misc_feature: MA Experiment 108597 PARAMETER Experiment Name: Zm_100uM_ABA_P Parameter: Organism Value: Zea mays
  misc_feature: MA Experiment 108597 PARAMETER Experiment Name: Zm_100uM_ABA_P Parameter: Plant Line Value: 35A19
  misc_feature: MA Experiment 108597 PARAMETER Experiment Name: Zm_100uM_ABA_P Parameter: Timepoint (hr) Value: 24
  misc_feature: MA Experiment 108597 PARAMETER Experiment Name: Zm_100uM_ABA_P Parameter: Tissue Value: Aerial
  misc_feature: MA Experiment 108597 PARAMETER Experiment Name: Zm_100uM_ABA_P Parameter: Treatment Value: 100uM ABA vs. No Treatment
  misc_feature: MA Experiment ID: 20000477 Result: Down-regulated in Transcription
  misc_feature: MA Experiment 20000477 PARAMETER Experiment Name: Zm_5mM_SA_P Parameter: Age (day) Value: 10
  misc_feature: MA Experiment 20000477 PARAMETER Experiment Name: Zm_5mM_SA_P Parameter: Organism Value: Zea mays
  misc_feature: MA Experiment 20000477 PARAMETER Experiment Name: Zm_5mM_SA_P Parameter: Plant Line Value: 35A19
  misc_feature: MA Experiment 20000477 PARAMETER Experiment Name: Zm_5mM_SA_P Parameter: Timepoint (hr) Value: 48
  misc_feature: MA Experiment 20000477 PARAMETER Experiment Name: Zm_5mM_SA_P Parameter: Tissue Value: Aerial
  misc_feature: MA Experiment 20000477 PARAMETER Experiment Name: Zm_5mM_SA_P Parameter: Treatment Value: 5mM SA vs. No Treatment
  misc_feature: MA Experiment ID: 20000478 Result: Down-regulated in Transcription
  misc_feature: MA Experiment 20000478 PARAMETER Experiment Name: Zm_5mM_SA_P Parameter: Age (day) Value: 11
  misc_feature: MA Experiment 20000478 PARAMETER Experiment Name: Zm_5mM_SA_P Parameter: Organism Value: Zea mays
  misc_feature: MA Experiment 20000478 PARAMETER Experiment Name: Zm_5mM_SA_P Parameter: Plant Line Value: 35A19
  misc_feature: MA Experiment 20000478 PARAMETER Experiment Name: Zm_5mM_SA_P Parameter: Timepoint (hr) Value: 72
  misc_feature: MA Experiment 20000478 PARAMETER Experiment Name: Zm_5mM_SA_P Parameter: Tissue Value: Aerial
  misc_feature: MA Experiment 20000478 PARAMETER Experiment Name: Zm_5mM_SA_P Parameter: Treatment Value: 5mM SA vs. No Treatment
  misc_feature: MA Experiment ID: 20000479 Result: Down-regulated in Transcription
  misc_feature: MA Experiment 20000479 PARAMETER Experiment Name: Zm_Drought_P Parameter: Age (day) Value: 10
  misc_feature: MA Experiment 20000479 PARAMETER Experiment Name: Zm_Drought_P Parameter: Organism Value: Zea mays
  misc_feature: MA Experiment 20000479 PARAMETER Experiment Name: Zm_Drought_P Parameter: Plant Line Value: 35A19
  misc_feature: MA Experiment 20000479 PARAMETER Experiment Name: Zm_Drought_P Parameter: Timepoint (hr) Value: 48
  misc_feature: MA Experiment 20000479 PARAMETER Experiment Name: Zm_Drought_P Parameter: Tissue Value: Aerial
  misc_feature: MA Experiment 20000479 PARAMETER Experiment Name: Zm_Drought_P Parameter: Treatment Value: Drought vs. No Drought
  misc_feature: MA Experiment ID: 20000480 Result: Down-regulated in Transcription
  misc_feature: MA Experiment 20000480 PARAMETER Experiment Name: Zm_Drought_P Parameter: Age (day) Value: 11
  misc_feature: MA Experiment 20000480 PARAMETER Experiment Name: Zm_Drought_P Parameter: Organism Value: Zea mays
  misc_feature: MA Experiment 20000480 PARAMETER Experiment Name: Zm_Drought_P Parameter: Plant Line Value: 35A19
  misc_feature: MA Experiment 20000480 PARAMETER Experiment Name: Zm_Drought_P Parameter: Timepoint (hr) Value: 72
  misc_feature: MA Experiment 20000480 PARAMETER Experiment Name: Zm_Drought_P Parameter: Tissue Value: Aerial
  misc_feature: MA Experiment 20000480 PARAMETER Experiment Name: Zm_Drought_P Parameter: Treatment Value: Drought vs. No Drought
  misc_feature: MA Experiment ID: 20000534 Result: Down-regulated in Transcription
  misc_feature: MA Experiment 20000534 PARAMETER Experiment Name: Zm_Hybrid_Pollen_P Parameter: Age (day) Value: 8
  misc_feature: MA Experiment 20000534 PARAMETER Experiment Name: Zm_Hybrid_Pollen_P Parameter: Organism Value: Zea mays
  misc_feature: MA Experiment 20000534 PARAMETER Experiment Name: Zm_Hybrid_Pollen_P Parameter: Plant Line Value: 35A19
  misc_feature: MA Experiment 20000534 PARAMETER Experiment Name: Zm_Hybrid_Pollen_P Parameter: Tissue Value: Pollen vs. Aerial
  misc_feature: MA Experiment ID: 20000535 Result: Down-regulated in Transcription
  misc_feature: MA Experiment 20000535 PARAMETER Experiment Name: Zm_Hybrid_Seed_Dev_P Parameter: DAP Value: 30 vs. 12
  misc_feature: MA Experiment 20000535 PARAMETER Experiment Name: Zm_Hybrid_Seed_Dev_P Parameter: Organism Value: Zea mays
  misc_feature: MA Experiment 20000535 PARAMETER Experiment Name: Zm_Hybrid_Seed_Dev_P Parameter: Plant Line Value: 35A19
  misc_feature: MA Experiment 20000535 PARAMETER Experiment Name: Zm_Hybrid_Seed_Dev_P Parameter: Tissue Value: Embryo vs. Unfert Floret
gttgagaatcaattgctagtacgatttcttctctcctccaaaccggccaagccaccaaccagcgccccccaccgccgcctttttatttcatccacgctgctcgtgctcgctgcctgcttctcgcgcgatcgtctcggcctctcgggattctagagtggcggccggctctccgcctgttcttgtcgtcgctgctcctttcccaggatgtcggaacgttctgagagcgcaactgaaaagattatgagcagcatcatggataccattgctgacaaccttcctaagcagaagtctgggaaatttgatccaggttcagtctctgacaaagtgaagaataagctgtttggtcgtcagaagaccttgcatggagttctgggtggtggaaaacctgctgatgtgctgttatggaggaacaaaaagatatcatcgagtgttctggctcttgcaacagctatttgggttttctttgagtggctcgactaccacttactgacaattgtttcatttgcccttgttcttggaatggttgtccagtttgtttggtccaacttctcaaacatgctaagcagcggatcccgttctcaggtgccccgagttgaattgcctgatgagttatttgtgaacattgccgttgcaatcggtgcccaaataaacaagttcctgtgcttccttcaggatgtttcttgtgaaagaaacttgaagcattttgtagtggcgatcgcaggactgtgggctgctgcggtgattggaagttggtgcaatttcctgactgtcatatatgtcgggtttgtttgtgttcacacgcttccggtgctctatgagaagtacgaagaccaagtggacgatttcctctacagccttcttggtctgctgcgagatcaatatcagaagctcgaccaaggcgtcttgagcaagattcccaaggggaacatgaaggctaagaagaacgagtagtttagcaggtggtttctcgtgaatgagatcaatatcgttttgacttgtgtcgattattacctaaggcgtgtgtgccattctgaacctggctgctagttcatcgcccgccgggggtttaaactactaagctgcaatgcacaagtaatgaagtgtgctagttcattgcccacacgggtactagttcttcgactcatttaaatttctgatccgatcatttgcgggatattg

SEQ ID NO: 11213 - protein, 248 aa, Zea mays subsp. mays
  peptide (1)..(248): Ceres Seq. ID no. 12355620
  misc_feature (1)..(248): Homolog of NCBI NO: 34897094 NR Description: unknown protein [Oryza sativa (japonica
  misc_feature (1)..(248): Homolog of NCBI NO: 34899590 NR Description: hypothetical protein~similar to Oryza sativa
  misc_feature (1)..(248): Homolog of NCBI NO: 30681227 NR Description: expressed protein [Arabidopsis thaliana]
  misc_feature (6)..(248): Homolog of NCBI NO: 18398810 NR Description: expressed protein; protein id: At3g10260.1, by cDNA: 15153., supported by cDNA: gi_20259182 [Arabidopsis >gi|6056199|gb|AAF02816.1|AC009400_12 unknown protein
  misc_feature (6)..(247): Homolog of NCBI NO: 34909318 NR Description: OSJNBb0021A09.5 [Oryza sativa (japonica
  misc_feature (44)..(247): Homolog of NCBI NO: 34904202 NR Description: P0492F05.25 [Oryza sativa (japonica
  misc_feature (6)..(245): Homolog of NCBI NO: 18406991 NR Description: expressed protein; protein id: At2g46170.1, by cDNA: gi_15450758, supported by cDNA: gi_18491130 [Arabidopsis >gi|25408969|pir||E84899 hypothetical protein At2g46170
  misc_feature (14)..(248): Homolog of NCBI NO: 15236556 NR Description: putative protein; protein id: At4g23630.1, by cDNA: 39185., supported by cDNA: gi_15215585 [Arabidopsis
  misc_feature (3)..(240): Homolog of NCBI NO: 15222616 NR Description: hypothetical protein; protein id: At1g64090.1, by cDNA: gi_17381217 [Arabidopsis thaliana] F22C12.15 [Arabidopsis thaliana] >gi|17381218|gb|AAL36421.1|
  misc_feature (1)..(248): Homolog of NCBI NO: 15237093 NR Description: putative protein; protein id: At4g11220.1, by cDNA: 23536., supported by cDNA: gi_14334419, supported by gi_15081760, supported by cDNA: gi_16209686 [Arabidopsis
MSERSESATEKIMSSIMDTIADNLPKQKSGKFDPGSVSDKVKNKLFGRQKTLHGVLGGGKPADVLLWRNKKISSSVLALATAIWVFFEWLDYHLLTIVSFALVLGMVVQFVWSNFSNMLSSGSRSQVPRVELPDELFVNIAVAIGAQINKFLCFLQDVSCERNLKHFVVAIAGLWAAAVIGSWCNFLTVIYVGFVCVHTLPVLYEKYEDQVDDFLYSLLGLLRDQYQKLDQGVLSKIPKGNMKAKKNE

SEQ ID NO: 11214 - protein, 236 aa, Zea mays subsp. mays
  peptide (1)..(236): Ceres Seq. ID no. 12355621
  misc_feature (1)..(236): Homolog of NCBI NO: 34897094 NR Description: unknown protein [Oryza sativa (japonica
  misc_feature (1)..(236): Homolog of NCBI NO: 34899590 NR Description: hypothetical protein~similar to Oryza sativa
  misc_feature (1)..(236): Homolog of NCBI NO: 30681227 NR Description: expressed protein [Arabidopsis thaliana]
  misc_feature (1)..(236): Homolog of NCBI NO: 18398810 NR Description: expressed protein; protein id: At3g10260.1, by cDNA: 15153., supported by cDNA: gi_20259182 [Arabidopsis >gi|6056199|gb|AAF02816.1|AC009400_12 unknown protein
  misc_feature (1)..(235): Homolog of NCBI NO: 34909318 NR Description: OSJNBb0021A09.5 [Oryza sativa (japonica
  misc_feature (32)..(235): Homolog of NCBI NO: 34904202 NR Description: P0492F05.25 [Oryza sativa (japonica
  misc_feature (1)..(233): Homolog of NCBI NO: 18406991 NR Description: expressed protein; protein id: At2g46170.1, by cDNA: gi_15450758, supported by cDNA: gi_18491130 [Arabidopsis >gi|25408969|pir||E84899 hypothetical protein At2g46170
  misc_feature (2)..(236): Homolog of NCBI NO: 15236556 NR Description: putative protein; protein id: At4g23630.1, by cDNA: 39185., supported by cDNA: gi_15215585 [Arabidopsis
  misc_feature (1)..(228): Homolog of NCBI NO: 15222616 NR Description: hypothetical protein; protein id: At1g64090.1, by cDNA: gi_17381217 [Arabidopsis thaliana] F22C12.15 [Arabidopsis thaliana] >gi|17381218|gb|AAL36421.1|
  misc_feature (1)..(236): Homolog of NCBI NO: 15237093 NR Description: putative protein; protein id: At4g11220.1, by cDNA: 23536., supported by cDNA: gi_14334419, supported by gi_15081760, supported by cDNA: gi_16209686 [Arabidopsis
MSSIMDTIADNLPKQKSGKFDPGSVSDKVKNKLFGRQKTLHGVLGGGKPADVLLWRNKKISSSVLALATAIWVFFEWLDYHLLTIVSFALVLGMVVQFVWSNFSNMLSSGSRSQVPRVELPDELFVNIAVAIGAQINKFLCFLQDVSCERNLKHFVVAIAGLWAAAVIGSWCNFLTVIYVGFVCVHTLPVLYEKYEDQVDDFLYSLLGLLRDQYQKLDQGVLSKIPKGNMKAKKNE

SEQ ID NO: 11215 - protein, 232 aa, Zea mays subsp. mays
  peptide (1)..(232): Ceres Seq. ID no. 12355622
  misc_feature (1)..(232): Homolog of NCBI NO: 34897094 NR Description: unknown protein [Oryza sativa (japonica
  misc_feature (1)..(232): Homolog of NCBI NO: 34899590 NR Description: hypothetical protein~similar to Oryza sativa
  misc_feature (1)..(232): Homolog of NCBI NO: 30681227 NR Description: expressed protein [Arabidopsis thaliana]
  misc_feature (1)..(232): Homolog of NCBI NO: 18398810 NR Description: expressed protein; protein id: At3g10260.1, by cDNA: 15153., supported by cDNA: gi_20259182 [Arabidopsis >gi|6056199|gb|AAF02816.1|AC009400_12 unknown protein
  misc_feature (1)..(231): Homolog of NCBI NO: 34909318 NR Description: OSJNBb0021A09.5 [Oryza sativa (japonica
  misc_feature (28)..(231): Homolog of NCBI NO: 34904202 NR Description: P0492F05.25 [Oryza sativa (japonica
  misc_feature (1)..(229): Homolog of NCBI NO: 18406991 NR Description: expressed protein; protein id: At2g46170.1, by cDNA: gi_15450758, supported by cDNA: gi_18491130 [Arabidopsis >gi|25408969|pir||E84899 hypothetical protein At2g46170
  misc_feature (1)..(232): Homolog of NCBI NO: 15236556 NR Description: putative protein; protein id: At4g23630.1, by cDNA: 39185., supported by cDNA: gi_15215585 [Arabidopsis
  misc_feature (1)..(224): Homolog of NCBI NO: 15222616 NR Description: hypothetical protein; protein id: At1g64090.1, by cDNA: gi_17381217 [Arabidopsis thaliana] F22C12.15 [Arabidopsis thaliana] >gi|17381218|gb|AAL36421.1|
  misc_feature (1)..(232): Homolog of NCBI NO: 15237093 NR Description: putative protein; protein id: At4g11220.1, by cDNA: 23536., supported by cDNA: gi_14334419, supported by gi_15081760, supported by cDNA: gi_16209686 [Arabidopsis
MDTIADNLPKQKSGKFDPGSVSDKVKNKLFGRQKTLHGVLGGGKPADVLLWRNKKISSSVLALATAIWVFFEWLDYHLLTIVSFALVLGMVVQFVWSNFSNMLSSGSRSQVPRVELPDELFVNIAVAIGAQINKFLCFLQDVSCERNLKHFVVAIAGLWAAAVIGSWCNFLTVIYVGFVCVHTLPVLYEKYEDQVDDFLYSLLGLLRDQYQKLDQGVLSKIPKGNMKAKKNE

SEQ ID NO: 11216 - DNA, 1412 bp, Zea mays subsp. mays
  misc_feature (1)..(1412): Ceres Seq. ID no. 12413439
  misc_feature: MA Experiment ID: 108527 Result: Up-regulated in Transcription
  misc_feature: MA Experiment 108527 PARAMETER Experiment Name: Zm_5mM_NO_P Parameter: Age (day) Value: 8
  misc_feature: MA Experiment 108527 PARAMETER Experiment Name: Zm_5mM_NO_P Parameter: Organism Value: Zea mays
  misc_feature: MA Experiment 108527 PARAMETER Experiment Name: Zm_5mM_NO_P Parameter: Plant Line Value: 35A19
  misc_feature: MA Experiment 108527 PARAMETER Experiment Name: Zm_5mM_NO_P Parameter: Timepoint (hr) Value: 6
  misc_feature: MA Experiment 108527 PARAMETER Experiment Name: Zm_5mM_NO_P Parameter: Tissue Value: Aerial
  misc_feature: MA Experiment 108527 PARAMETER Experiment Name: Zm_5mM_NO_P Parameter: Treatment Value: 5mM NO vs. No Treatment
  misc_feature: MA Experiment ID: 108544 Result: Down-regulated in Transcription
  misc_feature: MA Experiment ID: 20000626 Result: Up-regulated in Transcription
  misc_feature: MA Experiment 20000626 PARAMETER Experiment Name: Zm_Herbicide-Treatments_P Parameter: Timepoint (hr) Value: 12
  misc_feature: MA Experiment 20000626 PARAMETER Experiment Name: Zm_Herbicide-Treatments_P Parameter: Tissue Value: Aerial
  misc_feature: MA Experiment 20000626 PARAMETER Experiment Name: Zm_Herbicide-Treatments_P Parameter: Treatment Value: Roundup vs. No Treatment
tctcttttccgcccatggtggccgcgccaccaccgccgccgcagtttgccaagcacttcgctgctgggccgcccccgccgccccaagctggtgctgggcgccgcacgccgaccccgccctcgtctggatccggcgggaacgggtgcgaagaaaataaaaccatttgggtcggtgacctccagtactggatggatgaaaactacctacataactgcttcgggcccagcggcgaggtggttacaataaaagttatccgcaataggcaaacaggacagtcagaggggtatggatttgttgagttcttttctcatgcatcaggcagagaaagctcttcagaattttactggtcatgtgatgccaaacactgaccggccatttaaattgaactgggcatcgtatagcatgggtgaaaagcgatctgaagtggcttctgatcactcgatatttgttggcgatctagctgctgatgtcactgatgaaatgctgctggagcttttctccagcaagtaccgctcggtgaaaggagctaaagttattattgatgcaaacacaggccgttccaggggctatggatttgtcaggtttggagacgacaacgacaaatctcatgccatgtctgaaatgaatggtgtatattgctctacgaggccaattcgtataggacctgcgactcccagaagatcttcaggtgattctggctcctcgactcctggtcattcagatggtgattcttctaacagaacggtatatgttggtgggcttgaccccaatgtcagtgaagatgaactgagaaaagcctttgccaaatatgatcttgcctctgtgaaaattcctctaggaaagcaatgtggctttgttcaatttgttagcagaactgatgctgaagaagcactacaaggattaaatggatcactcattggaaagcaggcagttcgcctttcatgggtccgcagcccatcgcataagcagtctaggggtgactccgtcaacaggaggaacaacatgtactatggcacaccattctacggcggatatggctatgcctccccggtgccacacccaaacatgtacgctgcagcgtatggcacgtacccgctatatggcaaccagcagctagtgagctagagagctcccctccgacgtgtcccctctgacgggaaacaaaggttttggtccggtgagcatagtagcgtcaggtgagaaggtgcctttataaggctgtcctaagaagtgggcgagatatgttgttgcatcgttatcgttatggtgcctgtaactgttgtgtgtgccgtgtgcgtccggaagaattggatggaatggaactcgtggcttgttgtagtacatcagagagtcatgttattctttcaagaaattttgacttggtaataaattaaactattgtttgtgcgtcc

SEQ ID NO: 11217 - protein, 279 aa, Zea mays subsp. mays
  peptide (1)..(279): Ceres Seq. ID no. 12413440
  misc_feature (53)..(125): Pfam Name: RNA recognition motif. (a.k.a. RRM, RBD, or RNP domain) Pfam Description: RNA recognition motif. (a.k.a. RRM, RBD, or RNP
  misc_feature (7)..(272): Homolog of NCBI NO: 15594035 NR Description: nucleic acid binding protein [Nicotiana tabacum]
  misc_feature (1)..(276): Homolog of NCBI NO: 15221071 NR Description: RNA binding protein 45 (RBP45), putative; protein At1g11650.1, supported by cDNA: 30022., supported by cDNA: [Arabidopsis thaliana] >gi|25402676|pir||H86249 hypothetical
  misc_feature (1)..(276): Homolog of NCBI NO: 21592583 NR Description: putative DNA binding protein [Arabidopsis
  misc_feature (7)..(276): Homolog of NCBI NO: 7485342 NR Description: hypothetical protein F10M23.340 - Arabidopsis >gi|4455223|emb|CAB36546.1| putative DNA binding protein thaliana] >gi|7269553|emb|CAB79555.1| putative DNA binding
  misc_feature (7)..(276): Homolog of NCBI NO: 18416906 NR Description: RNA binding protein 45 (RBP45), putative; protein At4g27000.1, supported by cDNA: gi_13878152, supported by cDNA: supported by cDNA: gi_17104568, supported by cDNA: gi_20259887
  misc_feature (7)..(273): Homolog of NCBI NO: 30524689 NR Description: salt tolerance protein 6 [Beta vulgaris]
  misc_feature (1)..(151): Homolog of NCBI NO: 9663769 NR Description: RNA Binding Protein 47 [Nicotiana plumbaginifolia]
  misc_feature (137)..(279): Homolog of NCBI NO: 9663769 NR Description: RNA Binding Protein 47 [Nicotiana plumbaginifolia]
  misc_feature (1)..(279): Homolog of NCBI NO: 15220241 NR Description: RNA binding protein 47 (RBP47), putative; protein At1g47500.1 [Arabidopsis thaliana] >gi|25386564|pir||C96515
  misc_feature (1)..(151): Homolog of NCBI NO: 7489196 NR Description: RNA binding protein homolog - common tobacco >gi|2708532|gb|AAB92518.1| putative RNA binding protein
MDLLSSFLMHQAEKALQNFTGHVMPNTDRPFKLNWASYSMGEKRSEVASDHSIFVGDLAADVTDEMLLELFSSKYRSVKGAKVIIDANTGRSRGYGFVRFGDDNDKSHAMSEMNGVYCSTRPIRIGPATPRRSSGDSGSSTPGHSDGDSSNRTVYVGGLDPNVSEDELRKAFAKYDLASVKIPLGKQCGFVQFVSRTDAEEALQGLNGSLIGKQAVRLSWVRSPSHKQSRGDSVNRRNNMYYGTPFYGGYGYASPVPHPNMYAAAYGTYPLYGNQQLVS

SEQ ID NO: 11218 - protein, 271 aa, Zea mays subsp. mays
  peptide (1)..(271): Ceres Seq. ID no. 12413441
  misc_feature (45)..(117): Pfam Name: RNA recognition motif. (a.k.a. RRM, RBD, or RNP domain) Pfam Description: RNA recognition motif. (a.k.a. RRM, RBD, or RNP
  misc_feature (1)..(264): Homolog of NCBI NO: 15594035 NR Description: nucleic acid binding protein [Nicotiana tabacum]
  misc_feature (1)..(268): Homolog of NCBI NO: 15221071 NR Description: RNA binding protein 45 (RBP45), putative; protein At1g11650.1, supported by cDNA: 30022., supported by cDNA: [Arabidopsis thaliana] >gi|25402676|pir||H86249 hypothetical
  misc_feature (1)..(268): Homolog of NCBI NO: 21592583 NR Description: putative DNA binding protein [Arabidopsis
  misc_feature (1)..(268): Homolog of NCBI NO: 7485342 NR Description: hypothetical protein F10M23.340 - Arabidopsis >gi|4455223|emb|CAB36546.1| putative DNA binding protein thaliana] >gi|7269553|emb|CAB79555.1| putative DNA binding
  misc_feature (1)..(268): Homolog of NCBI NO: 18416906 NR Description: RNA binding protein 45 (RBP45), putative; protein At4g27000.1, supported by cDNA: gi_13878152, supported by cDNA: supported by cDNA: gi_17104568, supported by cDNA: gi_20259887
  misc_feature (1)..(265): Homolog of NCBI NO: 30524689 NR Description: salt tolerance protein 6 [Beta vulgaris]
  misc_feature (1)..(143): Homolog of NCBI NO: 9663769 NR Description: RNA Binding Protein 47 [Nicotiana plumbaginifolia]
  misc_feature (129)..(271): Homolog of NCBI NO: 9663769 NR Description: RNA Binding Protein 47 [Nicotiana plumbaginifolia]
  misc_feature (1)..(271): Homolog of NCBI NO: 15220241 NR Description: RNA binding protein 47 (RBP47), putative; protein At1g47500.1 [Arabidopsis thaliana] >gi|25386564|pir||C96515
  misc_feature (1)..(143): Homolog of NCBI NO: 7489196 NR Description: RNA binding protein homolog - common tobacco >gi|2708532|gb|AAB92518.1| putative RNA binding protein
MHQAEKALQNFTGHVMPNTDRPFKLNWASYSMGEKRSEVASDHSIFVGDLAADVTDEMLLELFSSKYRSVKGAKVIIDANTGRSRGYGFVRFGDDNDKSHAMSEMNGVYCSTRPIRIGPATPRRSSGDSGSSTPGHSDGDSSNRTVYVGGLDPNVSEDELRKAFAKYDLASVKIPLGKQCGFVQFVSRTDAEEALQGLNGSLIGKQAVRLSWVRSPSHKQSRGDSVNRRNNMYYGTPFYGGYGYASPVPHPNMYAAAYGTYPLYGNQQLVS

SEQ ID NO: 11219 - protein, 256 aa, Zea mays subsp. mays
  peptide (1)..(256): Ceres Seq. ID no. 12413442
  misc_feature (30)..(102): Pfam Name: RNA recognition motif. (a.k.a. RRM, RBD, or RNP domain) Pfam Description: RNA recognition motif. (a.k.a. RRM, RBD, or RNP
  misc_feature (1)..(128): Homolog of NCBI NO: 9663769 NR Description: RNA Binding Protein 47 [Nicotiana plumbaginifolia]
  misc_feature (114)..(256): Homolog of NCBI NO: 9663769 NR Description: RNA Binding Protein 47 [Nicotiana plumbaginifolia]
  misc_feature (1)..(249): Homolog of NCBI NO: 15594035 NR Description: nucleic acid binding protein [Nicotiana tabacum]
  misc_feature (1)..(253): Homolog of NCBI NO: 21592583 NR Description: putative DNA binding protein [Arabidopsis
  misc_feature (1)..(253): Homolog of NCBI NO: 18416906 NR Description: RNA binding protein 45 (RBP45), putative; protein At4g27000.1, supported by cDNA: gi_13878152, supported by cDNA: supported by cDNA: gi_17104568, supported by cDNA: gi_20259887
  misc_feature (1)..(250): Homolog of NCBI NO: 30524689 NR Description: salt tolerance protein 6 [Beta vulgaris]
  misc_feature (1)..(253): Homolog of NCBI NO: 7485342 NR Description: hypothetical protein F10M23.340 - Arabidopsis >gi|4455223|emb|CAB36546.1| putative DNA binding protein thaliana] >gi|7269553|emb|CAB79555.1| putative DNA binding
  misc_feature (1)..(253): Homolog of NCBI NO: 15221071 NR Description: RNA binding protein 45 (RBP45), putative; protein At1g11650.1, supported by cDNA: 30022., supported by cDNA: [Arabidopsis thaliana] >gi|25402676|pir||H86249 hypothetical
  misc_feature (1)..(256): Homolog of NCBI NO: 15220241 NR Description: RNA binding protein 47 (RBP47), putative; protein At1g47500.1 [Arabidopsis thaliana] >gi|25386564|pir||C96515
  misc_feature (1)..(128): Homolog of NCBI NO: 7489196 NR Description: RNA binding protein homolog - common tobacco >gi|2708532|gb|AAB92518.1| putative RNA binding protein
MPNTDRPFKLNWASYSMGEKRSEVASDHSIFVGDLAADVTDEMLLELFSSKYRSVKGAKVIIDANTGRSRGYGFVRFGDDNDKSHAMSEMNGVYCSTRPIRIGPATPRRSSGDSGSSTPGHSDGDSSNRTVYVGGLDPNVSEDELRKAFAKYDLASVKIPLGKQCGFVQFVSRTDAEEALQGLNGSLIGKQAVRLSWVRSPSHKQSRGDSVNRRNNMYYGTPFYGGYGYASPVPHPNMYAAAYGTYPLYGNQQLVS

SEQ ID NO: 11220 - DNA, 1554 bp, Zea mays subsp. mays
  misc_feature (1)..(1554): Ceres Seq. ID no. 12411930
  misc_feature: MA Experiment ID: 108515 Result: Up-regulated in Transcription
  misc_feature: MA Experiment 108515 PARAMETER Experiment Name: Zm_2mM_SA_P Parameter: Age (day) Value: 8
  misc_feature: MA Experiment 108515 PARAMETER Experiment Name: Zm_2mM_SA_P Parameter: Organism Value: Zea mays
  misc_feature: MA Experiment 108515 PARAMETER Experiment Name: Zm_2mM_SA_P Parameter: Plant Line Value: 35A19
  misc_feature: MA Experiment 108515 PARAMETER Experiment Name: Zm_2mM_SA_P Parameter: Timepoint (hr) Value: 12
  misc_feature: MA Experiment 108515 PARAMETER Experiment Name: Zm_2mM_SA_P Parameter: Tissue Value: Aerial
  misc_feature: MA Experiment 108515 PARAMETER Experiment Name: Zm_2mM_SA_P Parameter: Treatment Value: 2mM SA vs. No Treatment
  misc_feature: MA Experiment ID: 108523 Result: Up-regulated in Transcription
  misc_feature: MA Experiment 108523 PARAMETER Experiment Name: Zm_42deg_Heat_P Parameter: Age (day) Value: 8
  misc_feature: MA Experiment 108523 PARAMETER Experiment Name: Zm_42deg_Heat_P Parameter: Organism Value: Zea mays
  misc_feature: MA Experiment 108523 PARAMETER Experiment Name: Zm_42deg_Heat_P Parameter: Plant Line Value: 35A19
  misc_feature: MA Experiment 108523 PARAMETER Experiment Name: Zm_42deg_Heat_P Parameter: Temperature (deg C) Value: 42 vs. 22
  misc_feature: MA Experiment 108523 PARAMETER Experiment Name: Zm_42deg_Heat_P Parameter: Timepoint (hr) Value: 6
  misc_feature: MA Experiment 108523 PARAMETER Experiment Name: Zm_42deg_Heat_P Parameter: Tissue Value: Aerial
  misc_feature: MA Experiment ID: 108527 Result: Up-regulated in Transcription
  misc_feature: MA Experiment 108527 PARAMETER Experiment Name: Zm_5mM_NO_P Parameter: Age (day) Value: 8
  misc_feature: MA Experiment 108527 PARAMETER Experiment Name: Zm_5mM_NO_P Parameter: Organism Value: Zea mays
  misc_feature: MA Experiment 108527 PARAMETER Experiment Name: Zm_5mM_NO_P Parameter: Plant Line Value: 35A19
  misc_feature: MA Experiment 108527 PARAMETER Experiment Name: Zm_5mM_NO_P Parameter: Timepoint (hr) Value: 6
  misc_feature: MA Experiment 108527 PARAMETER Experiment Name: Zm_5mM_NO_P Parameter: Tissue Value: Aerial
  misc_feature: MA Experiment 108527 PARAMETER Experiment Name: Zm_5mM_NO_P Parameter: Treatment Value: 5mM NO vs. No Treatment
  misc_feature: MA Experiment ID: 108528 Result: Down-regulated in Transcription
  misc_feature: MA Experiment 108528 PARAMETER Experiment Name: Zm_Imbibed_Seeds_P Parameter: Age (day) Value: 5 vs. 2
  misc_feature: MA Experiment 108528 PARAMETER Experiment Name: Zm_Imbibed_Seeds_P Parameter: Organism Value: Zea mays
  misc_feature: MA Experiment 108528 PARAMETER Experiment Name: Zm_Imbibed_Seeds_P Parameter: Plant Line Value: 35A19
  misc_feature: MA Experiment 108528 PARAMETER Experiment Name: Zm_Imbibed_Seeds_P Parameter: Tissue Value: Aerial vs. Embryo
  misc_feature: MA Experiment ID: 108530 Result: Down-regulated in Transcription
  misc_feature: MA Experiment 108530 PARAMETER Experiment Name: Zm_Imbibed_Seeds_P Parameter: Age (day) Value: 6 vs. 2
  misc_feature: MA Experiment 108530 PARAMETER Experiment Name: Zm_Imbibed_Seeds_P Parameter: Organism Value: Zea mays
  misc_feature: MA Experiment 108530 PARAMETER Experiment Name: Zm_Imbibed_Seeds_P Parameter: Plant Line Value: 35A19
  misc_feature: MA Experiment 108530 PARAMETER Experiment Name: Zm_Imbibed_Seeds_P Parameter: Tissue Value: Aerial vs. Embryo
  misc_feature: MA Experiment ID: 108534 Result: Down-regulated in Transcription
  misc_feature: MA Experiment 108534 PARAMETER Experiment Name: Zm_4deg_Cold_P Parameter: Age (hr) Value: 8
  misc_feature: MA Experiment 108534 PARAMETER Experiment Name: Zm_4deg_Cold_P Parameter: Organism Value: Zea mays
  misc_feature: MA Experiment 108534 PARAMETER Experiment Name: Zm_4deg_Cold_P Parameter: Plant Line Value: 35A19
  misc_feature: MA Experiment 108534 PARAMETER Experiment Name: Zm_4deg_Cold_P Parameter: Temperature (deg C) Value: 4 vs. 22
  misc_feature: MA Experiment 108534 PARAMETER Experiment Name: Zm_4deg_Cold_P Parameter: Timepoint (hr) Value: 6
  misc_feature: MA Experiment 108534 PARAMETER Experiment Name: Zm_4deg_Cold_P Parameter: Tissue Value: Aerial
  misc_feature: MA Experiment ID: 108535 Result: Down-regulated in Transcription
  misc_feature: MA Experiment 108535 PARAMETER Experiment Name: Zm_Meristem_P Parameter: Age (day) Value: 8
  misc_feature: MA Experiment 108535 PARAMETER Experiment Name: Zm_Meristem_P Parameter: Organism Value: Zea mays
  misc_feature: MA Experiment 108535 PARAMETER Experiment Name: Zm_Meristem_P Parameter: Plant Line Value: 35A19
  misc_feature: MA Experiment 108535 PARAMETER Experiment Name: Zm_Meristem_P Parameter: Tissue Value: Root Meristem vs. Above Root Meristem
  misc_feature: MA Experiment ID: 108543 Result: Down-regulated in Transcription
  misc_feature: MA Experiment ID: 108689 Result: Down-regulated in Transcription
  misc_feature: MA Experiment 108689 PARAMETER Experiment Name: Zm_Drought_Roots_P Parameter: Age (day) Value: 9
  misc_feature: MA Experiment 108689 PARAMETER Experiment Name: Zm_Drought_Roots_P Parameter: Organism Value: Zea mays
  misc_feature: MA Experiment 108689 PARAMETER Experiment Name: Zm_Drought_Roots_P Parameter: Plant Line Value: 35A19
  misc_feature: MA Experiment 108689 PARAMETER Experiment Name: Zm_Drought_Roots_P Parameter: Timepoint (hr) Value: 24
  misc_feature: MA Experiment 108689 PARAMETER Experiment Name: Zm_Drought_Roots_P Parameter: Tissue Value: Roots
  misc_feature: MA Experiment 108689 PARAMETER Experiment Name: Zm_Drought_Roots_P Parameter: Treatment Value: Drought vs. No Drought
  misc_feature: MA Experiment ID: 20000477 Result: Up-regulated in Transcription
  misc_feature: MA Experiment 20000477 PARAMETER Experiment Name: Zm_5mM_SA_P Parameter: Age (day) Value: 10
  misc_feature: MA Experiment 20000477 PARAMETER Experiment Name: Zm_5mM_SA_P Parameter: Organism Value: Zea mays
  misc_feature: MA Experiment 20000477 PARAMETER Experiment Name: Zm_5mM_SA_P Parameter: Plant Line Value: 35A19
  misc_feature: MA Experiment 20000477 PARAMETER Experiment Name: Zm_5mM_SA_P Parameter: Timepoint (hr) Value: 48
  misc_feature: MA Experiment 20000477 PARAMETER Experiment Name: Zm_5mM_SA_P Parameter: Tissue Value: Aerial
  misc_feature: MA Experiment 20000477 PARAMETER Experiment Name: Zm_5mM_SA_P Parameter: Treatment Value: 5mM SA vs. No Treatment
  misc_feature: MA Experiment ID: 20000479 Result: Up-regulated in Transcription
  misc_feature: MA Experiment 20000479 PARAMETER Experiment Name: Zm_Drought_P Parameter: Age (day) Value: 10
  misc_feature: MA Experiment 20000479 PARAMETER Experiment Name: Zm_Drought_P Parameter: Organism Value: Zea mays
  misc_feature: MA Experiment 20000479 PARAMETER Experiment Name: Zm_Drought_P Parameter: Plant Line Value: 35A19
  misc_feature: MA Experiment 20000479 PARAMETER Experiment Name: Zm_Drought_P Parameter: Timepoint (hr) Value: 48
  misc_feature: MA Experiment 20000479 PARAMETER Experiment Name: Zm_Drought_P Parameter: Tissue Value: Aerial
  misc_feature: MA Experiment 20000479 PARAMETER Experiment Name: Zm_Drought_P Parameter: Treatment Value: Drought vs. No Drought
  misc_feature: MA Experiment ID: 20000626 Result: Up-regulated in Transcription
  misc_feature: MA Experiment 20000626 PARAMETER Experiment Name: Zm_Herbicide-Treatments_P Parameter: Timepoint (hr) Value: 12
  misc_feature: MA Experiment 20000626 PARAMETER Experiment Name: Zm_Herbicide-Treatments_P Parameter: Tissue Value: Aerial
  misc_feature: MA Experiment 20000626 PARAMETER Experiment Name: Zm_Herbicide-Treatments_P Parameter: Treatment Value: Roundup vs. No Treatment
  misc_feature: MA Experiment ID: 20000630 Result: Up-regulated in Transcription
  misc_feature: MA Experiment 20000630 PARAMETER Experiment Name: Zm_Herbicide-Treatments_P Parameter: Timepoint (hr) Value: 4
  misc_feature: MA Experiment 20000630 PARAMETER Experiment Name: Zm_Herbicide-Treatments_P Parameter: Tissue Value: Aerial
  misc_feature: MA Experiment 20000630 PARAMETER Experiment Name: Zm_Herbicide-Treatments_P Parameter: Treatment Value: Roundup vs. No Treatment
atttcgactcgtgtgttcgtgagctctgtgagaaacaaagaccatgacgcaggagaagacggtggtgctgtacccctccctgggcgttggccatctgaaccccatggcgcagctggccaaggccatcctccgccacggcagcgtcgccgtcaccatcgccgtcgtcgacccgcccgagaagcacgccgtgctagctgctgcgctggcccgcctggcagcggtcagtccctccatcacggtccacctcctccccatcccgccctgcgccaccagcaagcagcattcccaccccatcatgcccatcctggatgcgctccgcgccgcgaaccccgcgctccgggcgttccttgccgcgcgagtccctgccgtcgccgccctcgtggtcgacatgttctgcaccgacgcgctcgacgtcgccgcggagctcgcgatccccgcgcacttcttctacccgtccgcggcccggcgacctcgcggtctacctccaggttccagatctctgccgcgccgcgccgtccccgctaagggacatgggcaaggcggcgctgaacttcgccggcgtgccggcggtccgcgctctcgacatgcccgacaccatgcacgactgggagagcgacgtgggcagcgtacggctgcggcagctcgcccggatgccggaggccgcgggcattctggtgaacagcttcgagtggctggagtcgagggcgctggaagcgctacgtggcggccactgcctgcccggccgctcgacgccgaaaatctactgcgtcgggccgctggtcgacggtggcggcagtggcaccgaggggaacggcgagaggcacgcgtgcctcgcgtggatggacgggcagcccaggcagagcgtggtgttcctctgcttcggaagcctgggcgccttctcggcggcgcagctgaaggagacggcgcgcgggctagagcgttcaggacacaggttcttgtgggccgtgcgaagcccaagcgaggatcaggactctggcgagcctgatctggaggcgttgcttccggatgggttcttggagagaaccagaggcagaggactggttctgaagaactgggcgccccagacacaggtgctgcggcacgaggccgtgggtgcctttgtaactcactgcggctggaactcggtgctggaggcggccatgtccggcgtgccgatgatctgctggccgctgtacgcggagcagaggctgaataaggtgcacgtggtggaggagatgaaggttggggtggtgatggaaggctacgacgaggagttggtgacggctgacgaggtggaggccaaggtacgactagtgatggagtcggaggaagggaagaagctcagggagaggacagcgacggcgaaggaaatggctgctgatgccatcaaacaaggcgggtcgtcttacgtcgaacttggtgagtttttgaagggtttaggacgcaagtgatggatagctatgcgtatgaatgataataatctgtctgtatatcagtataagatgaatgcttaacgcagtctggaagataagtattatatggctacttatcatt

SEQ ID NO: 11221 - protein, 380 aa, Zea mays subsp. mays
  peptide (1)..(380): Ceres Seq. ID no. 12411931
  misc_feature (54)..(378): Pfam Name: UDP-glucoronosyl and UDP-glucosyl transferase Pfam Description: UDP-glucoronosyl and UDP-glucosyl transferase
  misc_feature (54)..(378): Homolog of NCBI NO: 34910222 NR Description: putative flavonol glucosyltransferase [Oryza
  misc_feature (72)..(377): Homolog of NCBI NO: 34910228 NR Description: putative flavonol glucosyltransferase [Oryza
  misc_feature (54)..(377): Homolog of NCBI NO: 34910204 NR Description: putative flavonol glucosyltransferase [Oryza
  misc_feature (55)..(377): Homolog of NCBI NO: 34910218 NR Description: putative flavonol glucosyltransferase [Oryza
  misc_feature (55)..(374): Homolog of NCBI NO: 34910206 NR Description: putative flavonol glucosyltransferase [Oryza
  misc_feature (55)..(375): Homolog of NCBI NO: 22535568 NR Description: putative glucosyltransferase [Oryza sativa
  misc_feature (73)..(370): Homolog of NCBI NO: 34910208 NR Description: putative flavonol glucosyltransferase [Oryza
  misc_feature (55)..(380): Homolog of NCBI NO: 21593785 NR Description: putative glucosyltransferase [Arabidopsis
  misc_feature (55)..(380): Homolog of NCBI NO: 18401158 NR Description: putative glucosyltransferase; supported by cDNA: Alternative splicing isoform [Arabidopsis thaliana] putative glucosyltransferase; protein id: At3g16520.2, supported
  misc_feature (55)..(362): Homolog of NCBI NO: 30684106 NR Description: glycosyltransferase family [Arabidopsis thaliana]
MRSAPRTPRSGRSLPRESLPSPPSWSTCSAPTRSTSPRSSRSPRTSSTRPRPGDLAVYLQVPDLCRAAPSPLRDMGKAALNFAGVPAVRALDMPDTMHDWESDVGSVRLRQLARMPEAAGILVNSFEWLESRALEALRGGHCLPGRSTPKIYCVGPLVDGGGSGTEGNGERHACLAWMDGQPRQSVVFLCFGSLGAFSAAQLKETARGLERSGHRFLWAVRSPSEDQDSGEPDLEALLPDGFLERTRGRGLVLKNWAPQTQVLRHEAVGAFVTHCGWNSVLEAAMSGVPMICWPLYAEQRLNKVHVVEEMKVGVVMEGYDEELVTADEVEAKVRLVMESEEGKKLRERTATAKEMAADAIKQGGSSYVELGEFLKGLGRK

SEQ ID NO: 11222 - protein, 320 aa, Zea mays subsp. mays
  peptide (1)..(320): Ceres Seq. ID no. 12411932
  misc_feature (5)..(140): Pfam Name: UDP-glucoronosyl and UDP-glucosyl transferase Pfam Description: UDP-glucoronosyl and UDP-glucosyl transferase
  misc_feature (4)..(140): Homolog of NCBI NO: 34910222 NR Description: putative flavonol glucosyltransferase [Oryza
  misc_feature (5)..(140): Homolog of NCBI NO: 34910228 NR Description: putative flavonol glucosyltransferase [Oryza
  misc_feature (4)..(140): Homolog of NCBI NO: 34910204 NR Description: putative flavonol glucosyltransferase [Oryza
  misc_feature (7)..(140): Homolog of NCBI NO: 34910218 NR Description: putative flavonol glucosyltransferase [Oryza
  misc_feature (4)..(138): Homolog of NCBI NO: 34910206 NR Description: putative flavonol glucosyltransferase [Oryza
  misc_feature (1)..(140): Homolog of NCBI NO: 22535568 NR Description: putative glucosyltransferase [Oryza sativa
  misc_feature (1)..(135): Homolog of NCBI NO: 34910208 NR Description: putative flavonol glucosyltransferase [Oryza
  misc_feature (4)..(140): Homolog of NCBI NO: 21593785 NR Description: putative glucosyltransferase [Arabidopsis
  misc_feature (4)..(140): Homolog of NCBI NO: 18401158 NR Description: putative glucosyltransferase; supported by cDNA: Alternative splicing isoform [Arabidopsis thaliana] putative glucosyltransferase; protein id: At3g16520.2, supported
  misc_feature (4)..(140): Homolog of NCBI NO: 30684106 NR Description: glycosyltransferase family [Arabidopsis thaliana]
MTQEKTVVLYPSLGVGHLNPMAQLAKAILRHGSVAVTIAVVDPPEKHAVLAAALARLAAVSPSITVHLLPIPPCATSKQHSHPIMPILDALRAANPALRAFLAARVPAVAALVVDMFCTDALDVAAELAIPAHFFYPSAARRPRGLPPGSRSLPRRAVPAKGHGQGGAELRRRAGGPRSRHARHHARLGERRGQRTAAAARPDAGGRGHSGEQLRVAGVEGAGSATWRPLPARPLDAENLLRRAAGRRWRQWHRGERREARVPRVDGRAAQAERGVPLLRKPGRLLGGAAEGDGARARAFRTQVLVGRAKPKRGSGLWRA

SEQ ID NO: 11223 - protein, 306 aa, Zea mays subsp. mays
  peptide (1)..(306): Ceres Seq. ID no. 12411933
  misc_feature (1)..(304): Pfam Name: UDP-glucoronosyl and UDP-glucosyl transferase Pfam Description: UDP-glucoronosyl and UDP-glucosyl transferase
  misc_feature (1)..(304): Homolog of NCBI NO: 34910222 NR Description: putative flavonol glucosyltransferase [Oryza
  misc_feature (1)..(303): Homolog of NCBI NO: 34910228 NR Description: putative flavonol glucosyltransferase [Oryza
  misc_feature (1)..(303): Homolog of NCBI NO: 34910204 NR Description: putative flavonol glucosyltransferase [Oryza
  misc_feature (1)..(303): Homolog of NCBI NO: 34910218 NR Description: putative flavonol glucosyltransferase [Oryza
  misc_feature (1)..(300): Homolog of NCBI NO: 34910206 NR Description: putative flavonol glucosyltransferase [Oryza
  misc_feature (1)..(301): Homolog of NCBI NO: 22535568 NR Description: putative glucosyltransferase [Oryza sativa
  misc_feature (1)..(296): Homolog of NCBI NO: 34910208 NR Description: putative flavonol glucosyltransferase [Oryza
  misc_feature (1)..(306): Homolog of NCBI NO: 21593785 NR Description: putative glucosyltransferase [Arabidopsis
  misc_feature (1)..(306): Homolog of NCBI NO: 18401158 NR Description: putative glucosyltransferase; supported by cDNA: Alternative splicing isoform [Arabidopsis thaliana] putative glucosyltransferase; protein id: At3g16520.2, supported
  misc_feature (1)..(288): Homolog of NCBI NO: 30684106 NR Description: glycosyltransferase family [Arabidopsis thaliana]
MGKAALNFAGVPAVRALDMPDTMHDWESDVGSVRLRQLARMPEAAGILVNSFEWLESRALEALRGGHCLPGRSTPKIYCVGPLVDGGGSGTEGNGERHACLAWMDGQPRQSVVFLCFGSLGAFSAAQLKETARGLERSGHRFLWAVRSPSEDQDSGEPDLEALLPDGFLERTRGRGLVLKNWAPQTQVLRHEAVGAFVTHCGWNSVLEAAMSGVPMICWPLYAEQRLNKVHVVEEMKVGVVMEGYDEELVTADEVEAKVRLVMESEEGKKLRERTATAKEMAADAIKQGGSSYVELGEFLKGLGRK

SEQ ID NO: 11224 - DNA, 1514 bp, Zea mays subsp. mays
  misc_feature (1)..(1514): Ceres Seq. ID no. 12374131
  misc_feature: MA Experiment ID: 108504 Result: Up-regulated in Transcription
  misc_feature: MA Experiment 108504 PARAMETER Experiment Name: Zm_Drought_P Parameter: Age (day) Value: 8
  misc_feature: MA Experiment 108504 PARAMETER Experiment Name: Zm_Drought_P Parameter: Organism Value: Zea mays
  misc_feature: MA Experiment 108504 PARAMETER Experiment Name: Zm_Drought_P Parameter: Plant Line Value: 35A19
  misc_feature: MA Experiment 108504 PARAMETER Experiment Name: Zm_Drought_P Parameter: Timepoint (hr) Value: 12
  misc_feature: MA Experiment 108504 PARAMETER Experiment Name: Zm_Drought_P Parameter: Tissue Value: Aerial
  misc_feature: MA Experiment 108504 PARAMETER Experiment Name: Zm_Drought_P Parameter: Treatment Value: Drought vs. No Drought
  misc_feature: MA Experiment ID: 108522 Result: Up-regulated in Transcription
  misc_feature: MA Experiment 108522 PARAMETER Experiment Name: Zm_42deg_Heat_P Parameter: Age (day) Value: 8
  misc_feature: MA Experiment 108522 PARAMETER Experiment Name: Zm_42deg_Heat_P Parameter: Organism Value: Zea mays
  misc_feature: MA Experiment 108522 PARAMETER Experiment Name: Zm_42deg_Heat_P Parameter: Plant Line Value: 35A19
  misc_feature: MA Experiment 108522 PARAMETER Experiment Name: Zm_42deg_Heat_P Parameter: Temperature (deg C) Value: 42 vs. 22
  misc_feature: MA Experiment 108522 PARAMETER Experiment Name: Zm_42deg_Heat_P Parameter: Timepoint (hr) Value: 1
  misc_feature: MA Experiment 108522 PARAMETER Experiment Name: Zm_42deg_Heat_P Parameter: Tissue Value: Aerial
  misc_feature: MA Experiment ID: 108523 Result: Up-regulated in Transcription
  misc_feature: MA Experiment 108523 PARAMETER Experiment Name: Zm_42deg_Heat_P Parameter: Age (day) Value: 8
  misc_feature: MA Experiment 108523 PARAMETER Experiment Name: Zm_42deg_Heat_P Parameter: Organism Value: Zea mays
  misc_feature: MA Experiment 108523 PARAMETER Experiment Name: Zm_42deg_Heat_P Parameter: Plant Line Value: 35A19
  misc_feature: MA Experiment 108523 PARAMETER Experiment Name: Zm_42deg_Heat_P Parameter: Temperature (deg C) Value: 42 vs. 22
  misc_feature: MA Experiment 108523 PARAMETER Experiment Name: Zm_42deg_Heat_P Parameter: Timepoint (hr) Value: 6
  misc_feature: MA Experiment 108523 PARAMETER Experiment Name: Zm_42deg_Heat_P Parameter: Tissue Value: Aerial
  misc_feature: MA Experiment ID: 108530 Result: Up-regulated in Transcription
  misc_feature: MA Experiment 108530 PARAMETER Experiment Name: Zm_Imbibed_Seeds_P Parameter: Age (day) Value: 6 vs. 2
  misc_feature: MA Experiment 108530 PARAMETER Experiment Name: Zm_Imbibed_Seeds_P Parameter: Organism Value: Zea mays
  misc_feature: MA Experiment 108530 PARAMETER Experiment Name: Zm_Imbibed_Seeds_P Parameter: Plant Line Value: 35A19
  misc_feature: MA Experiment 108530 PARAMETER Experiment Name: Zm_Imbibed_Seeds_P Parameter: Tissue Value: Aerial vs. Embryo
  misc_feature: MA Experiment ID: 108539 Result: Up-regulated in Transcription
  misc_feature: MA Experiment 108539 PARAMETER Experiment Name: Zm_20percent_PEG_P Parameter: Age (day) Value: 8
  misc_feature: MA Experiment 108539 PARAMETER Experiment Name: Zm_20percent_PEG_P Parameter: Organism Value: Zea mays
  misc_feature: MA Experiment 108539 PARAMETER Experiment Name: Zm_20percent_PEG_P Parameter: Plant Line Value: 35A19
  misc_feature: MA Experiment 108539 PARAMETER Experiment Name: Zm_20percent_PEG_P Parameter: Timepoint (hr) Value: 1
  misc_feature: MA Experiment 108539 PARAMETER Experiment Name: Zm_20percent_PEG_P Parameter: Tissue Value: Aerial
  misc_feature: MA Experiment 108539 PARAMETER Experiment Name: Zm_20percent_PEG_P Parameter: Treatment Value: 20percent PEG vs. No Treatment
  misc_feature: MA Experiment ID: 108540 Result: Up-regulated in Transcription
  misc_feature: MA Experiment 108540 PARAMETER Experiment Name: Zm_20percent_PEG_P Parameter: Age (day) Value: 8
  misc_feature: MA Experiment 108540 PARAMETER Experiment Name: Zm_20percent_PEG_P Parameter: Organism Value: Zea mays
  misc_feature: MA Experiment 108540 PARAMETER Experiment Name: Zm_20percent_PEG_P Parameter: Plant Line Value: 35A19
  misc_feature: MA Experiment 108540 PARAMETER Experiment Name: Zm_20percent_PEG_P Parameter: Timepoint (hr) Value: 6
  misc_feature: MA Experiment 108540 PARAMETER Experiment Name: Zm_20percent_PEG_P Parameter: Tissue Value: Aerial
  misc_feature: MA Experiment 108540 PARAMETER Experiment Name: Zm_20percent_PEG_P Parameter: Treatment Value: 20percent PEG vs. No Treatment
  misc_feature: MA Experiment ID: 108542 Result: Up-regulated in Transcription
  misc_feature: MA Experiment 108542 PARAMETER Experiment Name: Zm_150mM_NaCl_P Parameter: Age (day) Value: 8
  misc_feature: MA Experiment 108542 PARAMETER Experiment Name: Zm_150mM_NaCl_P Parameter: Organism Value: Zea mays
  misc_feature: MA Experiment 108542 PARAMETER Experiment Name: Zm_150mM_NaCl_P Parameter: Plant Line Value: 35A19
  misc_feature: MA Experiment 108542 PARAMETER Experiment Name: Zm_150mM_NaCl_P Parameter: Timepoint (hr) Value: 6
  misc_feature: MA Experiment 108542 PARAMETER Experiment Name: Zm_150mM_NaCl_P Parameter: Tissue Value: Aerial
  misc_feature: MA Experiment 108542 PARAMETER Experiment Name: Zm_150mM_NaCl_P Parameter: Treatment Value: 150mM NaCl vs. No Treatment
  misc_feature: MA Experiment ID: 108556 Result: Up-regulated in Transcription
  misc_feature: MA Experiment 108556 PARAMETER Experiment Name: Zm_Drought_P Parameter: Age (day) Value: 9
  misc_feature: MA Experiment 108556 PARAMETER Experiment Name: Zm_Drought_P Parameter: Organism Value: Zea mays
  misc_feature: MA Experiment 108556 PARAMETER Experiment Name: Zm_Drought_P Parameter: Plant Line Value: 35A19
  misc_feature: MA Experiment 108556 PARAMETER Experiment Name: Zm_Drought_P Parameter: Timepoint (hr) Value: 24
  misc_feature: MA Experiment 108556 PARAMETER Experiment Name: Zm_Drought_P Parameter: Tissue Value: Aerial
  misc_feature: MA Experiment 108556 PARAMETER Experiment Name: Zm_Drought_P Parameter: Treatment Value: Drought vs. No Drought
  misc_feature: MA Experiment ID: 108559 Result: Down-regulated in Transcription
  misc_feature: MA Experiment 108559 PARAMETER Experiment Name: Zm_5mM_NO_P Parameter: Age (day) Value: 8
  misc_feature: MA Experiment 108559 PARAMETER Experiment Name: Zm_5mM_NO_P Parameter: Organism Value: Zea mays
  misc_feature: MA Experiment 108559 PARAMETER Experiment Name: Zm_5mM_NO_P Parameter: Plant Line Value: 35A19
  misc_feature: MA Experiment 108559 PARAMETER Experiment Name: Zm_5mM_NO_P Parameter: Timepoint (hr) Value: 12
  misc_feature: MA Experiment 108559 PARAMETER Experiment Name: Zm_5mM_NO_P Parameter: Tissue Value: Aerial
  misc_feature: MA Experiment 108559 PARAMETER Experiment Name: Zm_5mM_NO_P Parameter: Treatment Value: 5mM NO vs. No Treatment
  misc_feature: MA Experiment ID: 108688 Result: Down-regulated in Transcription
  misc_feature: MA Experiment 108688 PARAMETER Experiment Name: Zm_Embryos-Flowers__P Parameter: Tissue Value: Immature Flowers vs. Aerial+
  misc_feature: MA Experiment ID: 20000477 Result: Down-regulated in Transcription
  misc_feature: MA Experiment 20000477 PARAMETER Experiment Name: Zm_5mM_SA_P Parameter: Age (day) Value: 10
  misc_feature: MA Experiment 20000477 PARAMETER Experiment Name: Zm_5mM_SA_P Parameter: Organism Value: Zea mays
  misc_feature: MA Experiment 20000477 PARAMETER Experiment Name: Zm_5mM_SA_P Parameter: Plant Line Value: 35A19
  misc_feature: MA Experiment 20000477 PARAMETER Experiment Name: Zm_5mM_SA_P Parameter: Timepoint (hr) Value: 48
  misc_feature: MA Experiment 20000477 PARAMETER Experiment Name: Zm_5mM_SA_P Parameter: Tissue Value: Aerial
  misc_feature: MA Experiment 20000477 PARAMETER Experiment Name: Zm_5mM_SA_P Parameter: Treatment Value: 5mM SA vs. No Treatment
  misc_feature: MA Experiment ID: 20000479 Result: Up-regulated in Transcription
  misc_feature: MA Experiment 20000479 PARAMETER Experiment Name: Zm_Drought_P Parameter: Age (day) Value: 10
  misc_feature: MA Experiment 20000479 PARAMETER Experiment Name: Zm_Drought_P Parameter: Organism Value: Zea mays
  misc_feature: MA Experiment 20000479 PARAMETER Experiment Name: Zm_Drought_P Parameter: Plant Line Value: 35A19
  misc_feature: MA Experiment 20000479 PARAMETER Experiment Name: Zm_Drought_P Parameter: Timepoint (hr) Value: 48
  misc_feature: MA Experiment 20000479 PARAMETER Experiment Name: Zm_Drought_P Parameter: Tissue Value: Aerial
  misc_feature: MA Experiment 20000479 PARAMETER Experiment Name: Zm_Drought_P Parameter: Treatment Value: Drought vs. No Drought
  misc_feature: MA Experiment ID: 20000480 Result: Up-regulated in Transcription
  misc_feature: MA Experiment 20000480 PARAMETER Experiment Name: Zm_Drought_P Parameter: Age (day) Value: 11
  misc_feature: MA Experiment 20000480 PARAMETER Experiment Name: Zm_Drought_P Parameter: Organism Value: Zea mays
  misc_feature: MA Experiment 20000480 PARAMETER Experiment Name: Zm_Drought_P Parameter: Plant Line Value: 35A19
  misc_feature: MA Experiment 20000480 PARAMETER Experiment Name: Zm_Drought_P Parameter: Timepoint (hr) Value: 72
  misc_feature: MA Experiment 20000480 PARAMETER Experiment Name: Zm_Drought_P Parameter: Tissue Value: Aerial
  misc_feature: MA Experiment 20000480 PARAMETER Experiment Name: Zm_Drought_P Parameter: Treatment Value: Drought vs. No Drought
aatcgcaagctcaagcaaaaacacaaagcgcttaaaccacactcaaaccaaccgccaacaaacaggcctcctagtcccgaccagaacttgctcgtagccccgcccccgagaacccgacagcgcgagatggctcccgagctgatgacagccaagatgaccgccaaggccgcggcggcggcggcggcggtgaagcctgccacgagggcgtacgtgacgttccttgcgggcgncggcgactactggaagggcgtggtggggctggccaagggcctgcgcaaggtccgctcggcctaccccctggtggtggcggtgctgcccgacgtgcccgagtcccaccgccgcatcctcgtctcgcagggctgcgtcgtccgcgagatcgagcccgtgtacccgcctgagaaccagacgcagttcgccatggcgtactacgtcatcaactactccaagctccgcatctgggagttcgtggagtacgagaggatggtgtacctggacgcggacatccaggtgttcgagaacatcgacggcctgttcgagctcgagaaggggtacttctacgcggtgatggactgcttctgcgagaagacgtggagccacaccccgcagtacaggatcggctactgccagcagtgcccggacaaggtggcgtggccagcggcgaccgccgagctgggccctccgccgtcgctctacttcaacgccggcatgttcgtgcacgagcccagcgtggccaccgccaaggcgctcctcgacaccctccgcgtgactccgcccacccccttcgcagagcaggacttcctgaacatgttcttcagggatcagtacaggccgatccccaacgtgtacaacctcgtgctggccatgctctggaggcaccccgagaacgtgcagctggagaaggtgaaggtcgtgcactactgcgcggcggggtccaagccgtggaggttcacgggcaaggaggcgaacatggacagggaggacatcaacgccctggtgaacaagtggtgggacatctacaacgacgagacgctggacttgaagggcctgccctcgctctcgcccgacgacgacgacgaggtggaggcggtggccaagaagccgcttcgcgcggccctggcggaggccggcacggtcaagtacgtcaccgcgccctcggccgcgtgatcccgtgctctggccttcccccaccgcgcaccgtaccggtggccgcgcgctatagcttgtgtgtgtgtggccatcgcggaacataagaagaatctctcactataaaggccttcgttctgtgtttgcattttggttttggattagggtgtctaatttttcaccagttccttttccccttgtgtaagtgtggagcttactatatagctagcgcccatttcaaggtgctgcaagcgttggtcaggaattgggctagagtgtttgtcctgtaccgagggattatgtgtatttttgctatttcgctcggtaaattaatacaataataaaaaatagggagccgcaaaattatggcc

SEQ ID NO: 11225 - protein, 387 aa, Zea mays subsp. mays
  peptide (1)..(387): Ceres Seq. ID no. 12374132
  misc_feature (47)..(387): Homolog of NCBI NO: 34898096 NR Description: WSI76 protein induced by water stress [Oryza
  misc_feature (44)..(387): Homolog of NCBI NO: 4588376 NR Description: galactinol synthase [Brassica napus]
  misc_feature (43)..(387): Homolog of NCBI NO: 15226522 NR Description: putative galactinol synthase; protein id: supported by cDNA: 124236., supported by cDNA: gi_15810148,
  misc_feature (43)..(387): Homolog of NCBI NO: 15223567 NR Description: water stress-induced protein, putative; protein At1g56600.1, supported by cDNA: gi_15215761, supported by cDNA:
  misc_feature (43)..(387): Homolog of NCBI NO: 5541885 NR Description: putative galactinol synthase [Pisum sativum]
  misc_feature (43)..(387): Homolog of NCBI NO: 20340247 NR Description: galactinol synthase-like protein [Thellungiella
  misc_feature (56)..(387): Homolog of NCBI NO: 18874402 NR Description: galactinol synthase [Cucumis melo]
  misc_feature (56)..(387): Homolog of NCBI NO: 29569824 NR Description: galactinol synthase [Cucumis sativus]
  misc_feature (43)..(387): Homolog of NCBI NO: 15219093 NR Description: galactinol synthase, putative; protein id: [Arabidopsis thaliana] >gi|25404266|pir||H96629 hypothetical
  misc_feature (66)..(387): Homolog of NCBI NO: 5608497 NR Description: galactinol synthase, isoform GolS-1 [Ajuga
  misc_feature (77)..(77): Xaa is any aa, unknown or other
NRKLKQKHKALKPHSNQPPTNRPPSPDQNLLVAPPPRTRQREMAPELMTAKMTAKAAAAAAAVKPATRAYVTFLAGXGDYWKGVVGLAKGLRKVRSAYPLVVAVLPDVPESHRRILVSQGCVVREIEPVYPPENQTQFAMAYYVINYSKLRIWEFVEYERMVYLDADIQVFENIDGLFELEKGYFYAVMDCFCEKTWSHTPQYRIGYCQQCPDKVAWPAATAELGPPPSLYFNAGMFVHEPSVATAKALLDTLRVTPPTPFAEQDFLNMFFRDQYRPIPNVYNLVLAMLWRHPENVQLEKVKVVHYCAAGSKPWRFTGKEANMDREDINALVNKWWDIYNDETLDLKGLPSLSPDDDDEVEAVAKKPLRAALAEAGTVKYVTAPSAA

SEQ ID NO: 11226 - protein, 345 aa, Zea mays subsp. mays
  peptide (1)..(345): Ceres Seq. ID no. 12374133
  misc_feature (5)..(345): Homolog of NCBI NO: 34898096 NR Description: WSI76 protein induced by water stress [Oryza
  misc_feature (2)..(345): Homolog of NCBI NO: 4588376 NR Description: galactinol synthase [Brassica napus]
  misc_feature (1)..(345): Homolog of NCBI NO: 15226522 NR Description: putative galactinol synthase; protein id: supported by cDNA: 124236., supported by cDNA: gi_15810148,
  misc_feature (1)..(345): Homolog of NCBI NO: 15223567 NR Description: water stress-induced protein, putative; protein At1g56600.1, supported by cDNA: gi_15215761, supported by cDNA:
  misc_feature (1)..(345): Homolog of NCBI NO: 5541885 NR Description: putative galactinol synthase [Pisum sativum]
  misc_feature (1)..(345): Homolog of NCBI NO: 20340247 NR Description: galactinol synthase-like protein [Thellungiella
  misc_feature (14)..(345): Homolog of NCBI NO: 18874402 NR Description: galactinol synthase [Cucumis melo]
  misc_feature (14)..(345): Homolog of NCBI NO: 29569824 NR Description: galactinol synthase [Cucumis sativus]
  misc_feature (1)..(345): Homolog of NCBI NO: 15219093 NR Description: galactinol synthase, putative; protein id: [Arabidopsis thaliana] >gi|25404266|pir||H96629 hypothetical
  misc_feature (24)..(345): Homolog of NCBI NO: 5608497 NR Description: galactinol synthase, isoform GolS-1 [Ajuga
  misc_feature (35)..(35): Xaa is any aa, unknown or other
MAPELMTAKMTAKAAAAAAAVKPATRAYVTFLAGXGDYWKGVVGLAKGLRKVRSAYPLVVAVLPDVPESHRRILVSQGCVVREIEPVYPPENQTQFAMAYYVINYSKLRIWEFVEYERMVYLDADIQVFENIDGLFELEKGYFYAVMDCFCEKTWSHTPQYRIGYCQQCPDKVAWPAATAELGPPPSLYFNAGMFVHEPSVATAKALLDTLRVTPPTPFAEQDFLNMFFRDQYRPIPNVYNLVLAMLWRHPENVQLEKVKVVHYCAAGSKPWRFTGKEANMDREDINALVNKWWDIYNDETLDLKGLPSLSPDDDDEVEAVAKKPLRAALAEAGTVKYVTAPSAA

SEQ ID NO: 11227 - protein, 340 aa, Zea mays subsp. mays
  peptide (1)..(340): Ceres Seq. ID no. 12374134
  misc_feature (1)..(340): Homolog of NCBI NO: 34898096 NR Description: WSI76 protein induced by water stress [Oryza
  misc_feature (1)..(340): Homolog of NCBI NO: 4588376 NR Description: galactinol synthase [Brassica napus]
  misc_feature (1)..(340): Homolog of NCBI NO: 15226522 NR Description: putative galactinol synthase; protein id: supported by cDNA: 124236., supported by cDNA: gi_15810148,
  misc_feature (1)..(340): Homolog of NCBI NO: 15223567 NR Description: water stress-induced protein, putative; protein At1g56600.1, supported by cDNA: gi_15215761, supported by cDNA:
  misc_feature (1)..(340): Homolog of NCBI NO: 5541885 NR Description: putative galactinol synthase [Pisum sativum]
  misc_feature (1)..(340): Homolog of NCBI NO: 20340247 NR Description: galactinol synthase-like protein [Thellungiella
  misc_feature (9)..(340): Homolog of NCBI NO: 18874402 NR Description: galactinol synthase [Cucumis melo]
  misc_feature (9)..(340): Homolog of NCBI NO: 29569824 NR Description: galactinol synthase [Cucumis sativus]
  misc_feature (1)..(340): Homolog of NCBI NO: 15219093 NR Description: galactinol synthase, putative; protein id: [Arabidopsis thaliana] >gi|25404266|pir||H96629 hypothetical
  misc_feature (19)..(340): Homolog of NCBI NO: 5608497 NR Description: galactinol synthase, isoform GolS-1 [Ajuga
  misc_feature (30)..(30): Xaa is any aa, unknown or other
MTAKMTAKAAAAAAAVKPATRAYVTFLAGXGDYWKGVVGLAKGLRKVRSAYPLVVAVLPDVPESHRRILVSQGCVVREIEPVYPPENQTQFAMAYYVINYSKLRIWEFVEYERMVYLDADIQVFENIDGLFELEKGYFYAVMDCFCEKTWSHTPQYRIGYCQQCPDKVAWPAATAELGPPPSLYFNAGMFVHEPSVATAKALLDTLRVTPPTPFAEQDFLNMFFRDQYRPIPNVYNLVLAMLWRHPENVQLEKVKVVHYCAAGSKPWRFTGKEANMDREDINALVNKWWDIYNDETLDLKGLPSLSPDDDDEVEAVAKKPLRAALAEAGTVKYVTAPSAA

SEQ ID NO: 11228 - DNA, 1534 bp, Zea mays subsp. mays
  misc_feature (1)..(1534): Ceres Seq. ID no. 13492041
  misc_feature: MA Experiment ID: 108556 Result: Down-regulated in Transcription
  misc_feature: MA Experiment 108556 PARAMETER Experiment Name: Zm_Drought_P Parameter: Age (day) Value: 9
  misc_feature: MA Experiment 108556 PARAMETER Experiment Name: Zm_Drought_P Parameter: Organism Value: Zea mays
  misc_feature: MA Experiment 108556 PARAMETER Experiment Name: Zm_Drought_P Parameter: Plant Line Value: 35A19
  misc_feature: MA Experiment 108556 PARAMETER Experiment Name: Zm_Drought_P Parameter: Timepoint (hr) Value: 24
  misc_feature: MA Experiment 108556 PARAMETER Experiment Name: Zm_Drought_P Parameter: Tissue Value: Aerial
  misc_feature: MA Experiment 108556 PARAMETER Experiment Name: Zm_Drought_P Parameter: Treatment Value: Drought vs. No Drought
  misc_feature: MA Experiment ID: 20000535 Result: Down-regulated in Transcription
  misc_feature: MA Experiment 20000535 PARAMETER Experiment Name: Zm_Hybrid_Seed_Dev_P Parameter: DAP Value: 30 vs. 12
  misc_feature: MA Experiment 20000535 PARAMETER Experiment Name: Zm_Hybrid_Seed_Dev_P Parameter: Organism Value: Zea mays
  misc_feature: MA Experiment 20000535 PARAMETER Experiment Name: Zm_Hybrid_Seed_Dev_P Parameter: Plant Line Value: 35A19
  misc_feature: MA Experiment 20000535 PARAMETER Experiment Name: Zm_Hybrid_Seed_Dev_P Parameter: Tissue Value: Embryo vs. Unfert Floret
  misc_feature: MA Experiment ID: 20001608 Result: Down-regulated in Transcription
  misc_feature: MA Experiment 20001608 PARAMETER Experiment Name: Zm_50ppm_KNO3_L-to-H_P Parameter: Age (day) Value: 21
  misc_feature: MA Experiment 20001608 PARAMETER Experiment Name: Zm_50ppm_KNO3_L-to-H_P Parameter: Organism Value: Zea mays
  misc_feature: MA Experiment 20001608 PARAMETER Experiment Name: Zm_50ppm_KNO3_L-to-H_P Parameter: Plant Line Value: 35A19
  misc_feature: MA Experiment 20001608 PARAMETER Experiment Name: Zm_50ppm_KNO3_L-to-H_P Parameter: Timepoint (hr) Value: 48
  misc_feature: MA Experiment 20001608 PARAMETER Experiment Name: Zm_50ppm_KNO3_L-to-H_P Parameter: Tissue Value: Shoots
  misc_feature: MA Experiment 20001608 PARAMETER Experiment Name: Zm_50ppm_KNO3_L-to-H_P Parameter: Treatment Value: 50ppm KNO3 vs. 50ppm KCl
tccaaattccccggtcacctacctcctctgccctctcactctcagatccgcgtcctcggctcctcctcctcctcctcctcctcccttccttcgttccttccagatctccctcccagtcgagagtcgagatccaccgcctccgcgccccctcaccggtgcagcgcgaggaagcggggggccagaggccagccatgggcaaggaaggggccagcgacggcggcatgtcggagtcggtgatccgcaaggtcctggtctcgtacatgtacgtggcggtgtggatcttcctctccttctccgtgatcgtctacaacaagtacatcctcgaccccaagatgtacaactggcccttccccatctccctcaccatggtgcacatggccttctgctcctccctcgccgtggcgctcgtccgcgtcctccgcgtcgtcgacctcccgtcctcgcccgccatgacgtcgcagctctacgtctcctccgtgctccctatcggcgcgctctactcgctctcgctctggttctccaactccgcctacatctacctctccgtctccttcatccagatgctcaaggcgctcatgcccgtcgccgtctactccatcggggtcctcttcaagaaggagaccttcaagtcctccgccatgctcaacatgctctccatctcgttcggcgtcgccatcgccgcctacggagaggcccgcttcgacgcccgcggcgtcgccctgcagctcgccgccgtcgccttcgaggccacgcgcctcgtcctcatccagatcctcctcacctccaagggcatctccctcaaccccatcacctcgctctactacgtcgcgccctgctgcctcgctttcctcgtcgtgccctgggtcttcgtcgagctgcccaggctgcgcgccgtcggcatcttccagccggacctcttcgtcttcggcaccaactccctctgcgccttcgcgctcaacctcgccgtcttcctgctcgtcggcaagacgtcggctctcaccatgaacgtcgccggcgtcgtcaaggactggctgctcatcgccttctcctggtccgtcatccgcgacaccgtcacccccatcaacctcttcggctacgggatcgccttcctcggggtgggatactacaaccacgtcaagctgcaggcgctcaaggccaaggaggcgcagaagaaggcgacgcaggccgacgaggaggccgggtcgctgctgcaggagcgcgactcgcacggcgaccgcaagactgacaaccaggcctagcgagtgtgccggatctcatgatccaattcgctcggttctgaacccagtgtactccaaatatgtgatccaacccttacacgtttgatgcaaaatttgttcatttcttgtctttgacttgatctggtggtaccaaggaaataagcacgggaaagatgcaagctttgtgtcgaacatgtgaaaaaaaatatatatgtatgagcaattttttgtcttttttttggggccagttgtagctgttactaccattaaacagtaagcaaaactgtttgcatttt

SEQ ID NO: 11229 - protein, 418 aa, Zea mays subsp. mays
  peptide (1)..(418): Ceres Seq. ID no. 13492042
  misc_feature (249)..(377): Pfam Name: Integral membrane protein DUF6 Pfam Description: Integral membrane protein DUF6
  misc_feature (63)..(418): Homolog of NCBI NO: 34908982 NR Description: P0003D09.29 [Oryza sativa (japonica
  misc_feature (64)..(413): Homolog of NCBI NO: 15236781 NR Description: phosphate translocator-related [Arabidopsis
  misc_feature (64)..(412): Homolog of NCBI NO: 15224742 NR Description: phosphate translocator-related [Arabidopsis
  misc_feature (72)..(415): Homolog of NCBI NO: 18420914 NR Description: phosphate translocator-related [Arabidopsis
  misc_feature (64)..(418): Homolog of NCBI NO: 15238995 NR Description: phosphate translocator-related [Arabidopsis >gi|8953385|emb|CAB96658.1| putative protein [Arabidopsis
  misc_feature (74)..(385): Homolog of NCBI NO: 15221115 NR Description: phosphate translocator-related [Arabidopsis
  misc_feature (74)..(418): Homolog of NCBI NO: 18401506 NR Description: phosphate translocator-related [Arabidopsis >gi|11994681|dbj|BAB02919.1| gb|AAD49773.1~gene_id:MTO12.2~strong to unknown protein [Arabidopsis thaliana]
  misc_feature (74)..(385): Homolog of NCBI NO: 8778534 NR Description: F21D18.5 [Arabidopsis thaliana]
  misc_feature (75)..(412): Homolog of NCBI NO: 18400381 NR Description: transporter-related [Arabidopsis thaliana] AT3g14410/MLN21_19 [Arabidopsis thaliana]
  misc_feature (75)..(412): Homolog of NCBI NO: 9279588 NR Description: phosphate/phosphoenolpyruvate translocator
QIPRSPTSSALSLSDPRPRLLLLLLLLPSFVPSRSPSQSRVEIHRLRAPSPVQREEAGGQRPAMGKEGASDGGMSESVIRKVLVSYMYVAVWIFLSFSVIVYNKYILDPKMYNWPFPISLTMVHMAFCSSLAVALVRVLRVVDLPSSPAMTSQLYVSSVLPIGALYSLSLWFSNSAYIYLSVSFIQMLKALMPVAVYSIGVLFKKETFKSSAMLNMLSISFGVAIAAYGEARFDARGVALQLAAVAFEATRLVLIQILLTSKGISLNPITSLYYVAPCCLAFLVVPWVFVELPRLRAVGIFQPDLFVFGTNSLCAFALNLAVFLLVGKTSALTMNVAGVVKDWLLIAFSWSVIRDTVTPINLFGYGIAFLGVGYYNHVKLQALKAKEAQKKATQADEEAGSLLQERDSHGDRKTDNQA

SEQ ID NO: 11230 - protein, 414 aa, Zea mays subsp. mays
  peptide (1)..(414): Ceres Seq. ID no. 13492043
  misc_feature (19)..(66): Homolog of NCBI NO: 27375632 NR Description: blr0521 [Bradyrhizobium japonicum]
PNSPVTYLLCPLTLRSASSAPPPPPPPPFLRSFQISLPVESRDPPPPRPLTGAARGSGGPEASHGQGRGQRRRHVGVGDPQGPGLVHVRGGVDLPLLLRDRLQQVHPRPQDVQLALPHLPHHGAHGLLLLPRRGARPRPPRRRPPVLARHDVAALRLLRAPYRRALLALALVLQLRLHLPLRLLHPDAQGAHARRRLLHRGPLQEGDLQVLRHAQHALHLVRRRHRRLRRGPLRRPRRRPAARRRRLRGHAPRPHPDPPHLQGHLPQPHHLALLRRALLPRFPRRALGLRRAAQAARRRHLPAGPLRLRHQLPLRLRAQPRRLPARRQDVGSHHERRRRRQGLAAHRLLLVRHPRHRHPHQPLRLRDRLPRGGILQPRQAAGAQGQGGAEEGDAGRRGGRVAAAGARLARRPQD

SEQ ID NO: 11231 - protein, 355 aa, Zea mays subsp. mays
  peptide (1)..(355): Ceres Seq. ID no. 13492044
  misc_feature (186)..(314): Pfam Name: Integral membrane protein DUF6 Pfam Description: Integral membrane protein DUF6
  misc_feature (1)..(355): Homolog of NCBI NO: 34908982 NR Description: P0003D09.29 [Oryza sativa (japonica
  misc_feature (1)..(350): Homolog of NCBI NO: 15236781 NR Description: phosphate translocator-related [Arabidopsis
  misc_feature (1)..(349): Homolog of NCBI NO: 15224742 NR Description: phosphate translocator-related [Arabidopsis
  misc_feature (9)..(352): Homolog of NCBI NO: 18420914 NR Description: phosphate translocator-related [Arabidopsis
  misc_feature (1)..(355): Homolog of NCBI NO: 15238995 NR Description: phosphate translocator-related [Arabidopsis >gi|8953385|emb|CAB96658.1| putative protein [Arabidopsis
  misc_feature (11)..(322): Homolog of NCBI NO: 15221115 NR Description: phosphate translocator-related [Arabidopsis
  misc_feature (11)..(355): Homolog of NCBI NO: 18401506 NR Description: phosphate translocator-related [Arabidopsis >gi|11994681|dbj|BAB02919.1| gb|AAD49773.1~gene_id:MTO12.2~strong to unknown protein [Arabidopsis thaliana]
  misc_feature (11)..(322): Homolog of NCBI NO: 8778534 NR Description: F21D18.5 [Arabidopsis thaliana]
  misc_feature (12)..(349): Homolog of NCBI NO: 18400381 NR Description: transporter-related [Arabidopsis thaliana] AT3g14410/MLN21_19 [Arabidopsis thaliana]
  misc_feature (12)..(349): Homolog of NCBI NO: 9279588 NR Description: phosphate/phosphoenolpyruvate translocator
MGKEGASDGGMSESVIRKVLVSYMYVAVWIFLSFSVIVYNKYILDPKMYNWPFPISLTMVHMAFCSSLAVALVRVLRVVDLPSSPAMTSQLYVSSVLPIGALYSLSLWFSNSAYIYLSVSFIQMLKALMPVAVYSIGVLFKKETFKSSAMLNMLSISFGVAIAAYGEARFDARGVALQLAAVAFEATRLVLIQILLTSKGISLNPITSLYYVAPCCLAFLVVPWVFVELPRLRAVGIFQPDLFVFGTNSLCAFALNLAVFLLVGKTSALTMNVAGVVKDWLLIAFSWSVIRDTVTPINLFGYGIAFLGVGYYNHVKLQALKAKEAQKKATQADEEAGSLLQERDSHGDRKTDNQA

SEQ ID NO: 11232 - DNA, 1276 bp, Zea mays subsp. mays
  misc_feature (1)..(1276): Ceres Seq. ID no. 12411915
  misc_feature: MA Experiment ID: 20000492 Result: Down-regulated in Transcription
  misc_feature: MA Experiment 20000492 PARAMETER Experiment Name: Zm_Hybrid_Seed_Dev_P Parameter: DAP Value: 12
  misc_feature: MA Experiment 20000492 PARAMETER Experiment Name: Zm_Hybrid_Seed_Dev_P Parameter: Organism Value: Zea mays
  misc_feature: MA Experiment 20000492 PARAMETER Experiment Name: Zm_Hybrid_Seed_Dev_P Parameter: Plant Line Value: 35A19
  misc_feature: MA Experiment 20000492 PARAMETER Experiment Name: Zm_Hybrid_Seed_Dev_P Parameter: Tissue Value: Fert Kernel vs. Unfert Floret
  misc_feature: MA Experiment ID: 20000535 Result: Down-regulated in Transcription
  misc_feature: MA Experiment 20000535 PARAMETER Experiment Name: Zm_Hybrid_Seed_Dev_P Parameter: DAP Value: 30 vs. 12
  misc_feature: MA Experiment 20000535 PARAMETER Experiment Name: Zm_Hybrid_Seed_Dev_P Parameter: Organism Value: Zea mays
  misc_feature: MA Experiment 20000535 PARAMETER Experiment Name: Zm_Hybrid_Seed_Dev_P Parameter: Plant Line Value: 35A19
  misc_feature: MA Experiment 20000535 PARAMETER Experiment Name: Zm_Hybrid_Seed_Dev_P Parameter: Tissue Value: Embryo vs. Unfert Floret
aacgatcaaaatgaaaattactgagatgtcccctcggacacacagtggtcaaccgacgccgccggtgggtgcccggaatcccggatccttgtccgccctcctgctcactccactcgcctgccagccgcacaccaatcacctctgcggccggcggcgtctgcaacgccagtctctgatccgaccccgatcggcacacacgttctccatggcggagcagctcgcatcccaagatgctcccaatccccctgctccggcacagagggtactggtgacgaacacgcatggggagaaactcgtcggcctgctgcaccacatggggtctgacaaggttgtagttctctgccatggctttacgggctccaaggactatagcctcatcactgaccttgcggccgcactaacaaagcaagggattagtgtgtttcgctttgattttagtggaaatggagaaagtgaaggtgaattccagtacggcaactacaagaaggaggctgctgacttgcactctgttgtcttgtatcttcgccaggagaagtacgacgtagcagcaattgttggtcacagcaaaggtggagatgtggtcgttctatatgcctctatctacaaggatgtccccatggtggttaacctctctggccggtttcatttggagaaaggcattgaggagcgcctaggcaaagagtttatggatagaataaacaaggaaggctacatcgatgtcaaagacaaatcaggaaatgttttgtacagagtaaccaaggagagcttgatggaacggctgagccatgatatgcacgcaacgagcctttccatcagcaaagagtgcaggttctttacaattcacggttcagctgacgagatcatacccgtggaagatgcgtatgagtttgcaaggcttataccaaaccacaagctgcgtgtcatcgagggagcaaatcactgctacactgctcaccgtagagaactttctgatgccgtagtagaagccatcacatccagtgaggcaggggagaccacaacctagatctgatgcagaacggcagcctgcctttccaatcctgcaatgccgctcttccatctcagtcacattgccttatcacaatttttaaaagaaaacgagttctttgaaaatatcgtttgaatctagacgttgttaactcgttgtatcatgacatccttaatgctacgtttggacgttgatattggagagtataaaattgaattgggttgaatatcaaatcagacatgatagtgaaataagatgtaatttcaatcc

SEQ ID NO: 11233 - protein, 340 aa, Zea mays subsp. mays
  peptide (1)..(340): Ceres Seq. ID no. 12411916
  misc_feature (49)..(340): Homolog of NCBI NO: 34913064 NR Description: P0013G02.24 [Oryza sativa (japonica
  misc_feature (68)..(333): Homolog of NCBI NO: 34913068 NR Description: P0013G02.26 [Oryza sativa (japonica
  misc_feature (86)..(332): Homolog of NCBI NO: 21554728 NR Description: putative esterase [Arabidopsis thaliana]
  misc_feature (79)..(330): Homolog of NCBI NO: 15228202 NR Description: putative protein; protein id: At3g47590.1
  misc_feature (86)..(332): Homolog of NCBI NO: 15232826 NR Description: putative protein; protein id: At3g47560.1, by cDNA: 262295. [Arabidopsis thaliana] >gi|11281956|pir||T45716
  misc_feature (86)..(332): Homolog of NCBI NO: 22135864 NR Description: putative protein [Arabidopsis thaliana]
  misc_feature (86)..(330): Homolog of NCBI NO: 15220578 NR Description: hypothetical protein; protein id: At1g29840.1
  misc_feature (86)..(327): Homolog of NCBI NO: 11358640 NR Description: probable esterase-like protein - Arabidopsis
  misc_feature (86)..(327): Homolog of NCBI NO: 18416707 NR Description: putative esterase - like protein; protein id:
  misc_feature (86)..(327): Homolog of NCBI NO: 21595418 NR Description: putative esterase-like protein [Arabidopsis
TIKMKITEMSPRTHSGQPTPPVGARNPGSLSALLLTPLACQPHTNHLCGRRRLQRQSLIRPRSAHTFSMAEQLASQDAPNPPAPAQRVLVTNTHGEKLVGLLHHMGSDKVVVLCHGFTGSKDYSLITDLAAALTKQGISVFRFDFSGNGESEGEFQYGNYKKEAADLHSVVLYLRQEKYDVAAIVGHSKGGDVVVLYASIYKDVPMVVNLSGRFHLEKGIEERLGKEFMDRINKEGYIDVKDKSGNVLYRVTKESLMERLSHDMHATSLSISKECRFFTIHGSADEIIPVEDAYEFARLIPNHKLRVIEGANHCYTAHRRELSDAVVEAITSSEAGETTT

SEQ ID NO: 11234 - protein, 337 aa, Zea mays subsp. mays
  peptide (1)..(337): Ceres Seq. ID no. 12411917
  misc_feature (46)..(337): Homolog of NCBI NO: 34913064 NR Description: P0013G02.24 [Oryza sativa (japonica
  misc_feature (65)..(330): Homolog of NCBI NO: 34913068 NR Description: P0013G02.26 [Oryza sativa (japonica
  misc_feature (83)..(329): Homolog of NCBI NO: 21554728 NR Description: putative esterase [Arabidopsis thaliana]
  misc_feature (76)..(327): Homolog of NCBI NO: 15228202 NR Description: putative protein; protein id: At3g47590.1
  misc_feature (83)..(329): Homolog of NCBI NO: 15232826 NR Description: putative protein; protein id: At3g47560.1, by cDNA: 262295. [Arabidopsis thaliana] >gi|11281956|pir||T45716
  misc_feature (83)..(329): Homolog of NCBI NO: 22135864 NR Description: putative protein [Arabidopsis thaliana]
  misc_feature (83)..(327): Homolog of NCBI NO: 15220578 NR Description: hypothetical protein; protein id: At1g29840.1
  misc_feature (83)..(324): Homolog of NCBI NO: 11358640 NR Description: probable esterase-like protein - Arabidopsis
  misc_feature (83)..(324): Homolog of NCBI NO: 18416707 NR Description: putative esterase - like protein; protein id:
  misc_feature (83)..(324): Homolog of NCBI NO: 21595418 NR Description: putative esterase-like protein [Arabidopsis
MKITEMSPRTHSGQPTPPVGARNPGSLSALLLTPLACQPHTNHLCGRRRLQRQSLIRPRSAHTFSMAEQLASQDAPNPPAPAQRVLVTNTHGEKLVGLLHHMGSDKVVVLCHGFTGSKDYSLITDLAAALTKQGISVFRFDFSGNGESEGEFQYGNYKKEAADLHSVVLYLRQEKYDVAAIVGHSKGGDVVVLYASIYKDVPMVVNLSGRFHLEKGIEERLGKEFMDRINKEGYIDVKDKSGNVLYRVTKESLMERLSHDMHATSLSISKECRFFTIHGSADEIIPVEDAYEFARLIPNHKLRVIEGANHCYTAHRRELSDAVVEAITSSEAGETTT

SEQ ID NO: 11235 - protein, 332 aa, Zea mays subsp. mays
  peptide (1)..(332): Ceres Seq. ID no. 12411918
  misc_feature (41)..(332): Homolog of NCBI NO: 34913064 NR Description: P0013G02.24 [Oryza sativa (japonica
  misc_feature (60)..(325): Homolog of NCBI NO: 34913068 NR Description: P0013G02.26 [Oryza sativa (japonica
  misc_feature (78)..(324): Homolog of NCBI NO: 21554728 NR Description: putative esterase [Arabidopsis thaliana]
  misc_feature (71)..(322): Homolog of NCBI NO: 15228202 NR Description: putative protein; protein id: At3g47590.1
  misc_feature (78)..(324): Homolog of NCBI NO: 15232826 NR Description: putative protein; protein id: At3g47560.1, by cDNA: 262295. [Arabidopsis thaliana] >gi|11281956|pir||T45716
  misc_feature (78)..(324): Homolog of NCBI NO: 22135864 NR Description: putative protein [Arabidopsis thaliana]
  misc_feature (78)..(322): Homolog of NCBI NO: 15220578 NR Description: hypothetical protein; protein id: At1g29840.1
  misc_feature (78)..(319): Homolog of NCBI NO: 11358640 NR Description: probable esterase-like protein - Arabidopsis
  misc_feature (78)..(319): Homolog of NCBI NO: 18416707 NR Description: putative esterase - like protein; protein id:
  misc_feature (78)..(319): Homolog of NCBI NO: 21595418 NR Description: putative esterase-like protein [Arabidopsis
MSPRTHSGQPTPPVGARNPGSLSALLLTPLACQPHTNHLCGRRRLQRQSLIRPRSAHTFSMAEQLASQDAPNPPAPAQRVLVTNTHGEKLVGLLHHMGSDKVVVLCHGFTGSKDYSLITDLAAALTKQGISVFRFDFSGNGESEGEFQYGNYKKEAADLHSVVLYLRQEKYDVAAIVGHSKGGDVVVLYASIYKDVPMVVNLSGRFHLEKGIEERLGKEFMDRINKEGYIDVKDKSGNVLYRVTKESLMERLSHDMHATSLSISKECRFFTIHGSADEIIPVEDAYEFARLIPNHKLRVIEGANHCYTAHRRELSDAVVEAITSSEAGETTT

SEQ ID NO: 11236 - DNA, 1461 bp, Zea mays subsp. mays
  misc_feature (1)..(1461): Ceres Seq. ID no. 12411908
  misc_feature: MA Experiment ID: 108544 Result: Down-regulated in Transcription
  misc_feature: MA Experiment ID: 20000487 Result: Up-regulated in Transcription
  misc_feature: MA Experiment 20000487 PARAMETER Experiment Name: Zm_50mM_NH4NO3_L_to_H_P Parameter: Organism Value: Zea mays
  misc_feature: MA Experiment 20000487 PARAMETER Experiment Name: Zm_50mM_NH4NO3_L_to_H_P Parameter: Timepoint (hr) Value: 4
  misc_feature: MA Experiment 20000487 PARAMETER Experiment Name: Zm_50mM_NH4NO3_L_to_H_P Parameter: Tissue Value: Leaves
  misc_feature: MA Experiment 20000487 PARAMETER Experiment Name: Zm_50mM_NH4NO3_L_to_H_P Parameter: Treatment Value: 50mM NH4NO3 vs. 100mM Mannitol
  misc_feature: MA Experiment ID: 20000492 Result: Up-regulated in Transcription
  misc_feature: MA Experiment 20000492 PARAMETER Experiment Name: Zm_Hybrid_Seed_Dev_P Parameter: DAP Value: 12
  misc_feature: MA Experiment 20000492 PARAMETER Experiment Name: Zm_Hybrid_Seed_Dev_P Parameter: Organism Value: Zea mays
  misc_feature: MA Experiment 20000492 PARAMETER Experiment Name: Zm_Hybrid_Seed_Dev_P Parameter: Plant Line Value: 35A19
  misc_feature: MA Experiment 20000492 PARAMETER Experiment Name: Zm_Hybrid_Seed_Dev_P Parameter: Tissue Value: Fert Kernel vs. Unfert Floret
gaaggcgacgcagtggccgtacagtagtgtcacctgcacattgcagaccgcctcagcgcctcaccaagcgaaactcgttggcggctagggttttgctgcctcccgagcccaaaccctagagcacccgcgcccatcccatggcgtgctaggcttcgattgagactggggggattagtaccgcaggctgggattagagcaagcgccgagcggaaatggcatcgagtaaccaattcgatctacttggagacgtcgagaacgacgaccctgcccacctcctcgcagctgccgagaagaaggcggccgcggtgcctaagcccgcgcccgcgccggccaagttgcccaccaagcctccgccgcccgcgcaacctgtgagggaggaaaggaactatggtgctccaccgcgcgatggtccaggacgtggaagaggcggccgcggtggcaggactggcccgaggcgagattttggcgatgctgatgcccacggctttgagggggggtatggtggcggcggcggcggttttggggacggtggagttgctcgcggtgaaaatggtgagggtaggcaggcagagaggggccgtgggccccgccagccttaccgtggaggtgggcgacgtggtgggtacagcgatgggcaggctgggaatgagttcggacgtcctcgccgggcatatgagcgccacagcggcacaggccgtggctacgggatgaagcgtgaaggggctgggcgtggaaattggggaactgcaactgatgaaggccttgaacaggacactgtggatgctgttaatcctgaggagactactgccgtggtggaggatgaaaagaaacctgaagatgcaccacagtctgaggttgagaaggacaaggagggcgcggagaatgaagaagaaaaggaacctgaggataaggagatgactttggaggaatatgaaaaggtactggaggaaaaacgaaaagctttactctcccttaaggctgaggagagaaaagttgaaattgacaaggagctacaggccatgcaacaactgtcagttaaaaaggatggcgatgaagtgtttatcaagctgggctctgacaaggacttgaaaaagaaagaaagtgctgaaagagaagaacggggcaagaagtccctgagcatcaacgagttcttgaagccagctgaaggcgagaggtactataaccctagtggccgtggccgtggtaggggccgtggggggttccgtggtggttacaacggcggttatcggggaccagctgctgctccagcgatcgaagaccaggctcagttccctgccctggcctaagcacagctcgtgttctcgctcaagattgtgtcacttttgcggagtgcgtcagtcagtcctagtgttgttgctcccaagcttgctttccggattatgtgtatccaacattttctgatgttatgtactggtgtgctcgtgattgcatggttttgct

SEQ ID NO: 11237 - protein, 364 aa, Zea mays subsp. mays
  peptide (1)..(364): Ceres Seq. ID no. 12411909
  misc_feature (133)..(311): Pfam Name: Hyaluronan / mRNA binding family Pfam Description: Hyaluronan / mRNA binding family
  misc_feature (1)..(363): Homolog of NCBI NO: 15238039 NR Description: putative protein; protein id: At5g47210.1, by cDNA: 19104. [Arabidopsis thaliana] gene_id:MQL5.6~pir||G71444~similar to unknown protein
  misc_feature (1)..(363): Homolog of NCBI NO: 34910712 NR Description: putative nuclear RNA binding protein A [Oryza
  misc_feature (1)..(363): Homolog of NCBI NO: 7488863 NR Description: probable transcription factor - fava bean
  misc_feature (1)..(363): Homolog of NCBI NO: 6492266 NR Description: nuclear RNA binding protein A [Spinacia oleracea]
  misc_feature (1)..(363): Homolog of NCBI NO: 15235894 NR Description: nuclear antigen homolog; protein id: At4g16830.1, by cDNA: 118826., supported by cDNA: gi_17380879, supported by gi_20465928 [Arabidopsis thaliana] >gi|7488137|pir||F71435
  misc_feature (1)..(363): Homolog of NCBI NO: 21537052 NR Description: nuclear antigen homolog [Arabidopsis thaliana]
  misc_feature (1)..(363): Homolog of NCBI NO: 39725276 NR Description: salt tolerance protein 1 [Beta vulgaris]
  misc_feature (1)..(364): Homolog of NCBI NO: 34912396 NR Description: putative putative nuclear RNA binding protein A
  misc_feature (1)..(363): Homolog of NCBI NO: 39725278 NR Description: salt tolerance protein 2 [Beta vulgaris]
  misc_feature (1)..(363): Homolog of NCBI NO: 21553991 NR Description: nuclear RNA binding protein A-like protein
MASSNQFDLLGDVENDDPAHLLAAAEKKAAAVPKPAPAPAKLPTKPPPPAQPVREERNYGAPPRDGPGRGRGGRGGRTGPRRDFGDADAHGFEGGYGGGGGGFGDGGVARGENGEGRQAERGRGPRQPYRGGGRRGGYSDGQAGNEFGRPRRAYERHSGTGRGYGMKREGAGRGNWGTATDEGLEQDTVDAVNPEETTAVVEDEKKPEDAPQSEVEKDKEGAENEEEKEPEDKEMTLEEYEKVLEEKRKALLSLKAEERKVEIDKELQAMQQLSVKKDGDEVFIKLGSDKDLKKKESAEREERGKKSLSINEFLKPAEGERYYNPSGRGRGRGRGGFRGGYNGGYRGPAAAPAIEDQAQFPALA

SEQ ID NO: 11238 - protein, 199 aa, Zea mays subsp. mays
  peptide (1)..(199): Ceres Seq. ID no. 12411910
  misc_feature (1)..(146): Pfam Name: Hyaluronan / mRNA binding family Pfam Description: Hyaluronan / mRNA binding family
  misc_feature (1)..(198): Homolog of NCBI NO: 34910712 NR Description: putative nuclear RNA binding protein A [Oryza
  misc_feature (1)..(198): Homolog of NCBI NO: 39725278 NR Description: salt tolerance protein 2 [Beta vulgaris]
  misc_feature (1)..(198): Homolog of NCBI NO: 7488863 NR Description: probable transcription factor - fava bean
  misc_feature (1)..(199): Homolog of NCBI NO: 34912396 NR Description: putative putative nuclear RNA binding protein A
  misc_feature (1)..(198): Homolog of NCBI NO: 6492266 NR Description: nuclear RNA binding protein A [Spinacia oleracea]
  misc_feature (1)..(198): Homolog of NCBI NO: 39725276 NR Description: salt tolerance protein 1 [Beta vulgaris]
  misc_feature (1)..(198): Homolog of NCBI NO: 15235894 NR Description: nuclear antigen homolog; protein id: At4g16830.1, by cDNA: 118826., supported by cDNA: gi_17380879, supported by gi_20465928 [Arabidopsis thaliana] >gi|7488137|pir||F71435
  misc_feature (1)..(198): Homolog of NCBI NO: 21537052 NR Description: nuclear antigen homolog [Arabidopsis thaliana]
  misc_feature (1)..(198): Homolog of NCBI NO: 15238039 NR Description: putative protein; protein id: At5g47210.1, by cDNA: 19104. [Arabidopsis thaliana] gene_id:MQL5.6~pir||G71444~similar to unknown protein
  misc_feature (1)..(198): Homolog of NCBI NO: 21553991 NR Description: nuclear RNA binding protein A-like protein
MKREGAGRGNWGTATDEGLEQDTVDAVNPEETTAVVEDEKKPEDAPQSEVEKDKEGAENEEEKEPEDKEMTLEEYEKVLEEKRKALLSLKAEERKVEIDKELQAMQQLSVKKDGDEVFIKLGSDKDLKKKESAEREERGKKSLSINEFLKPAEGERYYNPSGRGRGRGRGGFRGGYNGGYRGPAAAPAIEDQAQFPALA

SEQ ID NO: 11239 - DNA, 1196 bp, Zea mays subsp. mays
  misc_feature (1)..(1196): Ceres Seq. ID no. 12353396
  misc_feature: MA Experiment ID: 108543 Result: Up-regulated in Transcription
  misc_feature: MA Experiment ID: 20000477 Result: Up-regulated in Transcription
  misc_feature: MA Experiment 20000477 PARAMETER Experiment Name: Zm_5mM_SA_P Parameter: Age (day) Value: 10
  misc_feature: MA Experiment 20000477 PARAMETER Experiment Name: Zm_5mM_SA_P Parameter: Organism Value: Zea mays
  misc_feature: MA Experiment 20000477 PARAMETER Experiment Name: Zm_5mM_SA_P Parameter: Plant Line Value: 35A19
  misc_feature: MA Experiment 20000477 PARAMETER Experiment Name: Zm_5mM_SA_P Parameter: Timepoint (hr) Value: 48
  misc_feature: MA Experiment 20000477 PARAMETER Experiment Name: Zm_5mM_SA_P Parameter: Tissue Value: Aerial
  misc_feature: MA Experiment 20000477 PARAMETER Experiment Name: Zm_5mM_SA_P Parameter: Treatment Value: 5mM SA vs. No Treatment
  misc_feature: MA Experiment ID: 20000492 Result: Down-regulated in Transcription
  misc_feature: MA Experiment 20000492 PARAMETER Experiment Name: Zm_Hybrid_Seed_Dev_P Parameter: DAP Value: 12
  misc_feature: MA Experiment 20000492 PARAMETER Experiment Name: Zm_Hybrid_Seed_Dev_P Parameter: Organism Value: Zea mays
  misc_feature: MA Experiment 20000492 PARAMETER Experiment Name: Zm_Hybrid_Seed_Dev_P Parameter: Plant Line Value: 35A19
  misc_feature: MA Experiment 20000492 PARAMETER Experiment Name: Zm_Hybrid_Seed_Dev_P Parameter: Tissue Value: Fert Kernel vs. Unfert Floret
gctttacaactccccaccccatcccatccacacacacttcacccagcgcggcggccgccggccgccggcaatggaggccgtggcgcacagcggcgactacctttggcggttcgtggcggagacagagtggtacaacgaggttgtcctcagcgccgtggcgccaggcgactggtggcgcggcctgccgcacccggtgcagtcatggatgcgcaactgcgtcggcggttacctcctctatttcatctctggtttcctctggtgcttcgtcatctactactggaagcgccacgcctacatccccaaagatgccatccccacaaatgacgctatgaagaagcaaatagttgtagcatcgaaggctatgcctttttactgcgctcttccaactttatctgaatatatgattgagagcggatggactcagtgctacttcaatatcagcgaaattggtttttctatgtacctctgttatatggctatgtatctcatctttgtggagtttggaatttactggatgcacagggagttgcatgacataaaaccattatacaaatatctgcatgcaacccaccatatttacaacaaggagaataccttgtctccatttgctggacttgcatttcatccactggatggtattctgcaagcaataccacatgtgttcgcgctcttcctctttccaacgcacttcaggacacatattgcactcttgttcctagaggctgtgtggacaacaaacatccacgactgcattcatggcaagatatggccagtcatgggtgctggatatcacaccattcaccatacgacttaccgtcacaactatggccactacaccatctggatggactggatgtttggtacgctcaatgagccagaagatatcctcaagaaggcttgagtttctcggagctgtggtattcctatggtgctgctgctggaactgctcgatctgttcccagtgtttctaatccgttgagcctgttcagcactgtctgtttatgtaggcatcagtgtgttaattactttgctaggttcatatggctttgtgcttattctgtaatttagcgatgtttgtctcatgacgcaacggagttcaggacgaataaaactttgctagacacattctggattccagttgcttgtacaatgttggaactcaactgtcaatataggatgtaaaacggattccttcc

SEQ ID NO: 11240 - protein, 299 aa, Zea mays subsp. mays
  peptide (1)..(299): Ceres Seq. ID no. 12353397
  misc_feature (31)..(203): Homolog of NCBI NO: 34895618 NR Description: putative sterol-C5(6)-desaturase [Oryza sativa
  misc_feature (238)..(298): Homolog of NCBI NO: 34895618 NR Description: putative sterol-C5(6)-desaturase [Oryza sativa
  misc_feature (32)..(298): Homolog of NCBI NO: 4426627 NR Description: sterol-C5(6)-desaturase homolog [Nicotiana
  misc_feature (32)..(298): Homolog of NCBI NO: 33301670 NR Description: Delta-7-sterol-C5(6)-desaturase (Delta-7-C-5
  misc_feature (27)..(292): Homolog of NCBI NO: 5031219 NR Description: delta7 sterol C-5 desaturase [Arabidopsis
  misc_feature (27)..(292): Homolog of NCBI NO: 15232935 NR Description: sterol-C5-desaturase; protein id: At3g02580.1,
  misc_feature (27)..(292): Homolog of NCBI NO: 21594971 NR Description: sterol-C5-desaturase [Arabidopsis thaliana]
  misc_feature (27)..(292): Homolog of NCBI NO: 2129741 NR Description: C-5 sterol desaturase (EC 1.-.-.-) - Arabidopsis
  misc_feature (28)..(292): Homolog of NCBI NO: 15232937 NR Description: putative sterol-C5-desaturase; protein id:
  misc_feature (73)..(292): Homolog of NCBI NO: 25742651 NR Description: sterol-C5-desaturase (fungal ERG3,
LYNSPPHPIHTHFTQRGGRRPPAMEAVAHSGDYLWRFVAETEWYNEVVLSAVAPGDWWRGLPHPVQSWMRNCVGGYLLYFISGFLWCFVIYYWKRHAYIPKDAIPTNDAMKKQIVVASKAMPFYCALPTLSEYMIESGWTQCYFNISEIGFSMYLCYMAMYLIFVEFGIYWMHRELHDIKPLYKYLHATHHIYNKENTLSPFAGLAFHPLDGILQAIPHVFALFLFPTHFRTHIALLFLEAVWTTNIHDCIHGKIWPVMGAGYHTIHHTTYRHNYGHYTIWMDWMFGTLNEPEDILKKA

SEQ ID NO: 11241 - protein, 276 aa, Zea mays subsp. mays; identical to SEQ ID NO: 6861
  peptide (1)..(276): Ceres Seq. ID no. 12353398
  misc_feature (8)..(180): Homolog of NCBI NO: 34895618 NR Description: putative sterol-C5(6)-desaturase [Oryza sativa
  misc_feature (215)..(275): Homolog of NCBI NO: 34895618 NR Description: putative sterol-C5(6)-desaturase [Oryza sativa
  misc_feature (9)..(275): Homolog of NCBI NO: 4426627 NR Description: sterol-C5(6)-desaturase homolog [Nicotiana
  misc_feature (9)..(275): Homolog of NCBI NO: 33301670 NR Description: Delta-7-sterol-C5(6)-desaturase (Delta-7-C-5
  misc_feature (4)..(269): Homolog of NCBI NO: 5031219 NR Description: delta7 sterol C-5 desaturase [Arabidopsis
  misc_feature (4)..(269): Homolog of NCBI NO: 15232935 NR Description: sterol-C5-desaturase; protein id: At3g02580.1,
  misc_feature (4)..(269): Homolog of NCBI NO: 21594971 NR Description: sterol-C5-desaturase [Arabidopsis thaliana]
  misc_feature (4)..(269): Homolog of NCBI NO: 2129741 NR Description: C-5 sterol desaturase (EC 1.-.-.-) - Arabidopsis
  misc_feature (5)..(269): Homolog of NCBI NO: 15232937 NR Description: putative sterol-C5-desaturase; protein id:
  misc_feature (50)..(269): Homolog of NCBI NO: 25742651 NR Description: sterol-C5-desaturase (fungal ERG3,

SEQ ID NO: 11242 - protein, 231 aa, Zea mays subsp. mays; identical to SEQ ID NO: 6862
  peptide (1)..(231): Ceres Seq. ID no. 12353399
  misc_feature (1)..(135): Homolog of NCBI NO: 34895618 NR Description: putative sterol-C5(6)-desaturase [Oryza sativa
  misc_feature (170)..(230): Homolog of NCBI NO: 34895618 NR Description: putative sterol-C5(6)-desaturase [Oryza sativa
  misc_feature (1)..(230): Homolog of NCBI NO: 4426627 NR Description: sterol-C5(6)-desaturase homolog [Nicotiana
  misc_feature (1)..(230): Homolog of NCBI NO: 33301670 NR Description: Delta-7-sterol-C5(6)-desaturase (Delta-7-C-5
  misc_feature (1)..(224): Homolog of NCBI NO: 5031219 NR Description: delta7 sterol C-5 desaturase [Arabidopsis
  misc_feature (1)..(224): Homolog of NCBI NO: 15232935 NR Description: sterol-C5-desaturase; protein id: At3g02580.1,
  misc_feature (1)..(224): Homolog of NCBI NO: 21594971 NR Description: sterol-C5-desaturase [Arabidopsis thaliana]
  misc_feature (1)..(224): Homolog of NCBI NO: 2129741 NR Description: C-5 sterol desaturase (EC 1.-.-.-) - Arabidopsis
  misc_feature (1)..(224): Homolog of NCBI NO: 15232937 NR Description: putative sterol-C5-desaturase; protein id:
  misc_feature (5)..(224): Homolog of NCBI NO: 25742651 NR Description: sterol-C5-desaturase (fungal ERG3,

SEQ ID NO: 11243 - DNA, 1921 bp, Zea mays subsp. mays
  misc_feature (1)..(1921): Ceres Seq. ID no. 12414468
  misc_feature: MA Experiment ID: 108504 Result: Up-regulated in Transcription
  misc_feature: MA Experiment 108504 PARAMETER Experiment Name: Zm_Drought_P Parameter: Age (day) Value: 8
  misc_feature: MA Experiment 108504 PARAMETER Experiment Name: Zm_Drought_P Parameter: Organism Value: Zea mays
  misc_feature: MA Experiment 108504 PARAMETER Experiment Name: Zm_Drought_P Parameter: Plant Line Value: 35A19
  misc_feature: MA Experiment 108504 PARAMETER Experiment Name: Zm_Drought_P Parameter: Timepoint (hr) Value: 12
  misc_feature: MA Experiment 108504 PARAMETER Experiment Name: Zm_Drought_P Parameter: Tissue Value: Aerial
  misc_feature: MA Experiment 108504 PARAMETER Experiment Name: Zm_Drought_P Parameter: Treatment Value: Drought vs. No Drought
  misc_feature: MA Experiment ID: 20000480 Result: Up-regulated in Transcription
  misc_feature: MA Experiment 20000480 PARAMETER Experiment Name: Zm_Drought_P Parameter: Age (day) Value: 11
  misc_feature: MA Experiment 20000480 PARAMETER Experiment Name: Zm_Drought_P Parameter: Organism Value: Zea mays
  misc_feature: MA Experiment 20000480 PARAMETER Experiment Name: Zm_Drought_P Parameter: Plant Line Value: 35A19
  misc_feature: MA Experiment 20000480 PARAMETER Experiment Name: Zm_Drought_P Parameter: Timepoint (hr) Value: 72
  misc_feature: MA Experiment 20000480 PARAMETER Experiment Name: Zm_Drought_P Parameter: Tissue Value: Aerial
  misc_feature: MA Experiment 20000480 PARAMETER Experiment Name: Zm_Drought_P Parameter: Treatment Value: Drought vs. No Drought
gcacgagaccattacctagaacatcctaatcgaaaaattgtcatctctacattgttgccggtgtcggcctcggccgtcgccgacgccgcgcatccagcgtccatgtctacgttaccgactcctcacgctggccggaccacgtgcccccacgtctcgccgtccccggttctcatccaccccgagctcccccaacgcgttttaccacagaccaataagtggccaatccctcgctgccccccacactccagaagtccagaccaaagctccaaagtccaatccctcgctagccacttgccatctgatcaaccagccagccgatctcagcgatccgccatggccaccgcgtattacgagaggccccgtggcggcgccgtcgaggaggcggacgacttcgatgagttcgaccccacgccgtacggcggtgggtacgacctcgccgtcaccttcggtcgcccgctgccaccgaccgaggaaacctgctacccgtgctcggcgccctcgacctcctacgacgcaccgcactacgccgcctccgagccgtccccctacggtcaccacgccaagccaaagcccaactacgggttccgcccccagcaggagcaacagccgtcttacggcagcggctacggatccaggcccgagcccgctgcggaggagggcggtggctatggatctggcttcggatccgggtatgggaggaagaagcaagaggaggagagctacggctctggatatgggaggaaaccgcaggcggaggagagctacgggtccggcgggtacggctctggctacggcggtcagacccggccggaggagagctatgggtcagcagggtatggatctgccaatccgcaggctgagacatacggctctggctacgggaggaagccacaggtagaggagagctacggatcggagtatgggtctgggttcgggaggaagccgcaggttgaggagagctatggatcggggtacgggaggacgccgcaggttgaggagagctatggatctggttacgggaggaagcctcaggttgaggagagctatggatctgggtacggcagcaggccgcagggtggggaggagtatggcagtggtgggtatgggaggaaggctcaggaggagacctatggctcctcggggtatggctatggcaggaagaacgaggagcagagctatggtggttctggctatggttatgagaagaaggcatctgaggaggatgaaggtgcctttggctctagtggttaccggaagccaaaaccctatggcgaggagacacagggttcatacggttatggagaggagcagcccaagtatcagagtggcgggtatgagagaccgagctatggtgggggagaggggtactatggccgcaagaaagatgatgacgactcggatgatgagaagaagcggcgtcattctaagcaccaccaccatggccaccactcaaaaaaaaaaaaaaaaaacggcacgagaagcgcttctcgtgccgttttttttttttttttttgagtnngagtcgggaggaggacgagaagggggagaggggatttttgccgcaagaaagatgatgacgactcggatgatgagaagaagcggcgtcattctaagcaccaccaccatggccaccactacgatgactaagcaccagtgccttctgctgggcgttgccctggttcaccgctactgctactatatccattcgcttgcataaataaagacggctgtgtaccttctggacactggaccaccgttgcgacgttgcctctgcattgttacaggccgagccgtgagtgtgctgtttattatctaatgttcaaatcgttgtgatgaaccaccgtccacgcctgttgatgccgaaccgaatgtctggatttactttgcgcctgttcttgtggtgtttgtcgccttccctgtc

SEQ ID NO: 11244 - protein, 504 aa, Zea mays subsp. mays
  peptide (1)..(504): Ceres Seq. ID no. 12414469
  misc_feature (209)..(407): Pfam Name: Dehydrin Pfam Description: Dehydrin
  misc_feature (127)..(479): Homolog of NCBI NO: 24417262 NR Description: unknown [Arabidopsis thaliana]
  misc_feature (127)..(479): Homolog of NCBI NO: 9758332 NR Description: gene_id:MIJ24.6~ref|NP_013897.1~similar to protein [Arabidopsis thaliana] >gi|16604364|gb|AAL24188.1| [Arabidopsis thaliana] >gi|23308191|gb|AAN18065.1|
  misc_feature (201)..(455): Homolog of NCBI NO: 10954048 NR Description: ovarian fibroin-like substance-1 [Cyprinus carpio]
  misc_feature (162)..(455): Homolog of NCBI NO: 10954048 NR Description: ovarian fibroin-like substance-1 [Cyprinus carpio]
  misc_feature (161)..(483): Homolog of NCBI NO: 161050 NR Description: p48 eggshell protein
  misc_feature (217)..(459): Homolog of NCBI NO: 27881721 NR Description: Unknown (protein for MGC:52724) [Xenopus laevis]
  misc_feature (206)..(458): Homolog of NCBI NO: 37534924 NR Description: putative glycine-rich protein [Oryza sativa
  misc_feature (192)..(468): Homolog of NCBI NO: 26252108 NR Description: Similar to pigpen [Mus musculus]
  misc_feature (166)..(468): Homolog of NCBI NO: 27820115 NR Description: AT02511p [Drosophila melanogaster]
  misc_feature (166)..(464): Homolog of NCBI NO: 24654243 NR Description: CG15920-PA [Drosophila melanogaster]
ARDHYLEHPNRKIVISTLLPVSASAVADAAHPASMSTLPTPHAGRTTCPHVSPSPVLIHPELPQRVLPQTNKWPIPRCPPHSRSPDQSSKVQSLASHLPSDQPASRSQRSAMATAYYERPRGGAVEEADDFDEFDPTPYGGGYDLAVTFGRPLPPTEETCYPCSAPSTSYDAPHYAASEPSPYGHHAKPKPNYGFRPQQEQQPSYGSGYGSRPEPAAEEGGGYGSGFGSGYGRKKQEEESYGSGYGRKPQAEESYGSGGYGSGYGGQTRPEESYGSAGYGSANPQAETYGSGYGRKPQVEESYGSEYGSGFGRKPQVEESYGSGYGRTPQVEESYGSGYGRKPQVEESYGSGYGSRPQGGEEYGSGGYGRKAQEETYGSSGYGYGRKNEEQSYGGSGYGYEKKASEEDEGAFGSSGYRKPKPYGEETQGSYGYGEEQPKYQSGGYERPSYGGGEGYYGRKKDDDDSDDEKKRRHSKHHHHGHHSKKKKKNGTRSASRAVFFFFF

SEQ ID NO: 11245 - protein, 470 aa, Zea mays subsp. mays
  peptide (1)..(470): Ceres Seq. ID no. 12414470
  misc_feature (175)..(373): Pfam Name: Dehydrin Pfam Description: Dehydrin
  misc_feature (93)..(445): Homolog of NCBI NO: 24417262 NR Description: unknown [Arabidopsis thaliana]
  misc_feature (93)..(445): Homolog of NCBI NO: 9758332 NR Description: gene_id:MIJ24.6~ref|NP_013897.1~similar to protein [Arabidopsis thaliana] >gi|16604364|gb|AAL24188.1| [Arabidopsis thaliana] >gi|23308191|gb|AAN18065.1|
  misc_feature (167)..(421): Homolog of NCBI NO: 10954048 NR Description: ovarian fibroin-like substance-1 [Cyprinus carpio]
  misc_feature (128)..(421): Homolog of NCBI NO: 10954048 NR Description: ovarian fibroin-like substance-1 [Cyprinus carpio]
  misc_feature (127)..(449): Homolog of NCBI NO: 161050 NR Description: p48 eggshell protein
  misc_feature (183)..(425): Homolog of NCBI NO: 27881721 NR Description: Unknown (protein for MGC:52724) [Xenopus laevis]
  misc_feature (172)..(424): Homolog of NCBI NO: 37534924 NR Description: putative glycine-rich protein [Oryza sativa
  misc_feature (158)..(434): Homolog of NCBI NO: 26252108 NR Description: Similar to pigpen [Mus musculus]
  misc_feature (132)..(434): Homolog of NCBI NO: 27820115 NR Description: AT02511p [Drosophila melanogaster]
  misc_feature (132)..(430): Homolog of NCBI NO: 24654243 NR Description: CG15920-PA [Drosophila melanogaster]
MSTLPTPHAGRTTCPHVSPSPVLIHPELPQRVLPQTNKWPIPRCPPHSRSPDQSSKVQSLASHLPSDQPASRSQRSAMATAYYERPRGGAVEEADDFDEFDPTPYGGGYDLAVTFGRPLPPTEETCYPCSAPSTSYDAPHYAASEPSPYGHHAKPKPNYGFRPQQEQQPSYGSGYGSRPEPAAEEGGGYGSGFGSGYGRKKQEEESYGSGYGRKPQAEESYGSGGYGSGYGGQTRPEESYGSAGYGSANPQAETYGSGYGRKPQVEESYGSEYGSGFGRKPQVEESYGSGYGRTPQVEESYGSGYGRKPQVEESYGSGYGSRPQGGEEYGSGGYGRKAQEETYGSSGYGYGRKNEEQSYGGSGYGYEKKASEEDEGAFGSSGYRKPKPYGEETQGSYGYGEEQPKYQSGGYERPSYGGGEGYYGRKKDDDDSDDEKKRRHSKHHHHGHHSKKKKKNGTRSASRAVFFFFF

SEQ ID NO: 11246 - protein, 393 aa, Zea mays subsp. mays
  peptide (1)..(393): Ceres Seq. ID no. 12414471
  misc_feature (98)..(296): Pfam Name: Dehydrin Pfam Description: Dehydrin
  misc_feature (16)..(368): Homolog of NCBI NO: 24417262 NR Description: unknown [Arabidopsis thaliana]
  misc_feature (16)..(368): Homolog of NCBI NO: 9758332 NR Description: gene_id:MIJ24.6~ref|NP_013897.1~similar to protein [Arabidopsis thaliana] >gi|16604364|gb|AAL24188.1| [Arabidopsis thaliana] >gi|23308191|gb|AAN18065.1|
  misc_feature (90)..(344): Homolog of NCBI NO: 10954048 NR Description: ovarian fibroin-like substance-1 [Cyprinus carpio]
  misc_feature (51)..(344): Homolog of NCBI NO: 10954048 NR Description: ovarian fibroin-like substance-1 [Cyprinus carpio]
  misc_feature (50)..(372): Homolog of NCBI NO: 161050 NR Description: p48 eggshell protein
  misc_feature (106)..(348): Homolog of NCBI NO: 27881721 NR Description: Unknown (protein for MGC:52724) [Xenopus laevis]
  misc_feature (95)..(347): Homolog of NCBI NO: 37534924 NR Description: putative glycine-rich protein [Oryza sativa
  misc_feature (81)..(357): Homolog of NCBI NO: 26252108 NR Description: Similar to pigpen [Mus musculus]
  misc_feature (55)..(357): Homolog of NCBI NO: 27820115 NR Description: AT02511p [Drosophila melanogaster]
  misc_feature (55)..(353): Homolog of NCBI NO: 24654243 NR Description: CG15920-PA [Drosophila melanogaster]
MATAYYERPRGGAVEEADDFDEFDPTPYGGGYDLAVTFGRPLPPTEETCYPCSAPSTSYDAPHYAASEPSPYGHHAKPKPNYGFRPQQEQQPSYGSGYGSRPEPAAEEGGGYGSGFGSGYGRKKQEEESYGSGYGRKPQAEESYGSGGYGSGYGGQTRPEESYGSAGYGSANPQAETYGSGYGRKPQVEESYGSEYGSGFGRKPQVEESYGSGYGRTPQVEESYGSGYGRKPQVEESYGSGYGSRPQGGEEYGSGGYGRKAQEETYGSSGYGYGRKNEEQSYGGSGYGYEKKASEEDEGAFGSSGYRKPKPYGEETQGSYGYGEEQPKYQSGGYERPSYGGGEGYYGRKKDDDDSDDEKKRRHSKHHHHGHHSKKKKKNGTRSASRAVFFFFF

SEQ ID NO: 11247 - DNA, 1354 bp, Zea mays subsp. mays
  misc_feature (1)..(1354): Ceres Seq. ID no. 12351706
  misc_feature: MA Experiment ID: 108523 Result: Down-regulated in Transcription
  misc_feature: MA Experiment 108523 PARAMETER Experiment Name: Zm_42deg_Heat_P Parameter: Age (day) Value: 8
  misc_feature: MA Experiment 108523 PARAMETER Experiment Name: Zm_42deg_Heat_P Parameter: Organism Value: Zea mays
  misc_feature: MA Experiment 108523 PARAMETER Experiment Name: Zm_42deg_Heat_P Parameter: Plant Line Value: 35A19
  misc_feature: MA Experiment 108523 PARAMETER Experiment Name: Zm_42deg_Heat_P Parameter: Temperature (deg C) Value: 42 vs. 22
  misc_feature: MA Experiment 108523 PARAMETER Experiment Name: Zm_42deg_Heat_P Parameter: Timepoint (hr) Value: 6
  misc_feature: MA Experiment 108523 PARAMETER Experiment Name: Zm_42deg_Heat_P Parameter: Tissue Value: Aerial
  misc_feature: MA Experiment ID: 108528 Result: Up-regulated in Transcription
  misc_feature: MA Experiment 108528 PARAMETER Experiment Name: Zm_Imbibed_Seeds_P Parameter: Age (day) Value: 5 vs. 2
  misc_feature: MA Experiment 108528 PARAMETER Experiment Name: Zm_Imbibed_Seeds_P Parameter: Organism Value: Zea mays
  misc_feature: MA Experiment 108528 PARAMETER Experiment Name: Zm_Imbibed_Seeds_P Parameter: Plant Line Value: 35A19
  misc_feature: MA Experiment 108528 PARAMETER Experiment Name: Zm_Imbibed_Seeds_P Parameter: Tissue Value: Aerial vs. Embryo
  misc_feature: MA Experiment ID: 108529 Result: Down-regulated in Transcription
  misc_feature: MA Experiment 108529 PARAMETER Experiment Name: Zm_Imbibed_Seeds_P Parameter: Age (day) Value: 5 vs. 2
  misc_feature: MA Experiment 108529 PARAMETER Experiment Name: Zm_Imbibed_Seeds_P Parameter: Organism Value: Zea mays
  misc_feature: MA Experiment 108529 PARAMETER Experiment Name: Zm_Imbibed_Seeds_P Parameter: Plant Line Value: 35A19
  misc_feature: MA Experiment 108529 PARAMETER Experiment Name: Zm_Imbibed_Seeds_P Parameter: Tissue Value: Roots vs. Embryo
  misc_feature: MA Experiment ID: 108530 Result: Up-regulated in Transcription
  misc_feature: MA Experiment 108530 PARAMETER Experiment Name: Zm_Imbibed_Seeds_P Parameter: Age (day) Value: 6 vs. 2
  misc_feature: MA Experiment 108530 PARAMETER Experiment Name: Zm_Imbibed_Seeds_P Parameter: Organism Value: Zea mays
  misc_feature: MA Experiment 108530 PARAMETER Experiment Name: Zm_Imbibed_Seeds_P Parameter: Plant Line Value: 35A19
  misc_feature: MA Experiment 108530 PARAMETER Experiment Name: Zm_Imbibed_Seeds_P Parameter: Tissue Value: Aerial vs. Embryo
  misc_feature: MA Experiment ID: 108536 Result: Down-regulated in Transcription
  misc_feature: MA Experiment 108536 PARAMETER Experiment Name: Zm_Meristem_P Parameter: Age (day) Value: 8
  misc_feature: MA Experiment 108536 PARAMETER Experiment Name: Zm_Meristem_P Parameter: Organism Value: Zea mays
  misc_feature: MA Experiment 108536 PARAMETER Experiment Name: Zm_Meristem_P Parameter: Plant Line Value: 35A19
  misc_feature: MA Experiment 108536 PARAMETER Experiment Name: Zm_Meristem_P Parameter: Tissue Value: Shoot Meristem vs. Above Shoot Meristem
  misc_feature: MA Experiment ID: 108543 Result: Up-regulated in Transcription
  misc_feature: MA Experiment ID: 108544 Result: Up-regulated in Transcription
  misc_feature: MA Experiment ID: 108545 Result: Up-regulated in Transcription
  misc_feature: MA Experiment 108545 PARAMETER Experiment Name: Zm_Imbibed_Seeds_P Parameter: Age (day) Value: 3 vs. 2
  misc_feature: MA Experiment 108545 PARAMETER Experiment Name: Zm_Imbibed_Seeds_P Parameter: Organism Value: Zea mays
  misc_feature: MA Experiment 108545 PARAMETER Experiment Name: Zm_Imbibed_Seeds_P Parameter: Plant Line Value: 35A19
  misc_feature: MA Experiment 108545 PARAMETER Experiment Name: Zm_Imbibed_Seeds_P Parameter: Tissue Value: Aerial vs. Embryo
  misc_feature: MA Experiment ID: 108546 Result: Down-regulated in Transcription
  misc_feature: MA Experiment 108546 PARAMETER Experiment Name: Zm_Imbibed_Seeds_P Parameter: Age (day) Value: 3 vs. 2
  misc_feature: MA Experiment 108546 PARAMETER Experiment Name: Zm_Imbibed_Seeds_P Parameter: Organism Value: Zea mays
  misc_feature: MA Experiment 108546 PARAMETER Experiment Name: Zm_Imbibed_Seeds_P Parameter: Plant Line Value: 35A19
  misc_feature: MA Experiment 108546 PARAMETER Experiment Name: Zm_Imbibed_Seeds_P Parameter: Tissue Value: Roots vs. Embryo
  misc_feature: MA Experiment ID: 108547 Result: Up-regulated in Transcription
  misc_feature: MA Experiment 108547 PARAMETER Experiment Name: Zm_Imbibed_Seeds_P Parameter: Age (day) Value: 4 vs. 2
  misc_feature: MA Experiment 108547 PARAMETER Experiment Name: Zm_Imbibed_Seeds_P Parameter: Organism Value: Zea mays
  misc_feature: MA Experiment 108547 PARAMETER Experiment Name: Zm_Imbibed_Seeds_P Parameter: Plant Line Value: 35A19
  misc_feature: MA Experiment 108547 PARAMETER Experiment Name: Zm_Imbibed_Seeds_P Parameter: Tissue Value: Aerial vs. Embryo
  misc_feature: MA Experiment ID: 108559 Result: Down-regulated in Transcription
  misc_feature: MA Experiment 108559 PARAMETER Experiment Name: Zm_5mM_NO_P Parameter: Age (day) Value: 8
  misc_feature: MA Experiment 108559 PARAMETER Experiment Name: Zm_5mM_NO_P Parameter: Organism Value: Zea mays
  misc_feature: MA Experiment 108559 PARAMETER Experiment Name: Zm_5mM_NO_P Parameter: Plant Line Value: 35A19
  misc_feature: MA Experiment 108559 PARAMETER Experiment Name: Zm_5mM_NO_P Parameter: Timepoint (hr) Value: 12
  misc_feature: MA Experiment 108559 PARAMETER Experiment Name: Zm_5mM_NO_P Parameter: Tissue Value: Aerial
  misc_feature: MA Experiment 108559 PARAMETER Experiment Name: Zm_5mM_NO_P Parameter: Treatment Value: 5mM NO vs. No Treatment
  misc_feature: MA Experiment ID: 108687 Result: Down-regulated in Transcription
  misc_feature: MA Experiment 108687 PARAMETER Experiment Name: Zm_Embryos-Flowers__P Parameter: Tissue Value: Embryo vs. Aerial+
  misc_feature: MA Experiment ID: 20000535 Result: Down-regulated in Transcription
  misc_feature: MA Experiment 20000535 PARAMETER Experiment Name: Zm_Hybrid_Seed_Dev_P Parameter: DAP Value: 30 vs. 12
  misc_feature: MA Experiment 20000535 PARAMETER Experiment Name: Zm_Hybrid_Seed_Dev_P Parameter: Organism Value: Zea mays
  misc_feature: MA Experiment 20000535 PARAMETER Experiment Name: Zm_Hybrid_Seed_Dev_P Parameter: Plant Line Value: 35A19
  misc_feature: MA Experiment 20000535 PARAMETER Experiment Name: Zm_Hybrid_Seed_Dev_P Parameter: Tissue Value: Embryo vs. Unfert Floret
acaagcaagtggccacctttgagtggatgttggaagaaatagcagccacaagcaagtagtcacctgtgtcatcttattccgatcctagcccctcccatctccaattcctcgcttcctcctcccttctctagttctctgatcctcagcacttagcatcaagcttagcacaccggcgagatggcctccacctccaccttcctgtccaccctcgccagcaggtccgcggcagccgatagcctgcgcagcgccgtgccgtccttcgccaagatcgtcaggttcttgcccgcgcaggcgcagatcagccgcaggcggcgcgcggcggtgctgcccacgccgagggcggcggtgtcgggcaccgagaaggcgccgtcgagcaagcacgagcgcgtggtcaggggtgcacagcacccaggagttcgacgacgcgctcaaggccgccaagaaccggctggtggtggtggagttcgcggcgagcgacagcgaggacagcagccagatctacccgaccatggtgcagctcagccgcacctgcggcgacgtggacttcctgctggtcctgcgcgacgacgagtcggaggccaccgaggagctgttccgccgggagggcgtcacgaaggtgcctcacttcaacttctacaagggcgccgagaaggtgcacgaggaggaggccatcggccccgagcggctcgcgggcgacgtcctctactacggcgacagccactcggcggtggtgcagctgcactcgcgggaggacgtggaggcgctcatcgacgagcaccgcggcgacaagggcaagctcgtcgtgctggacgtgggcctcaagcactgcgggccctgcgtcaaggtgtaccccaccgtgctgaagctgtcgcggtccatggtcgacaacaccgtcttcgcgcgcatgaacggcgacgagaacgacagctgcatggagttcctcagggccatgaagatcgtggaggtgcccactttcgtcttcatcagggacgtccagatcgtcggccgctacgtcggctccggcaagggggagctcgtcggtgagatcctccgatacaacggcgtcagggtcacctactgaagtgaagtagtgaacaacaaaccagtcagagtcagagcaagcaccagccgacaagcaacgcttcgatacaaaattgaagacgatacaaaattttagattactgcgacgtccatcgacgattggtcgatgtttagactgtttattgtgtaccattaccatacttgcccgttaatcgctactattcaatagtaatagtaggcttttgtagggctagcagctgcttgctgctttgcaactttaatcttgtttggtgatctatcaggttgattgtcc

SEQ ID NO: 11248 - protein, 288 aa, Zea mays subsp. mays
  peptide (1)..(288): Ceres Seq. ID no. 12351707
  misc_feature (12)..(288): Homolog of NCBI NO: 29828079 NR Description: putative oxidoreductase [Streptomyces avermitilis >gi|29605181|dbj|BAC69248.1| putative oxidoreductase
  misc_feature (40)..(267): Homolog of NCBI NO: 93505 NR Description: ORF5 protein - Orf virus (strain NZ2)
  misc_feature (44)..(288): Homolog of NCBI NO: 22957039 NR Description: hypothetical protein [Rhodobacter sphaeroides]
MASTSTFLSTLASRSAAADSLRSAVPSFAKIVRFLPAQAQISRRRRAAVLPTPRAAVSGTEKAPSSKHERVVRGAQHPGVRRRAQGRQEPAGGGGVRGERQRGQQPDLPDHGAAQPHLRRRGLPAGPARRRVGGHRGAVPPGGRHEGASLQLLQGRREGARGGGHRPRAARGRRPLLRRQPLGGGAAALAGGRGGAHRRAPRRQGQARRAGRGPQALRALRQGVPHRAEAVAVHGRQHRLRAHERRRERQLHGVPQGHEDRGGAHFRLHQGRPDRRPLRRLRQGGARR

SEQ ID NO: 11249 - protein, 190 aa, Zea mays subsp. mays
  peptide (1)..(190): Ceres Seq. ID no. 12351708
  misc_feature (1)..(189): Homolog of NCBI NO: 34901636 NR Description: putative plastid thioredoxin [Oryza sativa
  misc_feature (1)..(190): Homolog of NCBI NO: 7489278 NR Description: thioredoxin-like protein CDSP32, chloroplast -
  misc_feature (1)..(190): Homolog of NCBI NO: 21554102 NR Description: chloroplast drought-induced stress protein,
  misc_feature (1)..(190): Homolog of NCBI NO: 15222954 NR Description: chloroplast drought-induced stress protein, protein id: At1g76080.1, supported by cDNA: 20321. [Arabidopsis
MVQLSRTCGDVDFLLVLRDDESEATEELFRREGVTKVPHFNFYKGAEKVHEEEAIGPERLAGDVLYYGDSHSAVVQLHSREDVEALIDEHRGDKGKLVVLDVGLKHCGPCVKVYPTVLKLSRSMVDNTVFARMNGDENDSCMEFLRAMKIVEVPTFVFIRDVQIVGRYVGSGKGELVGEILRYNGVRVTY

SEQ ID NO: 11250 - DNA, 1310 bp, Zea mays subsp. mays
  misc_feature (1)..(1310): Ceres Seq. ID no. 12411905
  misc_feature: MA Experiment ID: 108535 Result: Down-regulated in Transcription
  misc_feature: MA Experiment 108535 PARAMETER Experiment Name: Zm_Meristem_P Parameter: Age (day) Value: 8
  misc_feature: MA Experiment 108535 PARAMETER Experiment Name: Zm_Meristem_P Parameter: Organism Value: Zea mays
  misc_feature: MA Experiment 108535 PARAMETER Experiment Name: Zm_Meristem_P Parameter: Plant Line Value: 35A19
  misc_feature: MA Experiment 108535 PARAMETER Experiment Name: Zm_Meristem_P Parameter: Tissue Value: Root Meristem vs. Above Root Meristem
  misc_feature: MA Experiment ID: 108543 Result: Up-regulated in Transcription
  misc_feature: MA Experiment ID: 108544 Result: Up-regulated in Transcription
  misc_feature: MA Experiment ID: 108545 Result: Down-regulated in Transcription
  misc_feature: MA Experiment 108545 PARAMETER Experiment Name: Zm_Imbibed_Seeds_P Parameter: Age (day) Value: 3 vs. 2
  misc_feature: MA Experiment 108545 PARAMETER Experiment Name: Zm_Imbibed_Seeds_P Parameter: Organism Value: Zea mays
  misc_feature: MA Experiment 108545 PARAMETER Experiment Name: Zm_Imbibed_Seeds_P Parameter: Plant Line Value: 35A19
  misc_feature: MA Experiment 108545 PARAMETER Experiment Name: Zm_Imbibed_Seeds_P Parameter: Tissue Value: Aerial vs. Embryo
  misc_feature: MA Experiment ID: 108556 Result: Down-regulated in Transcription
  misc_feature: MA Experiment 108556 PARAMETER Experiment Name: Zm_Drought_P Parameter: Age (day) Value: 9
  misc_feature: MA Experiment 108556 PARAMETER Experiment Name: Zm_Drought_P Parameter: Organism Value: Zea mays
  misc_feature: MA Experiment 108556 PARAMETER Experiment Name: Zm_Drought_P Parameter: Plant Line Value: 35A19
  misc_feature: MA Experiment 108556 PARAMETER Experiment Name: Zm_Drought_P Parameter: Timepoint (hr) Value: 24
  misc_feature: MA Experiment 108556 PARAMETER Experiment Name: Zm_Drought_P Parameter: Tissue Value: Aerial
  misc_feature: MA Experiment 108556 PARAMETER Experiment Name: Zm_Drought_P Parameter: Treatment Value: Drought vs. No Drought
  misc_feature: MA Experiment ID: 108559 Result: Down-regulated in Transcription
  misc_feature: MA Experiment 108559 PARAMETER Experiment Name: Zm_5mM_NO_P Parameter: Age (day) Value: 8
  misc_feature: MA Experiment 108559 PARAMETER Experiment Name: Zm_5mM_NO_P Parameter: Organism Value: Zea mays
  misc_feature: MA Experiment 108559 PARAMETER Experiment Name: Zm_5mM_NO_P Parameter: Plant Line Value: 35A19
  misc_feature: MA Experiment 108559 PARAMETER Experiment Name: Zm_5mM_NO_P Parameter: Timepoint (hr) Value: 12
  misc_feature: MA Experiment 108559 PARAMETER Experiment Name: Zm_5mM_NO_P Parameter: Tissue Value: Aerial
  misc_feature: MA Experiment 108559 PARAMETER Experiment Name: Zm_5mM_NO_P Parameter: Treatment Value: 5mM NO vs. No Treatment
  misc_feature: MA Experiment ID: 108687 Result: Down-regulated in Transcription
  misc_feature: MA Experiment 108687 PARAMETER Experiment Name: Zm_Embryos-Flowers__P Parameter: Tissue Value: Embryo vs. Aerial+
  misc_feature: MA Experiment ID: 108689 Result: Down-regulated in Transcription
  misc_feature: MA Experiment 108689 PARAMETER Experiment Name: Zm_Drought_Roots_P Parameter: Age (day) Value: 9
  misc_feature: MA Experiment 108689 PARAMETER Experiment Name: Zm_Drought_Roots_P Parameter: Organism Value: Zea mays
  misc_feature: MA Experiment 108689 PARAMETER Experiment Name: Zm_Drought_Roots_P Parameter: Plant Line Value: 35A19
  misc_feature: MA Experiment 108689 PARAMETER Experiment Name: Zm_Drought_Roots_P Parameter: Timepoint (hr) Value: 24
  misc_feature: MA Experiment 108689 PARAMETER Experiment Name: Zm_Drought_Roots_P Parameter: Tissue Value: Roots
  misc_feature: MA Experiment 108689 PARAMETER Experiment Name: Zm_Drought_Roots_P Parameter: Treatment Value: Drought vs. No Drought
  misc_feature: MA Experiment ID: 20000492 Result: Down-regulated in Transcription
  misc_feature: MA Experiment 20000492 PARAMETER Experiment Name: Zm_Hybrid_Seed_Dev_P Parameter: DAP Value: 12
  misc_feature: MA Experiment 20000492 PARAMETER Experiment Name: Zm_Hybrid_Seed_Dev_P Parameter: Organism Value: Zea mays
  misc_feature: MA Experiment 20000492 PARAMETER Experiment Name: Zm_Hybrid_Seed_Dev_P Parameter: Plant Line Value: 35A19
  misc_feature: MA Experiment 20000492 PARAMETER Experiment Name: Zm_Hybrid_Seed_Dev_P Parameter: Tissue Value: Fert Kernel vs. Unfert Floret
  misc_feature: MA Experiment ID: 20000535 Result: Down-regulated in Transcription
  misc_feature: MA Experiment 20000535 PARAMETER Experiment Name: Zm_Hybrid_Seed_Dev_P Parameter: DAP Value: 30 vs. 12
  misc_feature: MA Experiment 20000535 PARAMETER Experiment Name: Zm_Hybrid_Seed_Dev_P Parameter: Organism Value: Zea mays
  misc_feature: MA Experiment 20000535 PARAMETER Experiment Name: Zm_Hybrid_Seed_Dev_P Parameter: Plant Line Value: 35A19
  misc_feature: MA Experiment 20000535 PARAMETER Experiment Name: Zm_Hybrid_Seed_Dev_P Parameter: Tissue Value: Embryo vs. Unfert Floret
  misc_feature: MA Experiment ID: 20000626 Result: Up-regulated in Transcription
  misc_feature: MA Experiment 20000626 PARAMETER Experiment Name: Zm_Herbicide-Treatments_P Parameter: Timepoint (hr) Value: 12
  misc_feature: MA Experiment 20000626 PARAMETER Experiment Name: Zm_Herbicide-Treatments_P Parameter: Tissue Value: Aerial
  misc_feature: MA Experiment 20000626 PARAMETER Experiment Name: Zm_Herbicide-Treatments_P Parameter: Treatment Value: Roundup vs. No Treatment
aaaaacaccacacaacacaacacaataatacagcaaaggaggctagcagaagtgcaggattaataagctaagctagtagaaattaagcaaagcataggcacagccatggctacctcctctggttcttgccttattattagcctgttggtggtggtggtggcggcggcgctgtcggcctcaacggcgtcggcacagctgtcgtcgacgttctacgacacgtcgtgccccagcgcgatgtccaccatcagcagcggcgtgaactccgccgtggcgcagcaggctcgtgtgggggcgtcgctgctccggctccacttccacgactgcttcgtccaaggctgcgacgcgtccattctgctgaacgacacgtccggggagcagacccagccgccgaacctaactctgaacccgagggccttcgacgtcgtcaacagcatcaaggcgcaggtggaggcggcgtgcccgggcgtcgtctcctgcgccgacatcctcgccgtcgccgcccgcgacggagttgtcgcgctcggcgggccttcgtggaccgtgcttctgggcagaagggactcgaccggttcgttccctagccagacaagcgacctcccacctccgacgtcgagcctccaagcactgttagccgcgtacagcaagaagaacctcgacgcgaccgacatggtcgctctctcaggcgctcacacaatcgggcaggcccagtgctcgagcttcaacggccacatctacaacgacacgaacatcaacgcggccttcgcgacgtcgctcaaggccaactgccccatgtccggcggcagcagccctggcgccgctggacaccatgaccccgaccgtgttcgacaacgactactacaagaacctgctgtcgcagaaggggctgctgcactcggaccaggagctgttcaacaacggcagcaccgacagcacggtcagcaactttgcgtccagctcggccgccttcaccagcgccttcacggcggccatggtgaagatggggaacctcggcccgctcaccgggaccagtgggcagatcaggctcacctgctggaagctcaactcgtcctaataattaaggacggacgtccgatagacgatcctgcgcaatcgtatcgtacgtgcatgatacgcatacatctggaaactactataccaatgcaaacagagatctatacgtacgagtatgtataacgacgagtgatgtttgtatggatctacgtatgtaacaaggacctctcgtagcgcaaaggcgcgcgttgggagattaattaggtacacaagctattaccacattatatatcactcgc

SEQ ID NO: 11251 - protein, 362 aa, Zea mays subsp. mays
  peptide (1)..(362): Ceres Seq. ID no. 12411906
  misc_feature (47)..(234): Pfam Name: Peroxidase Pfam Description: Peroxidase
  misc_feature (6)..(234): Homolog of NCBI NO: 3411221 NR Description: peroxidase PXC2 precursor [Avena sativa]
  misc_feature (1)..(321): Homolog of NCBI NO: 15011986 NR Description: putative peroxidase P7X [Zea mays]
  misc_feature (6)..(234): Homolog of NCBI NO: 3411223 NR Description: peroxidase PXC6 precursor [Avena sativa]
  misc_feature (12)..(234): Homolog of NCBI NO: 2117618 NR Description: peroxidase (EC 1.11.1.7) 1 precursor - wheat
  misc_feature (6)..(234): Homolog of NCBI NO: 2117616 NR Description: peroxidase (EC 1.11.1.7) 2 precursor - wheat
  misc_feature (1)..(234): Homolog of NCBI NO: 730298 NR Description: Peroxidase precursor (WP2) >gi|82612|pir||S13325
  misc_feature (12)..(236): Homolog of NCBI NO: 2429290 NR Description: peroxidase [Oryza sativa]
  misc_feature (24)..(236): Homolog of NCBI NO: 520570 NR Description: peroxidase
  misc_feature (12)..(233): Homolog of NCBI NO: 34393250 NR Description: peroxidase [Oryza sativa (japonica
  misc_feature (12)..(233): Homolog of NCBI NO: 2429288 NR Description: peroxidase [Oryza sativa]
MATSSGSCLIISLLVVVVAAALSASTASAQLSSTFYDTSCPSAMSTISSGVNSAVAQQARVGASLLRLHFHDCFVQGCDASILLNDTSGEQTQPPNLTLNPRAFDVVNSIKAQVEAACPGVVSCADILAVAARDGVVALGGPSWTVLLGRRDSTGSFPSQTSDLPPPTSSLQALLAAYSKKNLDATDMVALSGAHTIGQAQCSSFNGHIYNDTNINAAFATSLKANCPMSGGSSPGAAGHHDPDRVRQRLLQEPAVAEGAAALGPGAVQQRQHRQHGQQLCVQLGRLHQRLHGGHGEDGEPRPAHRDQWADQAHLLEAQLVLIIKDGRPIDDPAQSYRTCMIRIHLETTIPMQTEIYTYEYV

SEQ ID NO: 11252 - protein, 319 aa, Zea mays subsp. mays
  peptide (1)..(319): Ceres Seq. ID no. 12411907
  misc_feature (4)..(191): Pfam Name: Peroxidase Pfam Description: Peroxidase
  misc_feature (1)..(191): Homolog of NCBI NO: 3411221 NR Description: peroxidase PXC2 precursor [Avena sativa]
  misc_feature (1)..(278): Homolog of NCBI NO: 15011986 NR Description: putative peroxidase P7X [Zea mays]
  misc_feature (1)..(191): Homolog of NCBI NO: 3411223 NR Description: peroxidase PXC6 precursor [Avena sativa]
  misc_feature (1)..(191): Homolog of NCBI NO: 2117618 NR Description: peroxidase (EC 1.11.1.7) 1 precursor - wheat
  misc_feature (1)..(191): Homolog of NCBI NO: 2117616 NR Description: peroxidase (EC 1.11.1.7) 2 precursor - wheat
  misc_feature (1)..(191): Homolog of NCBI NO: 730298 NR Description: Peroxidase precursor (WP2) >gi|82612|pir||S13325
  misc_feature (1)..(193): Homolog of NCBI NO: 2429290 NR Description: peroxidase [Oryza sativa]
  misc_feature (1)..(193): Homolog of NCBI NO: 520570 NR Description: peroxidase
  misc_feature (1)..(190): Homolog of NCBI NO: 34393250 NR Description: peroxidase [Oryza sativa (japonica
  misc_feature (1)..(190): Homolog of NCBI NO: 2429288 NR Description: peroxidase [Oryza sativa]
MSTISSGVNSAVAQQARVGASLLRLHFHDCFVQGCDASILLNDTSGEQTQPPNLTLNPRAFDVVNSIKAQVEAACPGVVSCADILAVAARDGVVALGGPSWTVLLGRRDSTGSFPSQTSDLPPPTSSLQALLAAYSKKNLDATDMVALSGAHTIGQAQCSSFNGHIYNDTNINAAFATSLKANCPMSGGSSPGAAGHHDPDRVRQRLLQEPAVAEGAAALGPGAVQQRQHRQHGQQLCVQLGRLHQRLHGGHGEDGEPRPAHRDQWADQAHLLEAQLVLIIKDGRPIDDPAQSYRTCMIRIHLETTIPMQTEIYTYEYV

SEQ ID NO: 11253 - DNA, 1475 bp, Zea mays subsp. mays
  misc_feature (1)..(1475): Ceres Seq. ID no. 12411901
  misc_feature: MA Experiment ID: 108523 Result: Down-regulated in Transcription
  misc_feature: MA Experiment 108523 PARAMETER Experiment Name: Zm_42deg_Heat_P Parameter: Age (day) Value: 8
  misc_feature: MA Experiment 108523 PARAMETER Experiment Name: Zm_42deg_Heat_P Parameter: Organism Value: Zea mays
  misc_feature: MA Experiment 108523 PARAMETER Experiment Name: Zm_42deg_Heat_P Parameter: Plant Line Value: 35A19
  misc_feature: MA Experiment 108523 PARAMETER Experiment Name: Zm_42deg_Heat_P Parameter: Temperature (deg C) Value: 42 vs. 22
  misc_feature: MA Experiment 108523 PARAMETER Experiment Name: Zm_42deg_Heat_P Parameter: Timepoint (hr) Value: 6
  misc_feature: MA Experiment 108523 PARAMETER Experiment Name: Zm_42deg_Heat_P Parameter: Tissue Value: Aerial
  misc_feature: MA Experiment ID: 108535 Result: Down-regulated in Transcription
  misc_feature: MA Experiment 108535 PARAMETER Experiment Name: Zm_Meristem_P Parameter: Age (day) Value: 8
  misc_feature: MA Experiment 108535 PARAMETER Experiment Name: Zm_Meristem_P Parameter: Organism Value: Zea mays
  misc_feature: MA Experiment 108535 PARAMETER Experiment Name: Zm_Meristem_P Parameter: Plant Line Value: 35A19
  misc_feature: MA Experiment 108535 PARAMETER Experiment Name: Zm_Meristem_P Parameter: Tissue Value: Root Meristem vs. Above Root Meristem
  misc_feature: MA Experiment ID: 108536 Result: Down-regulated in Transcription
  misc_feature: MA Experiment 108536 PARAMETER Experiment Name: Zm_Meristem_P Parameter: Age (day) Value: 8
  misc_feature: MA Experiment 108536 PARAMETER Experiment Name: Zm_Meristem_P Parameter: Organism Value: Zea mays
  misc_feature: MA Experiment 108536 PARAMETER Experiment Name: Zm_Meristem_P Parameter: Plant Line Value: 35A19
  misc_feature: MA Experiment 108536 PARAMETER Experiment Name: Zm_Meristem_P Parameter: Tissue Value: Shoot Meristem vs. Above Shoot Meristem
  misc_feature: MA Experiment ID: 108543 Result: Up-regulated in Transcription
  misc_feature: MA Experiment ID: 108687 Result: Down-regulated in Transcription
  misc_feature: MA Experiment 108687 PARAMETER Experiment Name: Zm_Embryos-Flowers__P Parameter: Tissue Value: Embryo vs. Aerial+
  misc_feature: MA Experiment ID: 108688 Result: Down-regulated in Transcription
  misc_feature: MA Experiment 108688 PARAMETER Experiment Name: Zm_Embryos-Flowers__P Parameter: Tissue Value: Immature Flowers vs. Aerial+
  misc_feature: MA Experiment ID: 20000492 Result: Down-regulated in Transcription
  misc_feature: MA Experiment 20000492 PARAMETER Experiment Name: Zm_Hybrid_Seed_Dev_P Parameter: DAP Value: 12
  misc_feature: MA Experiment 20000492 PARAMETER Experiment Name: Zm_Hybrid_Seed_Dev_P Parameter: Organism Value: Zea mays
  misc_feature: MA Experiment 20000492 PARAMETER Experiment Name: Zm_Hybrid_Seed_Dev_P Parameter: Plant Line Value: 35A19
  misc_feature: MA Experiment 20000492 PARAMETER Experiment Name: Zm_Hybrid_Seed_Dev_P Parameter: Tissue Value: Fert Kernel vs. Unfert Floret
  misc_feature: MA Experiment ID: 20000534 Result: Down-regulated in Transcription
  misc_feature: MA Experiment 20000534 PARAMETER Experiment Name: Zm_Hybrid_Pollen_P Parameter: Age (day) Value: 8
  misc_feature: MA Experiment 20000534 PARAMETER Experiment Name: Zm_Hybrid_Pollen_P Parameter: Organism Value: Zea mays
  misc_feature: MA Experiment 20000534 PARAMETER Experiment Name: Zm_Hybrid_Pollen_P Parameter: Plant Line Value: 35A19
  misc_feature: MA Experiment 20000534 PARAMETER Experiment Name: Zm_Hybrid_Pollen_P Parameter: Tissue Value: Pollen vs. Aerial
  misc_feature: MA Experiment ID: 20000535 Result: Down-regulated in Transcription
  misc_feature: MA Experiment 20000535 PARAMETER Experiment Name: Zm_Hybrid_Seed_Dev_P Parameter: DAP Value: 30 vs. 12
  misc_feature: MA Experiment 20000535 PARAMETER Experiment Name: Zm_Hybrid_Seed_Dev_P Parameter: Organism Value: Zea mays
  misc_feature: MA Experiment 20000535 PARAMETER Experiment Name: Zm_Hybrid_Seed_Dev_P Parameter: Plant Line Value: 35A19
  misc_feature: MA Experiment 20000535 PARAMETER Experiment Name: Zm_Hybrid_Seed_Dev_P Parameter: Tissue Value: Embryo vs. Unfert Floret
agcagcgtttcgagcgcgtgacgcgtgacctgaaggtgacgcgggtgttctcgacgctggtggaggagatgaaggcgatcggcatcatagcggcgggcggcggcggcggcgaggcgtcgcagtgcacggacgtgatggcccccgtggcgcactcggagcgcagcccggtgctgctgctgatgggcggcgggatgggcgccggcaagagcacggtgctcaaggagctcaagcaggaggcattctggaccaacgcggaggccaacgccgtggtggtggaggcggacgcgttcaaggaggcggacgtcatctaccgcgccatcagctccatgggccaccacaacgacatgctccagacggcagagctggtccaccagtcgtcgacggatgcggcgtcgtcgctgctggtgacggcgctgaacgaggggcgggacgtcatcctggacggcacgctgtcctgggagcccttcgtggagcagaccatcgccatggcgcgcgccgtgcaccgccagcgctaccgcatgggcgtcggctacaaggtggccgacgacggcaccgtcaccgagaactactgggagcccgcgagcgacgacgccaccgagcaacccccgcggaggccctaccgcatcgaggtggtcggggtcgtctgcgacgcctacctcgccgtggcgaggggcatccggagggccatcatcacccggcgggccgtcagggtcaggtcccagctgcagtcgcacaagcgcttcgccgccgcgttccagcggtacagccgcctcgtggacggcgccaggctctacagcaccaactccatgggctctgccaagctcatcgcgtggaaggacgggatcggaaacagcctgctggtggagccccgggagttcgactgcctggagaaggtgagcgggctcaacgagcacgccacctccgtccacgacctctaccccgacggcaccaccacctgcggctcgcgttccatctgggaggacatgatcgtctcccacggcccgtgccgacacccagcgcgagctcagggaggccatccgctccgtcgagtccggcggcggccaaccggacacaccaccaacaacgccccagcgcgagctcctgggcttcatccgctccctggaggccgccaacgccgagcaagctgcagcaggtcagacaccgacagctacctgttagtggtgaaaatatgggccggatttttttagctagagcacaaccaaaaaacaatagcccacaacatgatccggcacgaaataatatgaaccacggttcgaaggcggatctagaccggaccccaaattctagcccgttgagccccggtatagctcatacatatgggtcgggtttgagccgacacggtccaatgaatcctatattatttgatttctttaatttattaagctacggattttatattgttgtgatatttggactatatatggtcaaattatgatatgattgtttatctcttt

SEQ ID NO: 11254 - protein, 401 aa, Zea mays subsp. mays
  peptide (1)..(401): Ceres Seq. ID no. 12411902
  misc_feature (1)..(352): Homolog of NCBI NO: 99733 NR Description: hypothetical protein H1flk - Arabidopsis thaliana
  misc_feature (1)..(352): Homolog of NCBI NO: 15219698 NR Description: unknown protein; protein id: At1g04280.1
  misc_feature (2)..(361): Homolog of NCBI NO: 15222183 NR Description: unknown protein; protein id: At1g06750.1
  misc_feature (1)..(352): Homolog of NCBI NO: 15224537 NR Description: unknown protein; protein id: At2g30630.1
  misc_feature (1)..(352): Homolog of NCBI NO: 28207050 NR Description: hypothetical protein [Arabidopsis thaliana]
  misc_feature (1)..(352): Homolog of NCBI NO: 28207052 NR Description: hypothetical protein [Arabidopsis thaliana]
  misc_feature (72)..(348): Homolog of NCBI NO: 34909990 NR Description: P0490D09.19 [Oryza sativa (japonica
  misc_feature (87)..(361): Homolog of NCBI NO: 1076336 NR Description: hypothetical protein H1.1flk - Arabidopsis
  misc_feature (88)..(361): Homolog of NCBI NO: 388260 NR Description: H1-1flk [Arabidopsis thaliana]
  misc_feature (122)..(352): Homolog of NCBI NO: 99711 NR Description: hypothetical protein H1.2flk - Arabidopsis
QRFERVTRDLKVTRVFSTLVEEMKAIGIIAAGGGGGEASQCTDVMAPVAHSERSPVLLLMGGGMGAGKSTVLKELKQEAFWTNAEANAVVVEADAFKEADVIYRAISSMGHHNDMLQTAELVHQSSTDAASSLLVTALNEGRDVILDGTLSWEPFVEQTIAMARAVHRQRYRMGVGYKVADDGTVTENYWEPASDDATEQPPRRPYRIEVVGVVCDAYLAVARGIRRAIITRRAVRVRSQLQSHKRFAAAFQRYSRLVDGARLYSTNSMGSAKLIAWKDGIGNSLLVEPREFDCLEKVSGLNEHATSVHDLYPDGTTTCGSRSIWEDMIVSHGPCRHPARAQGGHPLRRVRRRPTGHTTNNAPARAPGLHPLPGGRQRRASCSRSDTDSYLLVVKIWAGFF

SEQ ID NO: 11255 - protein, 379 aa, Zea mays subsp. mays
  peptide (1)..(379): Ceres Seq. ID no. 12411903
  misc_feature (1)..(330): Homolog of NCBI NO: 99733 NR Description: hypothetical protein H1flk - Arabidopsis thaliana
  misc_feature (1)..(330): Homolog of NCBI NO: 15219698 NR Description: unknown protein; protein id: At1g04280.1
  misc_feature (1)..(339): Homolog of NCBI NO: 15222183 NR Description: unknown protein; protein id: At1g06750.1
  misc_feature (1)..(330): Homolog of NCBI NO: 15224537 NR Description: unknown protein; protein id: At2g30630.1
  misc_feature (1)..(330): Homolog of NCBI NO: 28207050 NR Description: hypothetical protein [Arabidopsis thaliana]
  misc_feature (1)..(330): Homolog of NCBI NO: 28207052 NR Description: hypothetical protein [Arabidopsis thaliana]
  misc_feature (50)..(326): Homolog of NCBI NO: 34909990 NR Description: P0490D09.19 [Oryza sativa (japonica
  misc_feature (65)..(339): Homolog of NCBI NO: 1076336 NR Description: hypothetical protein H1.1flk - Arabidopsis
  misc_feature (66)..(339): Homolog of NCBI NO: 388260 NR Description: H1-1flk [Arabidopsis thaliana]
  misc_feature (100)..(330): Homolog of NCBI NO: 99711 NR Description: hypothetical protein H1.2flk - Arabidopsis
MKAIGIIAAGGGGGEASQCTDVMAPVAHSERSPVLLLMGGGMGAGKSTVLKELKQEAFWTNAEANAVVVEADAFKEADVIYRAISSMGHHNDMLQTAELVHQSSTDAASSLLVTALNEGRDVILDGTLSWEPFVEQTIAMARAVHRQRYRMGVGYKVADDGTVTENYWEPASDDATEQPPRRPYRIEVVGVVCDAYLAVARGIRRAIITRRAVRVRSQLQSHKRFAAAFQRYSRLVDGARLYSTNSMGSAKLIAWKDGIGNSLLVEPREFDCLEKVSGLNEHATSVHDLYPDGTTTCGSRSIWEDMIVSHGPCRHPARAQGGHPLRRVRRRPTGHTTNNAPARAPGLHPLPGGRQRRASCSRSDTDSYLLVVKIWAGFF

SEQ ID NO: 11256 - protein, 357 aa, Zea mays subsp. mays
  peptide (1)..(357): Ceres Seq. ID no. 12411904
  misc_feature (1)..(308): Homolog of NCBI NO: 99733 NR Description: hypothetical protein H1flk - Arabidopsis thaliana
  misc_feature (1)..(308): Homolog of NCBI NO: 15219698 NR Description: unknown protein; protein id: At1g04280.1
  misc_feature (1)..(317): Homolog of NCBI NO: 15222183 NR Description: unknown protein; protein id: At1g06750.1
  misc_feature (1)..(308): Homolog of NCBI NO: 15224537 NR Description: unknown protein; protein id: At2g30630.1
  misc_feature (1)..(308): Homolog of NCBI NO: 28207050 NR Description: hypothetical protein [Arabidopsis thaliana]
  misc_feature (1)..(308): Homolog of NCBI NO: 28207052 NR Description: hypothetical protein [Arabidopsis thaliana]
  misc_feature (28)..(304): Homolog of NCBI NO: 34909990 NR Description: P0490D09.19 [Oryza sativa (japonica
  misc_feature (43)..(317): Homolog of NCBI NO: 1076336 NR Description: hypothetical protein H1.1flk - Arabidopsis
  misc_feature (44)..(317): Homolog of NCBI NO: 388260 NR Description: H1-1flk [Arabidopsis thaliana]
  misc_feature (78)..(308): Homolog of NCBI NO: 99711 NR Description: hypothetical protein H1.2flk - Arabidopsis
MAPVAHSERSPVLLLMGGGMGAGKSTVLKELKQEAFWTNAEANAVVVEADAFKEADVIYRAISSMGHHNDMLQTAELVHQSSTDAASSLLVTALNEGRDVILDGTLSWEPFVEQTIAMARAVHRQRYRMGVGYKVADDGTVTENYWEPASDDATEQPPRRPYRIEVVGVVCDAYLAVARGIRRAIITRRAVRVRSQLQSHKRFAAAFQRYSRLVDGARLYSTNSMGSAKLIAWKDGIGNSLLVEPREFDCLEKVSGLNEHATSVHDLYPDGTTTCGSRSIWEDMIVSHGPCRHPARAQGGHPLRRVRRRPTGHTTNNAPARAPGLHPLPGGRQRRASCSRSDTDSYLLVVKIWAGFF

SEQ ID NO: 11257 - DNA, 1676 bp, Zea mays subsp. mays
  misc_feature (1)..(1676): Ceres Seq. ID no. 12411898
  misc_feature: MA Experiment ID: 20000534 Result: Down-regulated in Transcription
  misc_feature: MA Experiment 20000534 PARAMETER Experiment Name: Zm_Hybrid_Pollen_P Parameter: Age (day) Value: 8
  misc_feature: MA Experiment 20000534 PARAMETER Experiment Name: Zm_Hybrid_Pollen_P Parameter: Organism Value: Zea mays
  misc_feature: MA Experiment 20000534 PARAMETER Experiment Name: Zm_Hybrid_Pollen_P Parameter: Plant Line Value: 35A19
  misc_feature: MA Experiment 20000534 PARAMETER Experiment Name: Zm_Hybrid_Pollen_P Parameter: Tissue Value: Pollen vs. Aerial
  misc_feature: MA Experiment ID: 20000535 Result: Down-regulated in Transcription
  misc_feature: MA Experiment 20000535 PARAMETER Experiment Name: Zm_Hybrid_Seed_Dev_P Parameter: DAP Value: 30 vs. 12
  misc_feature: MA Experiment 20000535 PARAMETER Experiment Name: Zm_Hybrid_Seed_Dev_P Parameter: Organism Value: Zea mays
  misc_feature: MA Experiment 20000535 PARAMETER Experiment Name: Zm_Hybrid_Seed_Dev_P Parameter: Plant Line Value: 35A19
  misc_feature: MA Experiment 20000535 PARAMETER Experiment Name: Zm_Hybrid_Seed_Dev_P Parameter: Tissue Value: Embryo vs. Unfert Floret
ctgttcttccacctgctggctgctcctgcctcccctgcgccccaaacccacccgcctcgccgtccccgcaggccgcagcctgctctcggctcccgccgccgtctaccgcgtcctgcggctgcggtgttgcgtcacctcgggttcgccttaacttccacaatcctcgccgtcctggtgctccgccgcccctccctttgtactcgcgctggagctgcagatccaccgcgacctggcgaccaattcctcctcccgctgaagaattggcgaccttggcctccgcccccgcggcgcggaggagtcaactgtggtagcaaccaccgcggaggctgcaagccttcggtaagggaggaaagttgacttgttggaagccggtccagggccgcgatgacgtcgaccgccgccggcgcgtcgtcgtcggcggcgaagagcgagtcctacctgcgggccgacaagatcgacctcgagagcctggacatccagctggagaagcagctggccaagacctgggagaagcacaaggggtcgtacaaccaggggcccagggaggactgggagatcgacctcgccaagctcgagattcgctacgtcatagcgcagggcacctacggcacggtgtatcgcggcacgtatgatgggcaggacgtcgcagtaaaactattggattggggtgaagatggctttgcgtcagaaactgaaactgccacactgcgagcatcatttaagcaggaggttgctgtctggcatgagctcaaccatccgaatgttacaaagtttgttggtgcatcaatgggtactacagaccttaagattccagccaatagttctaacagtggtgggcgcactgagctgccgccaagagcatgttgtgttgtggtcgaatatctcgctggaggatcactgaagcagtatttaataaagaacaggcgaaggaagcttgcatacaaggttgttgttcagatagcactggatcttgccagaggattgaactatctacattcaagaaagatagtacatcgggatgtaaaaactgaaaatatgctgctcgatacacagcgaaaccttaagattgctgattttggtgttgctcgtgttgaggctcagaatccaaaggacatgacaggcgcgactgggacacttggctacatggccccagaggtgcttgaaggcaagccatacaacagaaagtgtgatgtctacagttttggcatatgcttatgggaaatatactgctgtgacatgccatatccagacctcagttttgcagacgtctcgtccgccgtcgttcaccagaacctgcggcctgacatccctcgctgctgcccaagcccaatggcgaacatcatgcggaagtgctgggacgcaaacccggataagcgccctgacatggacgacgtggtgcggttcctggaggccctcgacacgagcaagggcggtggcatgataccagaaggccaggcaggcgggtgcttgtgtttcttcagagcccgtggtccttagaaccaaccaaccctttccagccatcctctacttgtctctgccctactacagtattggagccagatgtaggcctttgttgttcatcggataggggattgcagataacttgatgacaatctttgtgattggttgacacttgttatacgttctatagtgatgtgaataccagtgaggagtcc

SEQ ID NO: 11258 - protein, 370 aa, Zea mays subsp. mays
  peptide (1)..(370): Ceres Seq. ID no. 12411899
  misc_feature (7)..(370): Homolog of NCBI NO: 18403507 NR Description: expressed protein; protein id: At3g22750.1, by cDNA: gi_14334661, supported by cDNA: gi_17104596 [Arabidopsis
  misc_feature (16)..(370): Homolog of NCBI NO: 15233574 NR Description: kinase like protein; protein id: At4g14780.1
  misc_feature (53)..(370): Homolog of NCBI NO: 15232131 NR Description: putative protein kinase; protein id: At3g01490.1, by cDNA: gi_16323086 [Arabidopsis thaliana] putative protein kinase [Arabidopsis thaliana]
  misc_feature (18)..(51): Homolog of NCBI NO: 15232131 NR Description: putative protein kinase; protein id: At3g01490.1, by cDNA: gi_16323086 [Arabidopsis thaliana] putative protein kinase [Arabidopsis thaliana]
  misc_feature (7)..(370): Homolog of NCBI NO: 21554375 NR Description: ATMRK1 [Arabidopsis thaliana]
  misc_feature (44)..(370): Homolog of NCBI NO: 29367399 NR Description: putative protein kinase [Oryza sativa (japonica
  misc_feature (18)..(41): Homolog of NCBI NO: 29367399 NR Description: putative protein kinase [Oryza sativa (japonica
  misc_feature (7)..(370): Homolog of NCBI NO: 15229398 NR Description: ATMRK1; protein id: At3g63260.1, supported by
  misc_feature (42)..(370): Homolog of NCBI NO: 34911620 NR Description: protein kinase -like [Oryza sativa (japonica
  misc_feature (53)..(370): Homolog of NCBI NO: 15240597 NR Description: protein kinase; protein id: At5g50000.1, by cDNA: 142106. [Arabidopsis thaliana]
MTSTAAGASSSAAKSESYLRADKIDLESLDIQLEKQLAKTWEKHKGSYNQGPREDWEIDLAKLEIRYVIAQGTYGTVYRGTYDGQDVAVKLLDWGEDGFASETETATLRASFKQEVAVWHELNHPNVTKFVGASMGTTDLKIPANSSNSGGRTELPPRACCVVVEYLAGGSLKQYLIKNRRRKLAYKVVVQIALDLARGLNYLHSRKIVHRDVKTENMLLDTQRNLKIADFGVARVEAQNPKDMTGATGTLGYMAPEVLEGKPYNRKCDVYSFGICLWEIYCCDMPYPDLSFADVSSAVVHQNLRPDIPRCCPSPMANIMRKCWDANPDKRPDMDDVVRFLEALDTSKGGGMIPEGQAGGCLCFFRARGP

SEQ ID NO: 11259 - protein, 236 aa, Zea mays subsp. mays
  peptide (1)..(236): Ceres Seq. ID no. 12411900
  misc_feature (1)..(236): Homolog of NCBI NO: 18403507 NR Description: expressed protein; protein id: At3g22750.1, by cDNA: gi_14334661, supported by cDNA: gi_17104596 [Arabidopsis
  misc_feature (1)..(236): Homolog of NCBI NO: 15233574 NR Description: kinase like protein; protein id: At4g14780.1
  misc_feature (1)..(236): Homolog of NCBI NO: 15232131 NR Description: putative protein kinase; protein id: At3g01490.1, by cDNA: gi_16323086 [Arabidopsis thaliana] putative protein kinase [Arabidopsis thaliana]
  misc_feature (1)..(236): Homolog of NCBI NO: 21554375 NR Description: ATMRK1 [Arabidopsis thaliana]
  misc_feature (1)..(236): Homolog of NCBI NO: 29367399 NR Description: putative protein kinase [Oryza sativa (japonica
  misc_feature (1)..(236): Homolog of NCBI NO: 15229398 NR Description: ATMRK1; protein id: At3g63260.1, supported by
  misc_feature (1)..(236): Homolog of NCBI NO: 34911620 NR Description: protein kinase -like [Oryza sativa (japonica
  misc_feature (1)..(236): Homolog of NCBI NO: 15240597 NR Description: protein kinase; protein id: At5g50000.1, by cDNA: 142106. [Arabidopsis thaliana]
  misc_feature (1)..(236): Homolog of NCBI NO: 21553402 NR Description: protein kinase [Arabidopsis thaliana]
  misc_feature (1)..(235): Homolog of NCBI NO: 14626298 NR Description: putative protein kinase [Oryza sativa (japonica
MGTTDLKIPANSSNSGGRTELPPRACCVVVEYLAGGSLKQYLIKNRRRKLAYKVVVQIALDLARGLNYLHSRKIVHRDVKTENMLLDTQRNLKIADFGVARVEAQNPKDMTGATGTLGYMAPEVLEGKPYNRKCDVYSFGICLWEIYCCDMPYPDLSFADVSSAVVHQNLRPDIPRCCPSPMANIMRKCWDANPDKRPDMDDVVRFLEALDTSKGGGMIPEGQAGGCLCFFRARGP

SEQ ID NO: 11260 - DNA, 818 bp, Zea mays subsp. mays
  misc_feature (1)..(818): Ceres Seq. ID no. 12381267
  misc_feature: MA Experiment ID: 108515 Result: Up-regulated in Transcription
  misc_feature: MA Experiment 108515 PARAMETER Experiment Name: Zm_2mM_SA_P Parameter: Age (day) Value: 8
  misc_feature: MA Experiment 108515 PARAMETER Experiment Name: Zm_2mM_SA_P Parameter: Organism Value: Zea mays
  misc_feature: MA Experiment 108515 PARAMETER Experiment Name: Zm_2mM_SA_P Parameter: Plant Line Value: 35A19
  misc_feature: MA Experiment 108515 PARAMETER Experiment Name: Zm_2mM_SA_P Parameter: Timepoint (hr) Value: 12
  misc_feature: MA Experiment 108515 PARAMETER Experiment Name: Zm_2mM_SA_P Parameter: Tissue Value: Aerial
  misc_feature: MA Experiment 108515 PARAMETER Experiment Name: Zm_2mM_SA_P Parameter: Treatment Value: 2mM SA vs. No Treatment
  misc_feature: MA Experiment ID: 108528 Result: Down-regulated in Transcription
  misc_feature: MA Experiment 108528 PARAMETER Experiment Name: Zm_Imbibed_Seeds_P Parameter: Age (day) Value: 5 vs. 2
  misc_feature: MA Experiment 108528 PARAMETER Experiment Name: Zm_Imbibed_Seeds_P Parameter: Organism Value: Zea mays
  misc_feature: MA Experiment 108528 PARAMETER Experiment Name: Zm_Imbibed_Seeds_P Parameter: Plant Line Value: 35A19
  misc_feature: MA Experiment 108528 PARAMETER Experiment Name: Zm_Imbibed_Seeds_P Parameter: Tissue Value: Aerial vs. Embryo
  misc_feature: MA Experiment ID: 108530 Result: Down-regulated in Transcription
  misc_feature: MA Experiment 108530 PARAMETER Experiment Name: Zm_Imbibed_Seeds_P Parameter: Age (day) Value: 6 vs. 2
  misc_feature: MA Experiment 108530 PARAMETER Experiment Name: Zm_Imbibed_Seeds_P Parameter: Organism Value: Zea mays
  misc_feature: MA Experiment 108530 PARAMETER Experiment Name: Zm_Imbibed_Seeds_P Parameter: Plant Line Value: 35A19
  misc_feature: MA Experiment 108530 PARAMETER Experiment Name: Zm_Imbibed_Seeds_P Parameter: Tissue Value: Aerial vs. Embryo
  misc_feature: MA Experiment ID: 108535 Result: Down-regulated in Transcription
  misc_feature: MA Experiment 108535 PARAMETER Experiment Name: Zm_Meristem_P Parameter: Age (day) Value: 8
  misc_feature: MA Experiment 108535 PARAMETER Experiment Name: Zm_Meristem_P Parameter: Organism Value: Zea mays
  misc_feature: MA Experiment 108535 PARAMETER Experiment Name: Zm_Meristem_P Parameter: Plant Line Value: 35A19
  misc_feature: MA Experiment 108535 PARAMETER Experiment Name: Zm_Meristem_P Parameter: Tissue Value: Root Meristem vs. Above Root Meristem
  misc_feature: MA Experiment ID: 108543 Result: Up-regulated in Transcription
  misc_feature: MA Experiment ID: 108545 Result: Down-regulated in Transcription
  misc_feature: MA Experiment 108545 PARAMETER Experiment Name: Zm_Imbibed_Seeds_P Parameter: Age (day) Value: 3 vs. 2
  misc_feature: MA Experiment 108545 PARAMETER Experiment Name: Zm_Imbibed_Seeds_P Parameter: Organism Value: Zea mays
  misc_feature: MA Experiment 108545 PARAMETER Experiment Name: Zm_Imbibed_Seeds_P Parameter: Plant Line Value: 35A19
  misc_feature: MA Experiment 108545 PARAMETER Experiment Name: Zm_Imbibed_Seeds_P Parameter: Tissue Value: Aerial vs. Embryo
  misc_feature: MA Experiment ID: 108546 Result: Up-regulated in Transcription
  misc_feature: MA Experiment 108546 PARAMETER Experiment Name: Zm_Imbibed_Seeds_P Parameter: Age (day) Value: 3 vs. 2
  misc_feature: MA Experiment 108546 PARAMETER Experiment Name: Zm_Imbibed_Seeds_P Parameter: Organism Value: Zea mays
  misc_feature: MA Experiment 108546 PARAMETER Experiment Name: Zm_Imbibed_Seeds_P Parameter: Plant Line Value: 35A19
  misc_feature: MA Experiment 108546 PARAMETER Experiment Name: Zm_Imbibed_Seeds_P Parameter: Tissue Value: Roots vs. Embryo
  misc_feature: MA Experiment ID: 108547 Result: Down-regulated in Transcription
  misc_feature: MA Experiment 108547 PARAMETER Experiment Name: Zm_Imbibed_Seeds_P Parameter: Age (day) Value: 4 vs. 2
  misc_feature: MA Experiment 108547 PARAMETER Experiment Name: Zm_Imbibed_Seeds_P Parameter: Organism Value: Zea mays
  misc_feature: MA Experiment 108547 PARAMETER Experiment Name: Zm_Imbibed_Seeds_P Parameter: Plant Line Value: 35A19
  misc_feature: MA Experiment 108547 PARAMETER Experiment Name: Zm_Imbibed_Seeds_P Parameter: Tissue Value: Aerial vs. Embryo
  misc_feature: MA Experiment ID: 20000108 Result: Down-regulated in Transcription
  misc_feature: MA Experiment 20000108 PARAMETER Experiment Name: Zm_Root-Tips_P Parameter: Age (day) Value: 12
  misc_feature: MA Experiment 20000108 PARAMETER Experiment Name: Zm_Root-Tips_P Parameter: Organism Value: Zea mays
  misc_feature: MA Experiment 20000108 PARAMETER Experiment Name: Zm_Root-Tips_P Parameter: Tissue Value: Root tips vs. Root mid region    35
  misc_feature: MA Experiment 20000108 PARAMETER Experiment Name: Zm_Root-Tips_P Parameter: Tissue Value: Root tips vs. Root mid region   Sequence Listing-Misc Features (4)
ggactcacgaagcagcacactctgcactctcggcaacaactgacggccggaggaagaaggcgcagacgacaagcagaagcttgtgccatcgatcaatggcggcggtgacaaagatctacgtcgtgtactactcgacgtacggccacgtggcgaggctggcggaggagatcaagaagggcgccgactccgtggacggcgtcgaggcaaccatctggcaggtggcggagacgctgccggaggaggcgctggcgaagatgcgcgcgccggcgaggagcgaggagcacccggtgatctcgggcaagcagctggtggacgcggacggcatcctgttcggcttcccggcgcggttcggcatgatggcggcgcagatgaaggcgctgttcgactccacgggcggcctctggcagcggcaggcgctggcgggcaagcccgcggggttcttcttcgcgctgggcacccagggcggcgggcaggaggagacggcgctcacggccgtgtcgcagctcacgcaccacggcatggtgttcgtgcccgtgggctacacgttcggcgccggcatgttcgacatggacgaggtcaggtgctgcagcccgtacggggccggcacgttcgccggcgccgacgggaggagcaggctgcccagcgacgccgagctgcagatggccgcgcaccagggcagctatttcgccgccttcgccaagaagctcaaggcgggagcggccgtcgtggcctgagcctgcctgagtagtgctctctcctctctgcccatcgatgccagctgctcttgtctgcggaaataaaataaagctccattacgc

SEQ ID NO: 11261 - protein, 243 aa, Zea mays subsp. mays
  peptide (1)..(243): Ceres Seq. ID no. 12381268
  misc_feature (36)..(240): Homolog of NCBI NO: 12484052 NR Description: quinone-oxidoreductase QR2 [Triphysaria
  misc_feature (37)..(239): Homolog of NCBI NO: 34910128 NR Description: putative 1,4-benzoquinone reductase [Oryza sativa
  misc_feature (36)..(241): Homolog of NCBI NO: 5031275 NR Description: unknown [Prunus armeniaca]
  misc_feature (36)..(240): Homolog of NCBI NO: 15239652 NR Description: quinone reductase, putative; protein id:
  misc_feature (34)..(236): Homolog of NCBI NO: 21068664 NR Description: putative quinone oxidoreductase [Cicer arietinum]
  misc_feature (36)..(240): Homolog of NCBI NO: 30687535 NR Description: quinone reductase family [Arabidopsis thaliana]
  misc_feature (32)..(239): Homolog of NCBI NO: 38636776 NR Description: putative quinone-oxidoreductase QR2 [Oryza sativa
  misc_feature (37)..(237): Homolog of NCBI NO: 2564066 NR Description: LEDI-3 protein [Lithospermum erythrorhizon]
  misc_feature (10)..(235): Homolog of NCBI NO: 15234512 NR Description: quinone reductase family; protein id: supported by cDNA: 35084., supported by cDNA: gi_15529267
  misc_feature (12)..(235): Homolog of NCBI NO: 21593010 NR Description: minor allergen [Arabidopsis thaliana]
THEAAHSALSATTDGRRKKAQTTSRSLCHRSMAAVTKIYVVYYSTYGHVARLAEEIKKGADSVDGVEATIWQVAETLPEEALAKMRAPARSEEHPVISGKQLVDADGILFGFPARFGMMAAQMKALFDSTGGLWQRQALAGKPAGFFFALGTQGGGQEETALTAVSQLTHHGMVFVPVGYTFGAGMFDMDEVRCCSPYGAGTFAGADGRSRLPSDAELQMAAHQGSYFAAFAKKLKAGAAVVA

SEQ ID NO: 11262 - protein, 212 aa, Zea mays subsp. mays
  peptide (1)..(212): Ceres Seq. ID no. 12381269
  misc_feature (5)..(209): Homolog of NCBI NO: 12484052 NR Description: quinone-oxidoreductase QR2 [Triphysaria
  misc_feature (6)..(208): Homolog of NCBI NO: 34910128 NR Description: putative 1,4-benzoquinone reductase [Oryza sativa
  misc_feature (5)..(210): Homolog of NCBI NO: 5031275 NR Description: unknown [Prunus armeniaca]
  misc_feature (5)..(209): Homolog of NCBI NO: 15239652 NR Description: quinone reductase, putative; protein id:
  misc_feature (3)..(205): Homolog of NCBI NO: 21068664 NR Description: putative quinone oxidoreductase [Cicer arietinum]
  misc_feature (5)..(209): Homolog of NCBI NO: 30687535 NR Description: quinone reductase family [Arabidopsis thaliana]
  misc_feature (1)..(208): Homolog of NCBI NO: 38636776 NR Description: putative quinone-oxidoreductase QR2 [Oryza sativa
  misc_feature (6)..(206): Homolog of NCBI NO: 2564066 NR Description: LEDI-3 protein [Lithospermum erythrorhizon]
  misc_feature (1)..(204): Homolog of NCBI NO: 15234512 NR Description: quinone reductase family; protein id: supported by cDNA: 35084., supported by cDNA: gi_15529267
  misc_feature (1)..(204): Homolog of NCBI NO: 21593010 NR Description: minor allergen [Arabidopsis thaliana]
MAAVTKIYVVYYSTYGHVARLAEEIKKGADSVDGVEATIWQVAETLPEEALAKMRAPARSEEHPVISGKQLVDADGILFGFPARFGMMAAQMKALFDSTGGLWQRQALAGKPAGFFFALGTQGGGQEETALTAVSQLTHHGMVFVPVGYTFGAGMFDMDEVRCCSPYGAGTFAGADGRSRLPSDAELQMAAHQGSYFAAFAKKLKAGAAVVA

SEQ ID NO: 11263 - protein, 159 aa, Zea mays subsp. mays
  peptide (1)..(159): Ceres Seq. ID no. 12381270
  misc_feature (1)..(156): Homolog of NCBI NO: 12484052 NR Description: quinone-oxidoreductase QR2 [Triphysaria
  misc_feature (1)..(155): Homolog of NCBI NO: 34910128 NR Description: putative 1,4-benzoquinone reductase [Oryza sativa
  misc_feature (1)..(157): Homolog of NCBI NO: 5031275 NR Description: unknown [Prunus armeniaca]
  misc_feature (1)..(156): Homolog of NCBI NO: 15239652 NR Description: quinone reductase, putative; protein id:
  misc_feature (1)..(152): Homolog of NCBI NO: 21068664 NR Description: putative quinone oxidoreductase [Cicer arietinum]
  misc_feature (1)..(156): Homolog of NCBI NO: 30687535 NR Description: quinone reductase family [Arabidopsis thaliana]
  misc_feature (1)..(155): Homolog of NCBI NO: 38636776 NR Description: putative quinone-oxidoreductase QR2 [Oryza sativa
  misc_feature (1)..(153): Homolog of NCBI NO: 2564066 NR Description: LEDI-3 protein [Lithospermum erythrorhizon]
  misc_feature (1)..(151): Homolog of NCBI NO: 15234512 NR Description: quinone reductase family; protein id: supported by cDNA: 35084., supported by cDNA: gi_15529267
  misc_feature (1)..(151): Homolog of NCBI NO: 21593010 NR Description: minor allergen [Arabidopsis thaliana]
MRAPARSEEHPVISGKQLVDADGILFGFPARFGMMAAQMKALFDSTGGLWQRQALAGKPAGFFFALGTQGGGQEETALTAVSQLTHHGMVFVPVGYTFGAGMFDMDEVRCCSPYGAGTFAGADGRSRLPSDAELQMAAHQGSYFAAFAKKLKAGAAVVA

SEQ ID NO: 11264 - DNA, 1175 bp, Zea mays subsp. mays
  misc_feature (1)..(1175): Ceres Seq. ID no. 12359591
  misc_feature: MA Experiment ID: 108504 Result: Down-regulated in Transcription
  misc_feature: MA Experiment 108504 PARAMETER Experiment Name: Zm_Drought_P Parameter: Age (day) Value: 8
  misc_feature: MA Experiment 108504 PARAMETER Experiment Name: Zm_Drought_P Parameter: Organism Value: Zea mays
  misc_feature: MA Experiment 108504 PARAMETER Experiment Name: Zm_Drought_P Parameter: Plant Line Value: 35A19
  misc_feature: MA Experiment 108504 PARAMETER Experiment Name: Zm_Drought_P Parameter: Timepoint (hr) Value: 12
  misc_feature: MA Experiment 108504 PARAMETER Experiment Name: Zm_Drought_P Parameter: Tissue Value: Aerial
  misc_feature: MA Experiment 108504 PARAMETER Experiment Name: Zm_Drought_P Parameter: Treatment Value: Drought vs. No Drought
  misc_feature: MA Experiment ID: 108522 Result: Down-regulated in Transcription
  misc_feature: MA Experiment 108522 PARAMETER Experiment Name: Zm_42deg_Heat_P Parameter: Age (day) Value: 8
  misc_feature: MA Experiment 108522 PARAMETER Experiment Name: Zm_42deg_Heat_P Parameter: Organism Value: Zea mays
  misc_feature: MA Experiment 108522 PARAMETER Experiment Name: Zm_42deg_Heat_P Parameter: Plant Line Value: 35A19
  misc_feature: MA Experiment 108522 PARAMETER Experiment Name: Zm_42deg_Heat_P Parameter: Temperature (deg C) Value: 42 vs. 22
  misc_feature: MA Experiment 108522 PARAMETER Experiment Name: Zm_42deg_Heat_P Parameter: Timepoint (hr) Value: 1
  misc_feature: MA Experiment 108522 PARAMETER Experiment Name: Zm_42deg_Heat_P Parameter: Tissue Value: Aerial
  misc_feature: MA Experiment ID: 108534 Result: Up-regulated in Transcription
  misc_feature: MA Experiment 108534 PARAMETER Experiment Name: Zm_4deg_Cold_P Parameter: Age (hr) Value: 8
  misc_feature: MA Experiment 108534 PARAMETER Experiment Name: Zm_4deg_Cold_P Parameter: Organism Value: Zea mays
  misc_feature: MA Experiment 108534 PARAMETER Experiment Name: Zm_4deg_Cold_P Parameter: Plant Line Value: 35A19
  misc_feature: MA Experiment 108534 PARAMETER Experiment Name: Zm_4deg_Cold_P Parameter: Temperature (deg C) Value: 4 vs. 22
  misc_feature: MA Experiment 108534 PARAMETER Experiment Name: Zm_4deg_Cold_P Parameter: Timepoint (hr) Value: 6
  misc_feature: MA Experiment 108534 PARAMETER Experiment Name: Zm_4deg_Cold_P Parameter: Tissue Value: Aerial
taatcgaaaatcacactgtggcaactacggccacaactccaggacctgcgggagagaaaccatgctctgcgaagctggccgacaacggcggccatggcggcctaaggctcttcggagtgcaggtccgtatcggcggcggcggcgcaggctcggcgtccatgaagaagagctacagcatggactgcctgcagctcgcggctcctggttgttccctcgtctcgccgtcgacgtcctcctcgttgtcgtcgctgctgctgatgtcgattgaggagggatcggagaggggggcgccaaatgggtacctttctgacggacctcatggcagagctgtgcaggagaggaaaaaaggagttccatgaagcgaggaggagcacaggcagttcctttccggcctggagaagctgggcaagggcgactggcgaggcatctccaggagctacgtgccgacgaggaccccgacgcaggtcgccagccatgcacagaagttcttcctcaggcagagcagcttggggaagaagaagcgccgctccagcctctttgacatggtgccgatttgcgagaacagtgcgagcatctccgatccgctgggcagcgaaggggcctcaacctctctgtcgctgaacgtgccacgccacggcgtcacctccgtctccgagggggcggccttggacctgaattcgacggaggaagacgacagcagggcggacgcgtcgtcggcatcggcatcaggtgcagggaccagaccaccgttcccggcagcgcagacggagccgctgctgcagccttcgtcgcttggccatgggcgcggtcaccactgctctcctttggacctggagctggccatgtcgctgcctgccccatccatcggaacatgacgcgccgccgccgccgtacttatcgccatggaatcccacgcaggtcgcgccataattcgtcagcgcaggttgccaaggccgaggccgtgcgtgcctcgcacaaacgtctcacgtgtaatcagaatcgggttcctgagtatgactatgccatgttccaggttacgctagttgctagctagcttttttttttaagctctgttaatgatattgttacgaaaaatagattctaacataggttcactgttatatatgttatgtagaccatatatttactttgatattaaatttgttttttatggc

SEQ ID NO: 11265 - protein, 118 aa, Zea mays subsp. mays
  peptide (1)..(118): Ceres Seq. ID no. 12359592
  misc_feature (9)..(118): Homolog of NCBI NO: 34912404 NR Description: putative Myb-related transcription factor [Oryza
  misc_feature (25)..(118): Homolog of NCBI NO: 12406995 NR Description: MCB2 protein [Hordeum vulgare subsp. vulgare]
  misc_feature (29)..(118): Homolog of NCBI NO: 34906444 NR Description: P0671B11.14 [Oryza sativa (japonica
  misc_feature (67)..(118): Homolog of NCBI NO: 15241963 NR Description: putative protein; protein id: At5g56840.1
  misc_feature (19)..(118): Homolog of NCBI NO: 34906364 NR Description: unnamed protein product [Oryza sativa (japonica group)] >gi|9558504|dbj|BAB03423.1| unnamed protein product
  misc_feature (33)..(118): Homolog of NCBI NO: 24850307 NR Description: transcription factor MYBS3 [Oryza sativa
  misc_feature (28)..(118): Homolog of NCBI NO: 2062176 NR Description: Myb-related transcription activator (MybSt1)
  misc_feature (28)..(118): Homolog of NCBI NO: 15228185 NR Description: putative MYB family transcription factor; protein At3g16350.1 [Arabidopsis thaliana] >gi|29028776|gb|AAO64767.1|
  misc_feature (33)..(118): Homolog of NCBI NO: 37536856 NR Description: putative Myb-related protein [Oryza sativa
  misc_feature (35)..(118): Homolog of NCBI NO: 37536868 NR Description: putative Myb-related protein [Oryza sativa
IENHTVATTATTPGPAGEKPCSAKLADNGGHGGLRLFGVQVRIGGGGAGSASMKKSYSMDCLQLAAPGCSLVSPSTSSSLSSLLLMSIEEGSERGAPNGYLSDGPHGRAVQERKKGVP

SEQ ID NO: 11266 - protein, 110 aa, Zea mays subsp. mays
  peptide (1)..(110): Ceres Seq. ID no. 12359593
  misc_feature (1)..(110): Homolog of NCBI NO: 34912404 NR Description: putative Myb-related transcription factor [Oryza
  misc_feature (1)..(110): Homolog of NCBI NO: 12406995 NR Description: MCB2 protein [Hordeum vulgare subsp. vulgare]
  misc_feature (1)..(17): Homolog of NCBI NO: 15241963 NR Description: putative protein; protein id: At5g56840.1
  misc_feature (1)..(80): Homolog of NCBI NO: 24850307 NR Description: transcription factor MYBS3 [Oryza sativa
  misc_feature (1)..(110): Homolog of NCBI NO: 2062176 NR Description: Myb-related transcription activator (MybSt1)
  misc_feature (1)..(110): Homolog of NCBI NO: 15228185 NR Description: putative MYB family transcription factor; protein At3g16350.1 [Arabidopsis thaliana] >gi|29028776|gb|AAO64767.1|
  misc_feature (1)..(80): Homolog of NCBI NO: 37536856 NR Description: putative Myb-related protein [Oryza sativa
  misc_feature (1)..(28): Homolog of NCBI NO: 28812130 NR Description: P0443G08.23 [Oryza sativa (japonica
  misc_feature (1)..(83): Homolog of NCBI NO: 15238083 NR Description: Myb-related transcription activator-like; protein At5g47390.1, supported by cDNA: 102806., supported by cDNA:
  misc_feature (1)..(48): Homolog of NCBI NO: 7705206 NR Description: MybSt1 [Solanum tuberosum]
MVPICENSASISDPLGSEGASTSLSLNVPRHGVTSVSEGAALDLNSTEEDDSRADASSASASGAGTRPPFPAAQTEPLLQPSSLGHGRGHHCSPLDLELAMSLPAPSIGT

SEQ ID NO: 11267 - protein, 108 aa, Zea mays subsp. mays
  peptide (1)..(108): Ceres Seq. ID no. 12359594
MGTFLTDLMAELCRRGKKEFHEARRSTGSSFPAWRSWARATGEASPGATCRRGPRRRSPAMHRSSSSGRAAWGRRSAAPASLTWCRFARTVRASPIRWAAKGPQPLCR

SEQ ID NO: 11268 - protein, 66 aa, Zea mays subsp. mays
  peptide (1)..(66): Ceres Seq. ID no. 12359595
  misc_feature (1)..(66): Homolog of NCBI NO: 34912404 NR Description: putative Myb-related transcription factor [Oryza
  misc_feature (1)..(66): Homolog of NCBI NO: 12406995 NR Description: MCB2 protein [Hordeum vulgare subsp. vulgare]
  misc_feature (1)..(66): Homolog of NCBI NO: 34906444 NR Description: P0671B11.14 [Oryza sativa (japonica
  misc_feature (15)..(66): Homolog of NCBI NO: 15241963 NR Description: putative protein; protein id: At5g56840.1
  misc_feature (1)..(66): Homolog of NCBI NO: 34906364 NR Description: unnamed protein product [Oryza sativa (japonica group)] >gi|9558504|dbj|BAB03423.1| unnamed protein product
  misc_feature (1)..(66): Homolog of NCBI NO: 24850307 NR Description: transcription factor MYBS3 [Oryza sativa
  misc_feature (1)..(66): Homolog of NCBI NO: 2062176 NR Description: Myb-related transcription activator (MybSt1)
  misc_feature (1)..(66): Homolog of NCBI NO: 15228185 NR Description: putative MYB family transcription factor; protein At3g16350.1 [Arabidopsis thaliana] >gi|29028776|gb|AAO64767.1|
  misc_feature (1)..(66): Homolog of NCBI NO: 37536856 NR Description: putative Myb-related protein [Oryza sativa
  misc_feature (1)..(66): Homolog of NCBI NO: 37536868 NR Description: putative Myb-related protein [Oryza sativa
MKKSYSMDCLQLAAPGCSLVSPSTSSSLSSLLLMSIEEGSERGAPNGYLSDGPHGRAVQERKKGVP

SEQ ID NO: 11269 - DNA, 1413 bp, Zea mays subsp. mays
  misc_feature (1)..(1413): Ceres Seq. ID no. 12341043
  misc_feature: MA Experiment ID: 20000492 Result: Up-regulated in Transcription
  misc_feature: MA Experiment 20000492 PARAMETER Experiment Name: Zm_Hybrid_Seed_Dev_P Parameter: DAP Value: 12
  misc_feature: MA Experiment 20000492 PARAMETER Experiment Name: Zm_Hybrid_Seed_Dev_P Parameter: Organism Value: Zea mays
  misc_feature: MA Experiment 20000492 PARAMETER Experiment Name: Zm_Hybrid_Seed_Dev_P Parameter: Plant Line Value: 35A19
  misc_feature: MA Experiment 20000492 PARAMETER Experiment Name: Zm_Hybrid_Seed_Dev_P Parameter: Tissue Value: Fert Kernel vs. Unfert Floret
aagcatttaggtcttacgacgcgcccaaagctcacgccggacctgctcctctccgacggcggcatcggcttcgtgctccgctactttcccaaggcgttcaagccccgcccccgcccaggccacgaggtggacgacctcgccaacctcatcaagctctacgcggactggcactcccgcctgatcccctactactccttcgaacagttcgtgcgcaaactcgagaaattgggtgccggcaaccgcgtcagggacgatggtgggcctctctgaaggggagaaacacttcatccgcggcggcattgcacaagaccttcgcactgatggacgtaggcggctgcagttccggtccctctccgtccaaaccggagtcattccacaggccgaatggctcagcgcgtgttaggttgggggccactgatataatcgctagtgtcaaggctgaactaggaaaaccaagcattcttcaccctgacaaaggaaaagttgccatttttgtcgactgtagtccaaccgctgagcctctgtttgagggtagaggctctgaagaattgtctgctgagctctctgtttccctgcaaagatgcttgttgggtggtaaaagtggtgctggtgctgcaattgatctgtcatccctaattgttgttgatggaaaggtctgctgggatctgtacattgatgggcttgtggtcagttctgatggtaatttgctagatgcgctagctgttgcgataaaggttgctttgagtgatacaggtataccaaaagttaatgtttctgttagtgctgcatctgatgaggaacctgaagttgatgtaagtgatgaggaatttctgcagtttgacacatccggtgtgcctgttattattacattaaccaaggtgggtcggcactacatcgttgatgccacctcagaggaagaatcccagatgagttctgcagtgtcggtgtcagtcaacaggcatggccagatatgcgggcttaccaagaggggaggggcagggctggatccaagcgtcatcttcgacatgatatctgtcgccaagcatgtgagccagcagttcatctccctcttggattcagagattgccgccgccgaagctgaagaagaggctcagtgattgatgaaaaggaaaaaggactggttgcgtaaatgctcgtgtgttccaacttcaaccaaatgctgtagaaatcttcaggaatttggttccatttttatgttattattagtagtagtaaacaccgaggatttggatcctgggaacgaacgacgtcgtgttggctttggctgggctcagaggaacgaatactgaatcttgggtctgatgatctgatcctcttgtgcccccaatccgatgataaatttggcccctctcataccaaaccaaacactatggatttcctccgtccgttttc

SEQ ID NO: 11270 - protein, 371 aa, Zea mays subsp. mays
  peptide (1)..(371): Ceres Seq. ID no. 12341044
  misc_feature (128)..(253): Pfam Name: 3' exoribonuclease family, domain 1 Pfam Description: 3' exoribonuclease family, domain 1
  misc_feature (128)..(370): Homolog of NCBI NO: 18398046 NR Description: putative 3 exoribonuclease; protein id: supported by cDNA: gi_13358209 [Arabidopsis thaliana] AT3g07750 [Arabidopsis thaliana] >gi|26453010|dbj|BAC43581.1|
  misc_feature (128)..(370): Homolog of NCBI NO: 6648187 NR Description: putative 3' exoribonuclease [Arabidopsis thaliana]
  misc_feature (128)..(370): Homolog of NCBI NO: 6466958 NR Description: hypothetical protein [Arabidopsis thaliana]
  misc_feature (128)..(351): Homolog of NCBI NO: 30962875 NR Description: Similar to Exosome complex exonuclease RRP42 [Mus
  misc_feature (128)..(366): Homolog of NCBI NO: 473949 NR Description: KIAA0116 [Homo sapiens]
  misc_feature (128)..(366): Homolog of NCBI NO: 24307981 NR Description: KIAA0116 protein [Homo sapiens] Exosome complex exonuclease RRP42 (Ribosomal RNA processing
  misc_feature (128)..(366): Homolog of NCBI NO: 34866707 NR Description: similar to Exosome complex exonuclease RRP42
  misc_feature (128)..(351): Homolog of NCBI NO: 28548933 NR Description: RIKEN cDNA 2610002K22 [Mus musculus]
  misc_feature (128)..(351): Homolog of NCBI NO: 21362905 NR Description: Exosome complex exonuclease RRP42 (Ribosomal RNA
  misc_feature (128)..(360): Homolog of NCBI NO: 28573444 NR Description: CG8395-PA [Drosophila melanogaster]
AFRSYDAPKAHAGPAPLRRRHRLRAPLLSQGVQAPPPPRPRGGRPRQPHQALRGLALPPDPLLLLRTVRAQTREIGCRQPRQGRWWASLKGRNTSSAAALHKTFALMDVGGCSSGPSPSKPESFHRPNGSARVRLGATDIIASVKAELGKPSILHPDKGKVAIFVDCSPTAEPLFEGRGSEELSAELSVSLQRCLLGGKSGAGAAIDLSSLIVVDGKVCWDLYIDGLVVSSDGNLLDALAVAIKVALSDTGIPKVNVSVSAASDEEPEVDVSDEEFLQFDTSGVPVIITLTKVGRHYIVDATSEEESQMSSAVSVSVNRHGQICGLTKRGGAGLDPSVIFDMISVAKHVSQQFISLLDSEIAAAEAEEEAQ

SEQ ID NO: 11271 - protein, 265 aa, Zea mays subsp. mays
  peptide (1)..(265): Ceres Seq. ID no. 12341045
  misc_feature (22)..(147): Pfam Name: 3' exoribonuclease family, domain 1 Pfam Description: 3' exoribonuclease family, domain 1
  misc_feature (22)..(264): Homolog of NCBI NO: 18398046 NR Description: putative 3 exoribonuclease; protein id: supported by cDNA: gi_13358209 [Arabidopsis thaliana] AT3g07750 [Arabidopsis thaliana] >gi|26453010|dbj|BAC43581.1|
  misc_feature (22)..(264): Homolog of NCBI NO: 6648187 NR Description: putative 3' exoribonuclease [Arabidopsis thaliana]
  misc_feature (22)..(264): Homolog of NCBI NO: 6466958 NR Description: hypothetical protein [Arabidopsis thaliana]
  misc_feature (22)..(245): Homolog of NCBI NO: 30962875 NR Description: Similar to Exosome complex exonuclease RRP42 [Mus
  misc_feature (22)..(260): Homolog of NCBI NO: 473949 NR Description: KIAA0116 [Homo sapiens]
  misc_feature (22)..(260): Homolog of NCBI NO: 24307981 NR Description: KIAA0116 protein [Homo sapiens] Exosome complex exonuclease RRP42 (Ribosomal RNA processing
  misc_feature (22)..(260): Homolog of NCBI NO: 34866707 NR Description: similar to Exosome complex exonuclease RRP42
  misc_feature (22)..(245): Homolog of NCBI NO: 28548933 NR Description: RIKEN cDNA 2610002K22 [Mus musculus]
  misc_feature (22)..(245): Homolog of NCBI NO: 21362905 NR Description: Exosome complex exonuclease RRP42 (Ribosomal RNA
  misc_feature (22)..(254): Homolog of NCBI NO: 28573444 NR Description: CG8395-PA [Drosophila melanogaster]
MDVGGCSSGPSPSKPESFHRPNGSARVRLGATDIIASVKAELGKPSILHPDKGKVAIFVDCSPTAEPLFEGRGSEELSAELSVSLQRCLLGGKSGAGAAIDLSSLIVVDGKVCWDLYIDGLVVSSDGNLLDALAVAIKVALSDTGIPKVNVSVSAASDEEPEVDVSDEEFLQFDTSGVPVIITLTKVGRHYIVDATSEEESQMSSAVSVSVNRHGQICGLTKRGGAGLDPSVIFDMISVAKHVSQQFISLLDSEIAAAEAEEEAQ

SEQ ID NO: 11272 - DNA, 1710 bp, Zea mays subsp. mays
  misc_feature (1)..(1710): Ceres Seq. ID no. 12374127
  misc_feature: MA Experiment ID: 108529 Result: Down-regulated in Transcription
  misc_feature: MA Experiment 108529 PARAMETER Experiment Name: Zm_Imbibed_Seeds_P Parameter: Age (day) Value: 5 vs. 2
  misc_feature: MA Experiment 108529 PARAMETER Experiment Name: Zm_Imbibed_Seeds_P Parameter: Organism Value: Zea mays
  misc_feature: MA Experiment 108529 PARAMETER Experiment Name: Zm_Imbibed_Seeds_P Parameter: Plant Line Value: 35A19
  misc_feature: MA Experiment 108529 PARAMETER Experiment Name: Zm_Imbibed_Seeds_P Parameter: Tissue Value: Roots vs. Embryo
  misc_feature: MA Experiment ID: 108535 Result: Up-regulated in Transcription
  misc_feature: MA Experiment 108535 PARAMETER Experiment Name: Zm_Meristem_P Parameter: Age (day) Value: 8
  misc_feature: MA Experiment 108535 PARAMETER Experiment Name: Zm_Meristem_P Parameter: Organism Value: Zea mays
  misc_feature: MA Experiment 108535 PARAMETER Experiment Name: Zm_Meristem_P Parameter: Plant Line Value: 35A19
  misc_feature: MA Experiment 108535 PARAMETER Experiment Name: Zm_Meristem_P Parameter: Tissue Value: Root Meristem vs. Above Root Meristem
  misc_feature: MA Experiment ID: 108543 Result: Down-regulated in Transcription
  misc_feature: MA Experiment ID: 108546 Result: Down-regulated in Transcription
  misc_feature: MA Experiment 108546 PARAMETER Experiment Name: Zm_Imbibed_Seeds_P Parameter: Age (day) Value: 3 vs. 2
  misc_feature: MA Experiment 108546 PARAMETER Experiment Name: Zm_Imbibed_Seeds_P Parameter: Organism Value: Zea mays
  misc_feature: MA Experiment 108546 PARAMETER Experiment Name: Zm_Imbibed_Seeds_P Parameter: Plant Line Value: 35A19
  misc_feature: MA Experiment 108546 PARAMETER Experiment Name: Zm_Imbibed_Seeds_P Parameter: Tissue Value: Roots vs. Embryo
  misc_feature: MA Experiment ID: 108559 Result: Down-regulated in Transcription
  misc_feature: MA Experiment 108559 PARAMETER Experiment Name: Zm_5mM_NO_P Parameter: Age (day) Value: 8
  misc_feature: MA Experiment 108559 PARAMETER Experiment Name: Zm_5mM_NO_P Parameter: Organism Value: Zea mays
  misc_feature: MA Experiment 108559 PARAMETER Experiment Name: Zm_5mM_NO_P Parameter: Plant Line Value: 35A19
  misc_feature: MA Experiment 108559 PARAMETER Experiment Name: Zm_5mM_NO_P Parameter: Timepoint (hr) Value: 12
  misc_feature: MA Experiment 108559 PARAMETER Experiment Name: Zm_5mM_NO_P Parameter: Tissue Value: Aerial
  misc_feature: MA Experiment 108559 PARAMETER Experiment Name: Zm_5mM_NO_P Parameter: Treatment Value: 5mM NO vs. No Treatment
  misc_feature: MA Experiment ID: 108597 Result: Down-regulated in Transcription
  misc_feature: MA Experiment 108597 PARAMETER Experiment Name: Zm_100uM_ABA_P Parameter: Age (day) Value: 9
  misc_feature: MA Experiment 108597 PARAMETER Experiment Name: Zm_100uM_ABA_P Parameter: Organism Value: Zea mays
  misc_feature: MA Experiment 108597 PARAMETER Experiment Name: Zm_100uM_ABA_P Parameter: Plant Line Value: 35A19
  misc_feature: MA Experiment 108597 PARAMETER Experiment Name: Zm_100uM_ABA_P Parameter: Timepoint (hr) Value: 24
  misc_feature: MA Experiment 108597 PARAMETER Experiment Name: Zm_100uM_ABA_P Parameter: Tissue Value: Aerial
  misc_feature: MA Experiment 108597 PARAMETER Experiment Name: Zm_100uM_ABA_P Parameter: Treatment Value: 100uM ABA vs. No Treatment
  misc_feature: MA Experiment ID: 108687 Result: Up-regulated in Transcription
  misc_feature: MA Experiment 108687 PARAMETER Experiment Name: Zm_Embryos-Flowers__P Parameter: Tissue Value: Embryo vs. Aerial+
  misc_feature: MA Experiment ID: 108688 Result: Down-regulated in Transcription
  misc_feature: MA Experiment 108688 PARAMETER Experiment Name: Zm_Embryos-Flowers__P Parameter: Tissue Value: Immature Flowers vs. Aerial+
  misc_feature: MA Experiment ID: 20000478 Result: Down-regulated in Transcription
  misc_feature: MA Experiment 20000478 PARAMETER Experiment Name: Zm_5mM_SA_P Parameter: Age (day) Value: 11
  misc_feature: MA Experiment 20000478 PARAMETER Experiment Name: Zm_5mM_SA_P Parameter: Organism Value: Zea mays
  misc_feature: MA Experiment 20000478 PARAMETER Experiment Name: Zm_5mM_SA_P Parameter: Plant Line Value: 35A19
  misc_feature: MA Experiment 20000478 PARAMETER Experiment Name: Zm_5mM_SA_P Parameter: Timepoint (hr) Value: 72
  misc_feature: MA Experiment 20000478 PARAMETER Experiment Name: Zm_5mM_SA_P Parameter: Tissue Value: Aerial
  misc_feature: MA Experiment 20000478 PARAMETER Experiment Name: Zm_5mM_SA_P Parameter: Treatment Value: 5mM SA vs. No Treatment
  misc_feature: MA Experiment ID: 20000479 Result: Down-regulated in Transcription
  misc_feature: MA Experiment 20000479 PARAMETER Experiment Name: Zm_Drought_P Parameter: Age (day) Value: 10
  misc_feature: MA Experiment 20000479 PARAMETER Experiment Name: Zm_Drought_P Parameter: Organism Value: Zea mays
  misc_feature: MA Experiment 20000479 PARAMETER Experiment Name: Zm_Drought_P Parameter: Plant Line Value: 35A19
  misc_feature: MA Experiment 20000479 PARAMETER Experiment Name: Zm_Drought_P Parameter: Timepoint (hr) Value: 48
  misc_feature: MA Experiment 20000479 PARAMETER Experiment Name: Zm_Drought_P Parameter: Tissue Value: Aerial
  misc_feature: MA Experiment 20000479 PARAMETER Experiment Name: Zm_Drought_P Parameter: Treatment Value: Drought vs. No Drought
  misc_feature: MA Experiment ID: 20000480 Result: Down-regulated in Transcription
  misc_feature: MA Experiment 20000480 PARAMETER Experiment Name: Zm_Drought_P Parameter: Age (day) Value: 11
  misc_feature: MA Experiment 20000480 PARAMETER Experiment Name: Zm_Drought_P Parameter: Organism Value: Zea mays
  misc_feature: MA Experiment 20000480 PARAMETER Experiment Name: Zm_Drought_P Parameter: Plant Line Value: 35A19
  misc_feature: MA Experiment 20000480 PARAMETER Experiment Name: Zm_Drought_P Parameter: Timepoint (hr) Value: 72
  misc_feature: MA Experiment 20000480 PARAMETER Experiment Name: Zm_Drought_P Parameter: Tissue Value: Aerial
  misc_feature: MA Experiment 20000480 PARAMETER Experiment Name: Zm_Drought_P Parameter: Treatment Value: Drought vs. No Drought
  misc_feature: MA Experiment ID: 20000535 Result: Up-regulated in Transcription
  misc_feature: MA Experiment 20000535 PARAMETER Experiment Name: Zm_Hybrid_Seed_Dev_P Parameter: DAP Value: 30 vs. 12
  misc_feature: MA Experiment 20000535 PARAMETER Experiment Name: Zm_Hybrid_Seed_Dev_P Parameter: Organism Value: Zea mays
  misc_feature: MA Experiment 20000535 PARAMETER Experiment Name: Zm_Hybrid_Seed_Dev_P Parameter: Plant Line Value: 35A19
  misc_feature: MA Experiment 20000535 PARAMETER Experiment Name: Zm_Hybrid_Seed_Dev_P Parameter: Tissue Value: Embryo vs. Unfert Floret
atatggcgacaatggcagggcgtcttgttgcccggacgtcgtcctcctcggccaagcgccagcggttcagctccgctgttctcctcctcgctctcttccagagctcgtggtgctacgacgacgcggcggcgacgacgacggtggattacggttacaacaacgagcacgaggccgaccgggtggcgttcctccccgggcagccgaggagccctccggtgtcgcagttcgccgggtacgtcaccgtgaacgagcgcaacgggagggcgctcttctactggttcttcgaggcccagacgtcgccggcgcacaagcctctcctactctggctcaatggaggacctggttgctcgtccgttgggtacggagctgcttctgagttggggcctctcagagtcaacagacacggggcagggcttgagttcaacaattttgcgtggaacaaagaggccaacttgctcttcctagagtctcctgctggggttggcttctcctacaccaacacatcatccgacctcaccaaactggatgatgctttcgtagctgaagatgcatacagcttcctagtaaattggctcaaaaggtttccgcagtataggagccacgaattttatatctccggggagagctacgcaggtcactatgtgccacaacttgctgaacttgtctatgacaggaacaagggcaacaccaacacacacatcaaccttaaaggtttcatggtcggtaatccactaactgacgactactacgactcaaaggggctggctgaatatgcttggagccactcagtagtgtcagacgaagtttacgagcgcatcaagaaggtctgcgacttcagggtctcaaactggaccgatgactgcgatacagcgatgagcgccgtgttcagccagtaccaggagatcgacatctacaacatctacgcgcccagatgcaacctccctccgtcgtcagctgcacttgcacttgctgttgacaaggcagtcgtagccaacagacaggaacatttcaggcgaaggatcaggatgttctccggatatgacccgtgctactcttcgaacgcggaaaagtacttcaacgatgcaggtgtgcagacggcattccatgcgaatgccagtggagctcggaaatgggaagtttgcagtgattcaattttgaggtcatacaatttctcggtgctttctgtcttaccaatctactctaagctcatcaaagcaggactgagagtgtggctctacagtggggatgcagatggtagggtcccggtgatcggatcgcggtattgcgtggaagccctaggcctgcctgtcaagacgcagtggcaaccatggtacctgaacaaacaggttgcgggcagatttgtggagtaccatggcatgacgatggtgacgatcagaggagcagggcatttggtgcctctcaacaaacctgcagaagggctcgcactcatcgacacattccttcagggcaaacagcttcccacacacagatgacaagagtacttagggttgtgattgtgatgagggttattgttttcaaaaaaaaaatcaaggattggacaaactatgtgccccacacacacgggctaatcagtaaggatttcatttccagtttctgcataaattgggttggctacaaatagagctgcggtctgaaatacaattttcagcttacataaaaaatattaaatgaataagtatgataaaacct

SEQ ID NO: 11273 - protein, 496 aa, Zea mays subsp. mays
  peptide (1)..(496): Ceres Seq. ID no. 12374128
  misc_feature (48)..(494): Homolog of NCBI NO: 7670042 NR Description: serine carboxypeptidase II-like protein
  misc_feature (48)..(494): Homolog of NCBI NO: 15228988 NR Description: putative serine carboxypeptidase II; protein id:
  misc_feature (53)..(419): Homolog of NCBI NO: 34894888 NR Description: putative serine carboxypeptidase II-like protein
  misc_feature (422)..(494): Homolog of NCBI NO: 34894888 NR Description: putative serine carboxypeptidase II-like protein
  misc_feature (57)..(494): Homolog of NCBI NO: 10177810 NR Description: serine carboxypeptidase II-like protein
  misc_feature (55)..(315): Homolog of NCBI NO: 15220282 NR Description: Serine carboxypeptidase isolog; protein id: [Arabidopsis thaliana] >gi|25289784|pir||G86244 Serine
  misc_feature (341)..(496): Homolog of NCBI NO: 15220282 NR Description: Serine carboxypeptidase isolog; protein id: [Arabidopsis thaliana] >gi|25289784|pir||G86244 Serine
  misc_feature (43)..(493): Homolog of NCBI NO: 13877871 NR Description: putative serine carboxypeptidase II [Arabidopsis
  misc_feature (43)..(493): Homolog of NCBI NO: 15234795 NR Description: SERINE CARBOXYPEPTIDASE II-like protein; protein At4g30610.1, supported by cDNA: gi_13877870 [Arabidopsis
  misc_feature (50)..(493): Homolog of NCBI NO: 15232847 NR Description: putative serine carboxypeptidase II; protein id: supported by cDNA: 42069., supported by cDNA: gi_14335061 thaliana] >gi|6513922|gb|AAF14826.1|AC011664_8 putative serine
MATMAGRLVARTSSSSAKRQRFSSAVLLLALFQSSWCYDDAAATTTVDYGYNNEHEADRVAFLPGQPRSPPVSQFAGYVTVNERNGRALFYWFFEAQTSPAHKPLLLWLNGGPGCSSVGYGAASELGPLRVNRHGAGLEFNNFAWNKEANLLFLESPAGVGFSYTNTSSDLTKLDDAFVAEDAYSFLVNWLKRFPQYRSHEFYISGESYAGHYVPQLAELVYDRNKGNTNTHINLKGFMVGNPLTDDYYDSKGLAEYAWSHSVVSDEVYERIKKVCDFRVSNWTDDCDTAMSAVFSQYQEIDIYNIYAPRCNLPPSSAALALAVDKAVVANRQEHFRRRIRMFSGYDPCYSSNAEKYFNDAGVQTAFHANASGARKWEVCSDSILRSYNFSVLSVLPIYSKLIKAGLRVWLYSGDADGRVPVIGSRYCVEALGLPVKTQWQPWYLNKQVAGRFVEYHGMTMVTIRGAGHLVPLNKPAEGLALIDTFLQGKQLPTHR

SEQ ID NO: 11274 - protein, 493 aa, Zea mays subsp. mays
  peptide (1)..(493): Ceres Seq. ID no. 12374129
  misc_feature (45)..(491): Homolog of NCBI NO: 7670042 NR Description: serine carboxypeptidase II-like protein
  misc_feature (45)..(491): Homolog of NCBI NO: 15228988 NR Description: putative serine carboxypeptidase II; protein id:
  misc_feature (50)..(416): Homolog of NCBI NO: 34894888 NR Description: putative serine carboxypeptidase II-like protein
  misc_feature (419)..(491): Homolog of NCBI NO: 34894888 NR Description: putative serine carboxypeptidase II-like protein
  misc_feature (54)..(491): Homolog of NCBI NO: 10177810 NR Description: serine carboxypeptidase II-like protein
  misc_feature (52)..(312): Homolog of NCBI NO: 15220282 NR Description: Serine carboxypeptidase isolog; protein id: [Arabidopsis thaliana] >gi|25289784|pir||G86244 Serine
  misc_feature (338)..(493): Homolog of NCBI NO: 15220282 NR Description: Serine carboxypeptidase isolog; protein id: [Arabidopsis thaliana] >gi|25289784|pir||G86244 Serine
  misc_feature (40)..(490): Homolog of NCBI NO: 13877871 NR Description: putative serine carboxypeptidase II [Arabidopsis
  misc_feature (40)..(490): Homolog of NCBI NO: 15234795 NR Description: SERINE CARBOXYPEPTIDASE II-like protein; protein At4g30610.1, supported by cDNA: gi_13877870 [Arabidopsis
  misc_feature (47)..(490): Homolog of NCBI NO: 15232847 NR Description: putative serine carboxypeptidase II; protein id: supported by cDNA: 42069., supported by cDNA: gi_14335061 thaliana] >gi|6513922|gb|AAF14826.1|AC011664_8 putative serine
MAGRLVARTSSSSAKRQRFSSAVLLLALFQSSWCYDDAAATTTVDYGYNNEHEADRVAFLPGQPRSPPVSQFAGYVTVNERNGRALFYWFFEAQTSPAHKPLLLWLNGGPGCSSVGYGAASELGPLRVNRHGAGLEFNNFAWNKEANLLFLESPAGVGFSYTNTSSDLTKLDDAFVAEDAYSFLVNWLKRFPQYRSHEFYISGESYAGHYVPQLAELVYDRNKGNTNTHINLKGFMVGNPLTDDYYDSKGLAEYAWSHSVVSDEVYERIKKVCDFRVSNWTDDCDTAMSAVFSQYQEIDIYNIYAPRCNLPPSSAALALAVDKAVVANRQEHFRRRIRMFSGYDPCYSSNAEKYFNDAGVQTAFHANASGARKWEVCSDSILRSYNFSVLSVLPIYSKLIKAGLRVWLYSGDADGRVPVIGSRYCVEALGLPVKTQWQPWYLNKQVAGRFVEYHGMTMVTIRGAGHLVPLNKPAEGLALIDTFLQGKQLPTHR

SEQ ID NO: 11275 - protein, 258 aa, Zea mays subsp. mays
  peptide (1)..(258): Ceres Seq. ID no. 12374130
  misc_feature (1)..(256): Homolog of NCBI NO: 7670042 NR Description: serine carboxypeptidase II-like protein
  misc_feature (1)..(256): Homolog of NCBI NO: 15228988 NR Description: putative serine carboxypeptidase II; protein id:
  misc_feature (1)..(181): Homolog of NCBI NO: 34894888 NR Description: putative serine carboxypeptidase II-like protein
  misc_feature (184)..(256): Homolog of NCBI NO: 34894888 NR Description: putative serine carboxypeptidase II-like protein
  misc_feature (1)..(256): Homolog of NCBI NO: 10177810 NR Description: serine carboxypeptidase II-like protein
  misc_feature (1)..(77): Homolog of NCBI NO: 15220282 NR Description: Serine carboxypeptidase isolog; protein id: [Arabidopsis thaliana] >gi|25289784|pir||G86244 Serine
  misc_feature (103)..(258): Homolog of NCBI NO: 15220282 NR Description: Serine carboxypeptidase isolog; protein id: [Arabidopsis thaliana] >gi|25289784|pir||G86244 Serine
  misc_feature (1)..(255): Homolog of NCBI NO: 13877871 NR Description: putative serine carboxypeptidase II [Arabidopsis
  misc_feature (1)..(255): Homolog of NCBI NO: 15234795 NR Description: SERINE CARBOXYPEPTIDASE II-like protein; protein At4g30610.1, supported by cDNA: gi_13877870 [Arabidopsis
  misc_feature (1)..(255): Homolog of NCBI NO: 15232847 NR Description: putative serine carboxypeptidase II; protein id: supported by cDNA: 42069., supported by cDNA: gi_14335061 thaliana] >gi|6513922|gb|AAF14826.1|AC011664_8 putative serine
MVGNPLTDDYYDSKGLAEYAWSHSVVSDEVYERIKKVCDFRVSNWTDDCDTAMSAVFSQYQEIDIYNIYAPRCNLPPSSAALALAVDKAVVANRQEHFRRRIRMFSGYDPCYSSNAEKYFNDAGVQTAFHANASGARKWEVCSDSILRSYNFSVLSVLPIYSKLIKAGLRVWLYSGDADGRVPVIGSRYCVEALGLPVKTQWQPWYLNKQVAGRFVEYHGMTMVTIRGAGHLVPLNKPAEGLALIDTFLQGKQLPTHR

SEQ ID NO: 11276 - DNA, 1371 bp, Zea mays subsp. mays
  misc_feature (1)..(1371): Ceres Seq. ID no. 12340997
  misc_feature: MA Experiment ID: 20000492 Result: Up-regulated in Transcription
  misc_feature: MA Experiment 20000492 PARAMETER Experiment Name: Zm_Hybrid_Seed_Dev_P Parameter: DAP Value: 12
  misc_feature: MA Experiment 20000492 PARAMETER Experiment Name: Zm_Hybrid_Seed_Dev_P Parameter: Organism Value: Zea mays
  misc_feature: MA Experiment 20000492 PARAMETER Experiment Name: Zm_Hybrid_Seed_Dev_P Parameter: Plant Line Value: 35A19
  misc_feature: MA Experiment 20000492 PARAMETER Experiment Name: Zm_Hybrid_Seed_Dev_P Parameter: Tissue Value: Fert Kernel vs. Unfert Floret
gaaaccgtaaaccgtgaatggccatcgaggtccaaaaatccatctggattctggagagaggagaccccaaaatcgcagcgcgcgaaaacgcaggagcaacccgcccactcgccaccaccgcccgcgcgcacggcggcgaccgatggccccgctcgtgccgatgtcgcagccatgggtggagaaataccggccgaggcaggtcaaggatgtggctcaccaggaggaggtgattcgggtgctcaacaacaccctccagaccgccgacctgccgcacatgctgttctacggcccgccggggacgggaaagaccaccaccgcactagccatcgcctaccagctctacggtccagagctgtataagtcaagggttttggagctcaatgctagtgatgatcgtggaattaatgtggtgaggacgaaaatcaagaactttgctgctgttgctgttggtactgcacggaaagctggttatccctgcccaccttacaagattattatacttgacgaagcagattcaatgacagaagatgcccagaatgctttgaggcgtaccacagagacttactccaaagtgaccagattcttttttatatgcaactatatcagcaggataatagaaccacttgcatcaagatgtgcaaagtttaggttcaagcctctttcagaagaagtgatgagtagtcgcattatgcatatatgcaatgaagaaggcctcaatcttaatgctcaggcgatgtccacactgagtgtcatttctcaaggtgatcttcgtcgtgctataacctaccttcagagtgcagctcgcttatttggatcttctatctcttccagtgacctgatcagtgtttcaggggttatccctgaagatgttgtcaagtcactgcttgcagcctgcagatctggtgaatttgacgtggcaaacaaggaagttagcagcattatagcagatgggtatccggtctcacagctgatggcacagtttctagatgtgattgttagcgcggatgatattccagatgatcaaaaggcaaggatatgtaaaaagcttggggaaactgataagtgcttggttgatggggcagatgagtatctacagctgctggatgtcgccagcgagactattcgcgctcttttcaacatgccgcggacgctggtcttctaagagttcataaagaggaatggcggtttcgatccttggcgaaaactttttcctgcctcttagatgccgcccaaggttaatctgcctcccctactgctctgatgttgttagcttcgtgatgggttgaaaaagcgatgaactcagccttaaaatcccgctgaactgtgcctgtggatggatgcccaatatgacaatgaacatttctcatcgtt

SEQ ID NO: 11277 - protein, 339 aa, Zea mays subsp. mays
  peptide (1)..(339): Ceres Seq. ID no. 12340998
  misc_feature (44)..(223): Pfam Name: ATPase family associated with various cellular Pfam Description: ATPase family associated with various cellular
  misc_feature (1)..(339): Homolog of NCBI NO: 10798806 NR Description: OsRFC 37 kDa subunit [Oryza sativa (japonica
  misc_feature (1)..(333): Homolog of NCBI NO: 18395021 NR Description: putative replication factor; protein id: supported by cDNA: 115488., supported by cDNA: gi_15810342, by cDNA: gi_17065121 [Arabidopsis thaliana]
  misc_feature (1)..(217): Homolog of NCBI NO: 25301746 NR Description: hypothetical protein F8K7.11 - Arabidopsis >gi|5263320|gb|AAD41422.1|AC007727_11 Similar to gb|M87339
  misc_feature (225)..(333): Homolog of NCBI NO: 25301746 NR Description: hypothetical protein F8K7.11 - Arabidopsis >gi|5263320|gb|AAD41422.1|AC007727_11 Similar to gb|M87339
  misc_feature (1)..(333): Homolog of NCBI NO: 30687479 NR Description: replication factor -related [Arabidopsis thaliana]
  misc_feature (10)..(320): Homolog of NCBI NO: 34097966 NR Description: replication factor C p37 subunit [Xenopus laevis]
  misc_feature (10)..(330): Homolog of NCBI NO: 34869304 NR Description: similar to expressed sequence AU040575 [Rattus
  misc_feature (10)..(330): Homolog of NCBI NO: 4506491 NR Description: replication factor C (activator 1) 4, 37kDa; factor C (activator 1) 4 (37kD) [Homo sapiens] Activator 1 37 kDa subunit (Replication factor C 37 kDa subunit)
  misc_feature (10)..(330): Homolog of NCBI NO: 30584245 NR Description: Homo sapiens replication factor C (activator 1)
  misc_feature (10)..(330): Homolog of NCBI NO: 21703948 NR Description: expressed sequence AU040575; similar to CG8142 product [Mus musculus] >gi|13097123|gb|AAH03335.1| Similar to
MAPLVPMSQPWVEKYRPRQVKDVAHQEEVIRVLNNTLQTADLPHMLFYGPPGTGKTTTALAIAYQLYGPELYKSRVLELNASDDRGINVVRTKIKNFAAVAVGTARKAGYPCPPYKIIILDEADSMTEDAQNALRRTTETYSKVTRFFFICNYISRIIEPLASRCAKFRFKPLSEEVMSSRIMHICNEEGLNLNAQAMSTLSVISQGDLRRAITYLQSAARLFGSSISSSDLISVSGVIPEDVVKSLLAACRSGEFDVANKEVSSIIADGYPVSQLMAQFLDVIVSADDIPDDQKARICKKLGETDKCLVDGADEYLQLLDVASETIRALFNMPRTLVF

SEQ ID NO: 11278 - protein, 333 aa, Zea mays subsp. mays
  peptide (1)..(333): Ceres Seq. ID no. 12340999
  misc_feature (38)..(217): Pfam Name: ATPase family associated with various cellular Pfam Description: ATPase family associated with various cellular
  misc_feature (1)..(333): Homolog of NCBI NO: 10798806 NR Description: OsRFC 37 kDa subunit [Oryza sativa (japonica
  misc_feature (1)..(327): Homolog of NCBI NO: 18395021 NR Description: putative replication factor; protein id: supported by cDNA: 115488., supported by cDNA: gi_15810342, by cDNA: gi_17065121 [Arabidopsis thaliana]
  misc_feature (1)..(211): Homolog of NCBI NO: 25301746 NR Description: hypothetical protein F8K7.11 - Arabidopsis >gi|5263320|gb|AAD41422.1|AC007727_11 Similar to gb|M87339
  misc_feature (219)..(327): Homolog of NCBI NO: 25301746 NR Description: hypothetical protein F8K7.11 - Arabidopsis >gi|5263320|gb|AAD41422.1|AC007727_11 Similar to gb|M87339
  misc_feature (1)..(327): Homolog of NCBI NO: 30687479 NR Description: replication factor -related [Arabidopsis thaliana]
  misc_feature (4)..(314): Homolog of NCBI NO: 34097966 NR Description: replication factor C p37 subunit [Xenopus laevis]
  misc_feature (4)..(324): Homolog of NCBI NO: 34869304 NR Description: similar to expressed sequence AU040575 [Rattus
  misc_feature (4)..(324): Homolog of NCBI NO: 4506491 NR Description: replication factor C (activator 1) 4, 37kDa; factor C (activator 1) 4 (37kD) [Homo sapiens] Activator 1 37 kDa subunit (Replication factor C 37 kDa subunit)
  misc_feature (4)..(324): Homolog of NCBI NO: 30584245 NR Description: Homo sapiens replication factor C (activator 1)
  misc_feature (4)..(324): Homolog of NCBI NO: 21703948 NR Description: expressed sequence AU040575; similar to CG8142 product [Mus musculus] >gi|13097123|gb|AAH03335.1| Similar to
MSQPWVEKYRPRQVKDVAHQEEVIRVLNNTLQTADLPHMLFYGPPGTGKTTTALAIAYQLYGPELYKSRVLELNASDDRGINVVRTKIKNFAAVAVGTARKAGYPCPPYKIIILDEADSMTEDAQNALRRTTETYSKVTRFFFICNYISRIIEPLASRCAKFRFKPLSEEVMSSRIMHICNEEGLNLNAQAMSTLSVISQGDLRRAITYLQSAARLFGSSISSSDLISVSGVIPEDVVKSLLAACRSGEFDVANKEVSSIIADGYPVSQLMAQFLDVIVSADDIPDDQKARICKKLGETDKCLVDGADEYLQLLDVASETIRALFNMPRTLVF

SEQ ID NO: 11279 - protein, 295 aa, Zea mays subsp. mays
  peptide (1)..(295): Ceres Seq. ID no. 12341000
  misc_feature (1)..(179): Pfam Name: ATPase family associated with various cellular Pfam Description: ATPase family associated with various cellular
  misc_feature (1)..(295): Homolog of NCBI NO: 10798806 NR Description: OsRFC 37 kDa subunit [Oryza sativa (japonica
  misc_feature (1)..(289): Homolog of NCBI NO: 18395021 NR Description: putative replication factor; protein id: supported by cDNA: 115488., supported by cDNA: gi_15810342, by cDNA: gi_17065121 [Arabidopsis thaliana]
  misc_feature (1)..(173): Homolog of NCBI NO: 25301746 NR Description: hypothetical protein F8K7.11 - Arabidopsis >gi|5263320|gb|AAD41422.1|AC007727_11 Similar to gb|M87339
  misc_feature (181)..(289): Homolog of NCBI NO: 25301746 NR Description: hypothetical protein F8K7.11 - Arabidopsis >gi|5263320|gb|AAD41422.1|AC007727_11 Similar to gb|M87339
  misc_feature (1)..(289): Homolog of NCBI NO: 30687479 NR Description: replication factor -related [Arabidopsis thaliana]
  misc_feature (1)..(276): Homolog of NCBI NO: 34097966 NR Description: replication factor C p37 subunit [Xenopus laevis]
  misc_feature (1)..(286): Homolog of NCBI NO: 34869304 NR Description: similar to expressed sequence AU040575 [Rattus
  misc_feature (1)..(286): Homolog of NCBI NO: 4506491 NR Description: replication factor C (activator 1) 4, 37kDa; factor C (activator 1) 4 (37kD) [Homo sapiens] Activator 1 37 kDa subunit (Replication factor C 37 kDa subunit)
  misc_feature (1)..(286): Homolog of NCBI NO: 30584245 NR Description: Homo sapiens replication factor C (activator 1)
  misc_feature (1)..(286): Homolog of NCBI NO: 21703948 NR Description: expressed sequence AU040575; similar to CG8142 product [Mus musculus] >gi|13097123|gb|AAH03335.1| Similar to
MLFYGPPGTGKTTTALAIAYQLYGPELYKSRVLELNASDDRGINVVRTKIKNFAAVAVGTARKAGYPCPPYKIIILDEADSMTEDAQNALRRTTETYSKVTRFFFICNYISRIIEPLASRCAKFRFKPLSEEVMSSRIMHICNEEGLNLNAQAMSTLSVISQGDLRRAITYLQSAARLFGSSISSSDLISVSGVIPEDVVKSLLAACRSGEFDVANKEVSSIIADGYPVSQLMAQFLDVIVSADDIPDDQKARICKKLGETDKCLVDGADEYLQLLDVASETIRALFNMPRTLVF

SEQ ID NO: 11280 - DNA, 1665 bp, Zea mays subsp. mays
  misc_feature (1)..(1665): Ceres Seq. ID no. 13633473
  misc_feature: MA Experiment ID: 20000492 Result: Up-regulated in Transcription
  misc_feature: MA Experiment 20000492 PARAMETER Experiment Name: Zm_Hybrid_Seed_Dev_P Parameter: DAP Value: 12
  misc_feature: MA Experiment 20000492 PARAMETER Experiment Name: Zm_Hybrid_Seed_Dev_P Parameter: Organism Value: Zea mays
  misc_feature: MA Experiment 20000492 PARAMETER Experiment Name: Zm_Hybrid_Seed_Dev_P Parameter: Plant Line Value: 35A19
  misc_feature: MA Experiment 20000492 PARAMETER Experiment Name: Zm_Hybrid_Seed_Dev_P Parameter: Tissue Value: Fert Kernel vs. Unfert Floret
attaaccgcctctccctcgctcctctcgctcgctcggctcactccctctccaaagcggcagcctcacgcagtcacgcgctccaccacgccacctccctctactcactcatgttgttttccgtccatccgcccaccggttcgtagcccgcgccgcaaaaccctagccccgggaggatcgcggggcgcctccgcggtgccagcgacgtggctcgtttgatccgattgctggtcgagccccgcccctcgctgccgcgcttcgctccggctgtgcagcggcgtgagcaccgagcacactcgcgaatggggaactgctggggtgcgcggatcaaggatgggagccctcaccctggcgcctcaggaatgttctcaaagagtagtggcaaggatgggagtaggcttagcggctgtagtagtcgagcctcttcagcttctatgccaccaagtgcgaagactgaatgtgaaatcctgcaatccgccaatgttaagatcttcaccttcaataatctcaaggcagccacaaggaatttccgtcctgatagtgttctaggtgaaggagggtttggatctgtctataaaggatggatagatgagaacacattatcaccttgcagacctggcactggaatcgctgttgctgtgaaaagactcaaccatgagggtttgcaagggcaccgagagtggttggcggaagttaattacctaggtcagttctgtcatcccaaccttgtcaagctgattggatactgcttagaggatgagcaccgactgctagtatacgagttcatgccccgtgggaacatggaaaaccatctgtttaggagaggctcatacttccaacctctgtcatggaaccttagaatgaaggttgcactgggagcagcaaaaggactagcttaccttcatagtgcagaggcaaaagttatttaccgagattttaagacttcgaacatcctccttgacacagattattctgcgaagctttctgattttggattggctaaggatggtcctgtcggtgagaagagccatgtgtccacaagagttatgggaacatatggttatgcagctcctgagtatctttcaacaggtcacctaactgcaaagagcgacatctatagctttggggtagtgcttctggagatgctgtcaggccgccgcgccatcgacaagaaccgcccccagggtgagcacaatcttgtggagtgggctcgaccttacctcacacataagcgcaagatattccggatcctggatacgaggctggaaggtcaatacaatctgaacggtgcacaaacaattgctgcccttgctctcgaatgcctatcctacgaagctaagatgaggccgactatggacgctgtggttgctattctagaagagctccagggctctggtgaagccgagaagaagcttcaagaacccaaggccggaaccaaacaggcacctgctgctgtgagtgctagcatgagcagcagccgcaagcctcgccggaaaagtctgggagacacaaaggagactgttggtggtccagatcccaaaccattggcccattctcgttagcaagggaaagcattgcctggtcattgtcgttagttagactgtagctcgcttgtgaatatgctatggtctgtgtatgtatgttcagagggtaatcgggcttttggc

SEQ ID NO: 11281 - protein, 419 aa, Zea mays subsp. mays
  peptide (1)..(419): Ceres Seq. ID no. 13633474
  misc_feature (1)..(391): Homolog of NCBI NO: 34897424 NR Description: putative protein kinase [Oryza sativa (japonica group)] >gi|27545044|gb|AAO18450.1| putative protein kinase
  misc_feature (1)..(400): Homolog of NCBI NO: 14719339 NR Description: putative protein kinase [Oryza sativa]
  misc_feature (1)..(399): Homolog of NCBI NO: 34906046 NR Description: putative serine/threonine-specific protein kinase
  misc_feature (1)..(367): Homolog of NCBI NO: 15227001 NR Description: protein kinase (APK1b) [Arabidopsis thaliana]
  misc_feature (1)..(281): Homolog of NCBI NO: 8778537 NR Description: F22G5.5 [Arabidopsis thaliana]
  misc_feature (261)..(419): Homolog of NCBI NO: 8778537 NR Description: F22G5.5 [Arabidopsis thaliana]
  misc_feature (1)..(415): Homolog of NCBI NO: 15222437 NR Description: protein kinase (APK1a) [Arabidopsis thaliana]
  misc_feature (1)..(375): Homolog of NCBI NO: 15241749 NR Description: protein kinase, putative [Arabidopsis thaliana]
  misc_feature (1)..(375): Homolog of NCBI NO: 166809 NR Description: protein kinase
  misc_feature (1)..(401): Homolog of NCBI NO: 15225520 NR Description: protein kinase, putative [Arabidopsis thaliana]
  misc_feature (1)..(391): Homolog of NCBI NO: 34897424 NR Description: putative protein kinase [Oryza sativa (japonica group)] >gi|27545044|gb|AAO18450.1| putative protein kinase
  misc_feature (1)..(400): Homolog of NCBI NO: 14719339 NR Description: putative protein kinase [Oryza sativa]
  misc_feature (1)..(399): Homolog of NCBI NO: 34906046 NR Description: putative serine/threonine-specific protein kinase
  misc_feature (1)..(367): Homolog of NCBI NO: 15227001 NR Description: protein kinase (APK1b) [Arabidopsis thaliana]
  misc_feature (1)..(281): Homolog of NCBI NO: 8778537 NR Description: F22G5.5 [Arabidopsis thaliana]
  misc_feature (261)..(419): Homolog of NCBI NO: 8778537 NR Description: F22G5.5 [Arabidopsis thaliana]
  misc_feature (1)..(415): Homolog of NCBI NO: 15222437 NR Description: protein kinase (APK1a) [Arabidopsis thaliana]
  misc_feature (1)..(375): Homolog of NCBI NO: 15241749 NR Description: protein kinase, putative [Arabidopsis thaliana]
  misc_feature (1)..(375): Homolog of NCBI NO: 166809 NR Description: protein kinase
  misc_feature (1)..(401): Homolog of NCBI NO: 15225520 NR Description: protein kinase, putative [Arabidopsis thaliana]
MGNCWGARIKDGSPHPGASGMFSKSSGKDGSRLSGCSSRASSASMPPSAKTECEILQSANVKIFTFNNLKAATRNFRPDSVLGEGGFGSVYKGWIDENTLSPCRPGTGIAVAVKRLNHEGLQGHREWLAEVNYLGQFCHPNLVKLIGYCLEDEHRLLVYEFMPRGNMENHLFRRGSYFQPLSWNLRMKVALGAAKGLAYLHSAEAKVIYRDFKTSNILLDTDYSAKLSDFGLAKDGPVGEKSHVSTRVMGTYGYAAPEYLSTGHLTAKSDIYSFGVVLLEMLSGRRAIDKNRPQGEHNLVEWARPYLTHKRKIFRILDTRLEGQYNLNGAQTIAALALECLSYEAKMRPTMDAVVAILEELQGSGEAEKKLQEPKAGTKQAPAAVSASMSSSRKPRRKSLGDTKETVGGPDPKPLAHSR

SEQ ID NO: 11282 - protein, 399 aa, Zea mays subsp. mays
  peptide (1)..(399): Ceres Seq. ID no. 13633475
  misc_feature (1)..(371): Homolog of NCBI NO: 34897424 NR Description: putative protein kinase [Oryza sativa (japonica group)] >gi|27545044|gb|AAO18450.1| putative protein kinase
  misc_feature (1)..(380): Homolog of NCBI NO: 14719339 NR Description: putative protein kinase [Oryza sativa]
  misc_feature (1)..(379): Homolog of NCBI NO: 34906046 NR Description: putative serine/threonine-specific protein kinase
  misc_feature (1)..(347): Homolog of NCBI NO: 15227001 NR Description: protein kinase (APK1b) [Arabidopsis thaliana]
  misc_feature (1)..(261): Homolog of NCBI NO: 8778537 NR Description: F22G5.5 [Arabidopsis thaliana]
  misc_feature (241)..(399): Homolog of NCBI NO: 8778537 NR Description: F22G5.5 [Arabidopsis thaliana]
  misc_feature (1)..(395): Homolog of NCBI NO: 15222437 NR Description: protein kinase (APK1a) [Arabidopsis thaliana]
  misc_feature (1)..(355): Homolog of NCBI NO: 15241749 NR Description: protein kinase, putative [Arabidopsis thaliana]
  misc_feature (1)..(355): Homolog of NCBI NO: 166809 NR Description: protein kinase
  misc_feature (1)..(381): Homolog of NCBI NO: 15225520 NR Description: protein kinase, putative [Arabidopsis thaliana]
  misc_feature (1)..(371): Homolog of NCBI NO: 34897424 NR Description: putative protein kinase [Oryza sativa (japonica group)] >gi|27545044|gb|AAO18450.1| putative protein kinase
  misc_feature (1)..(380): Homolog of NCBI NO: 14719339 NR Description: putative protein kinase [Oryza sativa]
  misc_feature (1)..(379): Homolog of NCBI NO: 34906046 NR Description: putative serine/threonine-specific protein kinase
  misc_feature (1)..(347): Homolog of NCBI NO: 15227001 NR Description: protein kinase (APK1b) [Arabidopsis thaliana]
  misc_feature (1)..(261): Homolog of NCBI NO: 8778537 NR Description: F22G5.5 [Arabidopsis thaliana]
  misc_feature (241)..(399): Homolog of NCBI NO: 8778537 NR Description: F22G5.5 [Arabidopsis thaliana]
  misc_feature (1)..(395): Homolog of NCBI NO: 15222437 NR Description: protein kinase (APK1a) [Arabidopsis thaliana]
  misc_feature (1)..(355): Homolog of NCBI NO: 15241749 NR Description: protein kinase, putative [Arabidopsis thaliana]
  misc_feature (1)..(355): Homolog of NCBI NO: 166809 NR Description: protein kinase
  misc_feature (1)..(381): Homolog of NCBI NO: 15225520 NR Description: protein kinase, putative [Arabidopsis thaliana]
MFSKSSGKDGSRLSGCSSRASSASMPPSAKTECEILQSANVKIFTFNNLKAATRNFRPDSVLGEGGFGSVYKGWIDENTLSPCRPGTGIAVAVKRLNHEGLQGHREWLAEVNYLGQFCHPNLVKLIGYCLEDEHRLLVYEFMPRGNMENHLFRRGSYFQPLSWNLRMKVALGAAKGLAYLHSAEAKVIYRDFKTSNILLDTDYSAKLSDFGLAKDGPVGEKSHVSTRVMGTYGYAAPEYLSTGHLTAKSDIYSFGVVLLEMLSGRRAIDKNRPQGEHNLVEWARPYLTHKRKIFRILDTRLEGQYNLNGAQTIAALALECLSYEAKMRPTMDAVVAILEELQGSGEAEKKLQEPKAGTKQAPAAVSASMSSSRKPRRKSLGDTKETVGGPDPKPLAHSR

SEQ ID NO: 11283 - protein, 375 aa, Zea mays subsp. mays
  peptide (1)..(375): Ceres Seq. ID no. 13633476
  misc_feature (1)..(347): Homolog of NCBI NO: 34897424 NR Description: putative protein kinase [Oryza sativa (japonica group)] >gi|27545044|gb|AAO18450.1| putative protein kinase
  misc_feature (1)..(356): Homolog of NCBI NO: 14719339 NR Description: putative protein kinase [Oryza sativa]
  misc_feature (1)..(355): Homolog of NCBI NO: 34906046 NR Description: putative serine/threonine-specific protein kinase
  misc_feature (1)..(323): Homolog of NCBI NO: 15227001 NR Description: protein kinase (APK1b) [Arabidopsis thaliana]
  misc_feature (1)..(237): Homolog of NCBI NO: 8778537 NR Description: F22G5.5 [Arabidopsis thaliana]
  misc_feature (217)..(375): Homolog of NCBI NO: 8778537 NR Description: F22G5.5 [Arabidopsis thaliana]
  misc_feature (1)..(371): Homolog of NCBI NO: 15222437 NR Description: protein kinase (APK1a) [Arabidopsis thaliana]
  misc_feature (1)..(331): Homolog of NCBI NO: 15241749 NR Description: protein kinase, putative [Arabidopsis thaliana]
  misc_feature (1)..(331): Homolog of NCBI NO: 166809 NR Description: protein kinase
  misc_feature (1)..(357): Homolog of NCBI NO: 15225520 NR Description: protein kinase, putative [Arabidopsis thaliana]
  misc_feature (1)..(347): Homolog of NCBI NO: 34897424 NR Description: putative protein kinase [Oryza sativa (japonica group)] >gi|27545044|gb|AAO18450.1| putative protein kinase
  misc_feature (1)..(356): Homolog of NCBI NO: 14719339 NR Description: putative protein kinase [Oryza sativa]
  misc_feature (1)..(355): Homolog of NCBI NO: 34906046 NR Description: putative serine/threonine-specific protein kinase
  misc_feature (1)..(323): Homolog of NCBI NO: 15227001 NR Description: protein kinase (APK1b) [Arabidopsis thaliana]
  misc_feature (1)..(237): Homolog of NCBI NO: 8778537 NR Description: F22G5.5 [Arabidopsis thaliana]
  misc_feature (217)..(375): Homolog of NCBI NO: 8778537 NR Description: F22G5.5 [Arabidopsis thaliana]
  misc_feature (1)..(371): Homolog of NCBI NO: 15222437 NR Description: protein kinase (APK1a) [Arabidopsis thaliana]
  misc_feature (1)..(331): Homolog of NCBI NO: 15241749 NR Description: protein kinase, putative [Arabidopsis thaliana]
  misc_feature (1)..(331): Homolog of NCBI NO: 166809 NR Description: protein kinase
  misc_feature (1)..(357): Homolog of NCBI NO: 15225520 NR Description: protein kinase, putative [Arabidopsis thaliana]
MPPSAKTECEILQSANVKIFTFNNLKAATRNFRPDSVLGEGGFGSVYKGWIDENTLSPCRPGTGIAVAVKRLNHEGLQGHREWLAEVNYLGQFCHPNLVKLIGYCLEDEHRLLVYEFMPRGNMENHLFRRGSYFQPLSWNLRMKVALGAAKGLAYLHSAEAKVIYRDFKTSNILLDTDYSAKLSDFGLAKDGPVGEKSHVSTRVMGTYGYAAPEYLSTGHLTAKSDIYSFGVVLLEMLSGRRAIDKNRPQGEHNLVEWARPYLTHKRKIFRILDTRLEGQYNLNGAQTIAALALECLSYEAKMRPTMDAVVAILEELQGSGEAEKKLQEPKAGTKQAPAAVSASMSSSRKPRRKSLGDTKETVGGPDPKPLAHSR

SEQ ID NO: 11284 - DNA, 1474 bp, Zea mays subsp. mays
  misc_feature (1)..(1474): Ceres Seq. ID no. 12411879
  misc_feature: MA Experiment ID: 108687 Result: Down-regulated in Transcription
  misc_feature: MA Experiment 108687 PARAMETER Experiment Name: Zm_Embryos-Flowers__P Parameter: Tissue Value: Embryo vs. Aerial+
gctttccacaaaatctgtggagattattcgaaaccatctcgtcgctcacgaacgcgtcagaggttttgcagaaacggagcgcgtgcggcgttcgtcggcaacgttggcgtccatggagagcaccgcggtccgaggaagaggcagaaggccgcctcggcctctggatccgtggccccgtacttgccccaggagctcgtacggaacatcctcctccgcctgccttccaggtccgtcctccgcttccgcgccgtttgcaaggactggctccggatcgtctccgaccgcgagttcgcgccgaccacaaccgccaccagccggcgatgcccctcgtctccttcctccgcagcgccgccggtagcaagagggggcagacggactgctgcgtcgacgcatttgacctcagcgccgacagtttccggtccgtcgtccggttcgccgacaaggggacgcggtgcagcagcttcgacatccacggctcctgcgacggtctcctccttctcagcttcgatgcccgcttctacgtttgcaacccggcaacgcaccagtggacgcgcctcccggcgcccctccgcgcctcgtggctcgccggcttctaccgccacgagcccaccggagagtaccgggccttgttctaccggggccagtggcccgggacggactactacatcatggtggcggactccaggaaagggaggggaattggcctgccgtcggagaaatatgggtacaagttcaggagacaaccgtatagcctgccggtcctgctccgcggccacctccactggatggcagccattgaaggctacgactacgagatgttggcgttcaacacgacgactgaaaagttcacggttatgtgccctcctgtggttcggtggcacatgtcgctagctgaggtgggcaacgagctcgcgttgttgagctgcggccaccaggtcccgatgctcgagctctggattctgaaggattacgagaacaagagctgggtctgcacgcactggattcggctgccggagttgaagatgagcaccttcgcgttcgatgacttctcgcgaatgattttcgtgtcagaaaagggagttctgatagccaccccggagcagaagctgttgcgctatgacctgaatgggactctgctggaaagcttcccttgcaataatggcagccatctcaagattactccgtacaccttcaaggagagcctcgttcggcatgcattctttgagacaccggattgcaatgccgatggtcatgaagatgaagatgaaccagaaccaccacctttcttcctggggctgtagacccggacccggtggtgatggatctcatgggaacccttggttggagttgatcagcggttcatgcttcagatcggtattacagcctcggtagatgaactgagagtaagctacatttttcttttgtctctcttttatacccatcattccatcaataatgtcactatgtttgtccc

SEQ ID NO: 11285 - protein, 432 aa, Zea mays subsp. mays
  peptide (1)..(432): Ceres Seq. ID no. 12411880
  misc_feature (96)..(408): Homolog of NCBI NO: 37533944 NR Description: hypothetical protein [Oryza sativa (japonica group)] >gi|14018043|gb|AAK52106.1| Hypothetical protein [Oryza >gi|15451623|gb|AAK98747.1| Hypothetical protein [Oryza sativa]
  misc_feature (100)..(408): Homolog of NCBI NO: 37530720 NR Description: unknown protein [Oryza sativa (japonica >gi|14028986|gb|AAK52527.1| Unknown protein [Oryza sativa]
  misc_feature (100)..(407): Homolog of NCBI NO: 38346536 NR Description: OSJNBa0040D17.11 [Oryza sativa (japonica
  misc_feature (56)..(432): Homolog of NCBI NO: 38344215 NR Description: OSJNBb0026E15.3 [Oryza sativa (japonica
  misc_feature (100)..(414): Homolog of NCBI NO: 38346527 NR Description: OSJNBa0040D17.2 [Oryza sativa (japonica
  misc_feature (194)..(407): Homolog of NCBI NO: 38346044 NR Description: OSJNBa0059D20.16 [Oryza sativa (japonica
  misc_feature (252)..(407): Homolog of NCBI NO: 38346045 NR Description: OSJNBa0059D20.17 [Oryza sativa (japonica
FPQNLWRLFETISSLTNASEVLQKRSACGVRRQRWRPWRAPRSEEEAEGRLGLWIRGPVLAPGARTEHPPPPAFQVRPPLPRRLQGLAPDRLRPRVRADHNRHQPAMPLVSFLRSAAGSKRGQTDCCVDAFDLSADSFRSVVRFADKGTRCSSFDIHGSCDGLLLLSFDARFYVCNPATHQWTRLPAPLRASWLAGFYRHEPTGEYRALFYRGQWPGTDYYIMVADSRKGRGIGLPSEKYGYKFRRQPYSLPVLLRGHLHWMAAIEGYDYEMLAFNTTTEKFTVMCPPVVRWHMSLAEVGNELALLSCGHQVPMLELWILKDYENKSWVCTHWIRLPELKMSTFAFDDFSRMIFVSEKGVLIATPEQKLLRYDLNGTLLESFPCNNGSHLKITPYTFKESLVRHAFFETPDCNADGHEDEDEPEPPPFFLGL

SEQ ID NO: 11286 - protein, 326 aa, Zea mays subsp. mays
  peptide (1)..(326): Ceres Seq. ID no. 12411881
  misc_feature (1)..(302): Homolog of NCBI NO: 37533944 NR Description: hypothetical protein [Oryza sativa (japonica group)] >gi|14018043|gb|AAK52106.1| Hypothetical protein [Oryza >gi|15451623|gb|AAK98747.1| Hypothetical protein [Oryza sativa]
  misc_feature (1)..(302): Homolog of NCBI NO: 37530720 NR Description: unknown protein [Oryza sativa (japonica >gi|14028986|gb|AAK52527.1| Unknown protein [Oryza sativa]
  misc_feature (1)..(301): Homolog of NCBI NO: 38346536 NR Description: OSJNBa0040D17.11 [Oryza sativa (japonica
  misc_feature (1)..(326): Homolog of NCBI NO: 38344215 NR Description: OSJNBb0026E15.3 [Oryza sativa (japonica
  misc_feature (1)..(308): Homolog of NCBI NO: 38346527 NR Description: OSJNBa0040D17.2 [Oryza sativa (japonica
  misc_feature (88)..(301): Homolog of NCBI NO: 38346044 NR Description: OSJNBa0059D20.16 [Oryza sativa (japonica
  misc_feature (146)..(301): Homolog of NCBI NO: 38346045 NR Description: OSJNBa0059D20.17 [Oryza sativa (japonica
MPLVSFLRSAAGSKRGQTDCCVDAFDLSADSFRSVVRFADKGTRCSSFDIHGSCDGLLLLSFDARFYVCNPATHQWTRLPAPLRASWLAGFYRHEPTGEYRALFYRGQWPGTDYYIMVADSRKGRGIGLPSEKYGYKFRRQPYSLPVLLRGHLHWMAAIEGYDYEMLAFNTTTEKFTVMCPPVVRWHMSLAEVGNELALLSCGHQVPMLELWILKDYENKSWVCTHWIRLPELKMSTFAFDDFSRMIFVSEKGVLIATPEQKLLRYDLNGTLLESFPCNNGSHLKITPYTFKESLVRHAFFETPDCNADGHEDEDEPEPPPFFLGL

SEQ ID NO: 11287 - protein, 296 aa, Zea mays subsp. mays
  peptide (1)..(296): Ceres Seq. ID no. 12411882
  misc_feature (61)..(97): Homolog of NCBI NO: 37533944 NR Description: hypothetical protein [Oryza sativa (japonica group)] >gi|14018043|gb|AAK52106.1| Hypothetical protein [Oryza >gi|15451623|gb|AAK98747.1| Hypothetical protein [Oryza sativa]
  misc_feature (39)..(97): Homolog of NCBI NO: 37530720 NR Description: unknown protein [Oryza sativa (japonica >gi|14028986|gb|AAK52527.1| Unknown protein [Oryza sativa]
  misc_feature (61)..(112): Homolog of NCBI NO: 38346536 NR Description: OSJNBa0040D17.11 [Oryza sativa (japonica
  misc_feature (61)..(100): Homolog of NCBI NO: 38346527 NR Description: OSJNBa0040D17.2 [Oryza sativa (japonica
  misc_feature (61)..(116): Homolog of NCBI NO: 38346045 NR Description: OSJNBa0059D20.17 [Oryza sativa (japonica
  misc_feature (99)..(296): Homolog of NCBI NO: 29250754 NR Description: GLP_49_64409_65443 [Giardia lamblia ATCC 50803]
  misc_feature (101)..(296): Homolog of NCBI NO: 29250754 NR Description: GLP_49_64409_65443 [Giardia lamblia ATCC 50803]
  misc_feature (98)..(290): Homolog of NCBI NO: 7248459 NR Description: arabinogalactan protein [Zea mays]
  misc_feature (101)..(223): Homolog of NCBI NO: 32699068 NR Description: hypothetical protein FLJ35107 [Homo sapiens]
  misc_feature (45)..(203): Homolog of NCBI NO: 37536980 NR Description: putative transposase [Oryza sativa (japonica group)] >gi|18854992|gb|AAL79684.1| putative transposase [Oryza >gi|31433587|gb|AAP55079.1| putative transposase [Oryza sativa
AFHKICGDYSKPSRRSRTRQRFCRNGARAAFVGNVGVHGEHRGPRKRQKAASASGSVAPYLPQELVRNILLRLPSRSVLRFRAVCKDWLRIVSDREFAPTTTATSRRCPSSPSSAAPPVARGGRRTAASTHLTSAPTVSGPSSGSPTRGRGAAASTSTAPATVSSFSASMPASTFATRQRTSGRASRRPSAPRGSPASTATSPPESTGPCSTGASGPGRTTTSWWRTPGKGGELACRRRNMGTSSGDNRIACRSCSAATSTGWQPLKATTTRCWRSTRRLKSSRLCALLWFGGTCR

SEQ ID NO: 11288 - DNA, 1545 bp, Zea mays subsp. mays
  misc_feature (1)..(1545): Ceres Seq. ID no. 12413819
  misc_feature: MA Experiment ID: 20000480 Result: Up-regulated in Transcription
  misc_feature: MA Experiment 20000480 PARAMETER Experiment Name: Zm_Drought_P Parameter: Age (day) Value: 11
  misc_feature: MA Experiment 20000480 PARAMETER Experiment Name: Zm_Drought_P Parameter: Organism Value: Zea mays
  misc_feature: MA Experiment 20000480 PARAMETER Experiment Name: Zm_Drought_P Parameter: Plant Line Value: 35A19
  misc_feature: MA Experiment 20000480 PARAMETER Experiment Name: Zm_Drought_P Parameter: Timepoint (hr) Value: 72
  misc_feature: MA Experiment 20000480 PARAMETER Experiment Name: Zm_Drought_P Parameter: Tissue Value: Aerial
  misc_feature: MA Experiment 20000480 PARAMETER Experiment Name: Zm_Drought_P Parameter: Treatment Value: Drought vs. No Drought
gcaatcttccggaacatccatcgatctccccccagcggcgaggagagccggcggccacaggaaggagaaatggcttccgcacacaacgctctccgggtgtttttcatcctagccgtggtatgtgccgtatgcacagcgaaaaggacaggagccaagaaggaagaatcggcggcagcccctggtggtgctgctggaggcagcggcgggacgttcgacatctccaagctcggcgcgaccagcgacgggcaagacggactgcacaaaggcagtccaggacgcgtggacgtcagcgtgcgaagcgaccggaagcgccacggtggtgatccccaagggcgactacctggtcggccctctcaacttcactgggccatgcaagggcagcagcatcgccatccagctggatggcaacctgctgggatcaaacgacctgaacaagtacacggcgagctggatcgaattgtctcacgttaacaacatcgggatcaccggctcgggcacgctggacggccaggggaccgccgtttatagcaagagcaagaccgacaacgtgaaggcgatgcccaacacactggtgctgtttcacgtgatcaacgccactgtcgccggaatcaaactactcaactccaagttcttccacatcaacatcgacaactcagagagcatcaccgtgaaggacgtgaacgtcaccgcgcccgccgacgttgagaacacggacggcgtccacgtcggaggctcctccaagatcagcatcctcaactcgaccatcggcaccggcgacgactgcgtctcgattgggcccgggtgcaacggcgtcttggtggacagcatcacctgcggccccgggcagggcatcagcgtcggctgcctaggccgctacaaggacgagaaggacgtgagcgacatcacggtgcggaacctgctcaagaacaccaccaacggcgtgcgcatcaagtcgtacgtggacgccgagtccgtgctgacggcctcccatctcaccttcgagaacatcaggatggaggaggtggccaaccccatcgtcatcgaccagtacttctgcccgcagaaggtatgccctggcaagcggagcaactcctcgcatgtctccgtcaaggacgtcacgttccgcaacatcaccggcacgtcgtccacgcccgaggccatcagcctgctctgctcggagacgcagccatgcagcggcgtctccctcatcgatgtcaacgtggagtacgccggcaagaacaacaaaaccatggccgtctgcagcaacgccaagggcaccgccaagggaagcatcgaggcactggcttgcctggtctgatgatgaccttccttttgcatgcatgcatggtatctcatccttgatgatgatctagctcactagttctttttaatttccgcttcattcgcttttccaaattcgattgtgtttcagccaagttgtttagcgggacatctcttgtctgatcttcctgctaaatagagttggactcctatatatagaggccttccggcacatataatatacgtcggaccaatattattgtg

SEQ ID NO: 11289 - protein, 253 aa, Zea mays subsp. mays
  peptide (1)..(253): Ceres Seq. ID no. 12413820
  misc_feature (1)..(251): Pfam Name: Glycosyl hydrolases family 28 Pfam Description: Glycosyl hydrolases family 28
  misc_feature (1)..(251): Homolog of NCBI NO: 4826572 NR Description: polygalacturonase [Phleum pratense]
  misc_feature (1)..(252): Homolog of NCBI NO: 20805058 NR Description: putative exopolygalacturorase precursor [Oryza
  misc_feature (1)..(251): Homolog of NCBI NO: 548493 NR Description: Exopolygalacturonase precursor (ExoPG) (Pectinase)
  misc_feature (1)..(251): Homolog of NCBI NO: 22422 NR Description: polygalacturonase [Zea mays]
  misc_feature (1)..(251): Homolog of NCBI NO: 129940 NR Description: Exopolygalacturonase precursor (ExoPG) (Pectinase)
  misc_feature (1)..(251): Homolog of NCBI NO: 548492 NR Description: Exopolygalacturonase precursor (ExoPG) (Pectinase)
  misc_feature (1)..(251): Homolog of NCBI NO: 629852 NR Description: polygalacturonase - maize
  misc_feature (1)..(251): Homolog of NCBI NO: 1360705 NR Description: polygalacturonase [Zea mays]
  misc_feature (1)..(251): Homolog of NCBI NO: 100912 NR Description: polygalacturonase (EC 3.2.1.15) - maize
  misc_feature (1)..(146): Homolog of NCBI NO: 283049 NR Description: polygalacturonase (EC 3.2.1.15) precursor (clone - maize (fragment) >gi|22426|emb|CAA44248.1| polygalacturonase
MPNTLVLFHVINATVAGIKLLNSKFFHINIDNSESITVKDVNVTAPADVENTDGVHVGGSSKISILNSTIGTGDDCVSIGPGCNGVLVDSITCGPGQGISVGCLGRYKDEKDVSDITVRNLLKNTTNGVRIKSYVDAESVLTASHLTFENIRMEEVANPIVIDQYFCPQKVCPGKRSNSSHVSVKDVTFRNITGTSSTPEAISLLCSETQPCSGVSLIDVNVEYAGKNNKTMAVCSNAKGTAKGSIEALACLV

SEQ ID NO: 11290 - protein, 156 aa, Zea mays subsp. mays
  peptide (1)..(156): Ceres Seq. ID no. 12413821
  misc_feature (8)..(156): Pfam Name: High molecular weight glutenin subunit Pfam Description: High molecular weight glutenin subunit
AIFRNIHRSPPSGEESRRPQEGEMASAHNALRVFFILAVVCAVCTAKRTGAKKEESAAAPGGAAGGSGGTFDISKLGATSDGQDGLHKGSPGRVDVSVRSDRKRHGGDPQGRLPGRPSQLHWAMQGQQHRHPAGWQPAGIKRPEQVHGELDRIVSR

SEQ ID NO: 11291 - protein, 133 aa, Zea mays subsp. mays
  peptide (1)..(133): Ceres Seq. ID no. 12413822
  misc_feature (1)..(133): Pfam Name: High molecular weight glutenin subunit Pfam Description: High molecular weight glutenin subunit
MASAHNALRVFFILAVVCAVCTAKRTGAKKEESAAAPGGAAGGSGGTFDISKLGATSDGQDGLHKGSPGRVDVSVRSDRKRHGGDPQGRLPGRPSQLHWAMQGQQHRHPAGWQPAGIKRPEQVHGELDRIVSR

SEQ ID NO: 11292 - DNA, 1101 bp, Zea mays subsp. mays
  misc_feature (1)..(1101): Ceres Seq. ID no. 12411875
  misc_feature: MA Experiment ID: 108522 Result: Down-regulated in Transcription
  misc_feature: MA Experiment 108522 PARAMETER Experiment Name: Zm_42deg_Heat_P Parameter: Age (day) Value: 8
  misc_feature: MA Experiment 108522 PARAMETER Experiment Name: Zm_42deg_Heat_P Parameter: Organism Value: Zea mays
  misc_feature: MA Experiment 108522 PARAMETER Experiment Name: Zm_42deg_Heat_P Parameter: Plant Line Value: 35A19
  misc_feature: MA Experiment 108522 PARAMETER Experiment Name: Zm_42deg_Heat_P Parameter: Temperature (deg C) Value: 42 vs. 22
  misc_feature: MA Experiment 108522 PARAMETER Experiment Name: Zm_42deg_Heat_P Parameter: Timepoint (hr) Value: 1
  misc_feature: MA Experiment 108522 PARAMETER Experiment Name: Zm_42deg_Heat_P Parameter: Tissue Value: Aerial
  misc_feature: MA Experiment ID: 108534 Result: Up-regulated in Transcription
  misc_feature: MA Experiment 108534 PARAMETER Experiment Name: Zm_4deg_Cold_P Parameter: Age (hr) Value: 8
  misc_feature: MA Experiment 108534 PARAMETER Experiment Name: Zm_4deg_Cold_P Parameter: Organism Value: Zea mays
  misc_feature: MA Experiment 108534 PARAMETER Experiment Name: Zm_4deg_Cold_P Parameter: Plant Line Value: 35A19
  misc_feature: MA Experiment 108534 PARAMETER Experiment Name: Zm_4deg_Cold_P Parameter: Temperature (deg C) Value: 4 vs. 22
  misc_feature: MA Experiment 108534 PARAMETER Experiment Name: Zm_4deg_Cold_P Parameter: Timepoint (hr) Value: 6
  misc_feature: MA Experiment 108534 PARAMETER Experiment Name: Zm_4deg_Cold_P Parameter: Tissue Value: Aerial
  misc_feature: MA Experiment ID: 108559 Result: Down-regulated in Transcription
  misc_feature: MA Experiment 108559 PARAMETER Experiment Name: Zm_5mM_NO_P Parameter: Age (day) Value: 8
  misc_feature: MA Experiment 108559 PARAMETER Experiment Name: Zm_5mM_NO_P Parameter: Organism Value: Zea mays
  misc_feature: MA Experiment 108559 PARAMETER Experiment Name: Zm_5mM_NO_P Parameter: Plant Line Value: 35A19
  misc_feature: MA Experiment 108559 PARAMETER Experiment Name: Zm_5mM_NO_P Parameter: Timepoint (hr) Value: 12
  misc_feature: MA Experiment 108559 PARAMETER Experiment Name: Zm_5mM_NO_P Parameter: Tissue Value: Aerial
  misc_feature: MA Experiment 108559 PARAMETER Experiment Name: Zm_5mM_NO_P Parameter: Treatment Value: 5mM NO vs. No Treatment
  misc_feature: MA Experiment ID: 20000477 Result: Down-regulated in Transcription
  misc_feature: MA Experiment 20000477 PARAMETER Experiment Name: Zm_5mM_SA_P Parameter: Age (day) Value: 10
  misc_feature: MA Experiment 20000477 PARAMETER Experiment Name: Zm_5mM_SA_P Parameter: Organism Value: Zea mays
  misc_feature: MA Experiment 20000477 PARAMETER Experiment Name: Zm_5mM_SA_P Parameter: Plant Line Value: 35A19
  misc_feature: MA Experiment 20000477 PARAMETER Experiment Name: Zm_5mM_SA_P Parameter: Timepoint (hr) Value: 48
  misc_feature: MA Experiment 20000477 PARAMETER Experiment Name: Zm_5mM_SA_P Parameter: Tissue Value: Aerial
  misc_feature: MA Experiment 20000477 PARAMETER Experiment Name: Zm_5mM_SA_P Parameter: Treatment Value: 5mM SA vs. No Treatment
  misc_feature: MA Experiment ID: 20000532 Result: Up-regulated in Transcription
  misc_feature: MA Experiment 20000532 PARAMETER Experiment Name: Zm_0.001percent_MeJA_P Parameter: Age (day) Value: 10
  misc_feature: MA Experiment 20000532 PARAMETER Experiment Name: Zm_0.001percent_MeJA_P Parameter: Organism Value: Zea mays
  misc_feature: MA Experiment 20000532 PARAMETER Experiment Name: Zm_0.001percent_MeJA_P Parameter: Plant Line Value: 35A19
  misc_feature: MA Experiment 20000532 PARAMETER Experiment Name: Zm_0.001percent_MeJA_P Parameter: Timepoint (hr) Value: 48
  misc_feature: MA Experiment 20000532 PARAMETER Experiment Name: Zm_0.001percent_MeJA_P Parameter: Tissue Value: Aerial
  misc_feature: MA Experiment 20000532 PARAMETER Experiment Name: Zm_0.001percent_MeJA_P Parameter: Treatment Value: 0.001percent MeJA vs. No Treatment
  misc_feature: MA Experiment ID: 20000535 Result: Down-regulated in Transcription
  misc_feature: MA Experiment 20000535 PARAMETER Experiment Name: Zm_Hybrid_Seed_Dev_P Parameter: DAP Value: 30 vs. 12
  misc_feature: MA Experiment 20000535 PARAMETER Experiment Name: Zm_Hybrid_Seed_Dev_P Parameter: Organism Value: Zea mays
  misc_feature: MA Experiment 20000535 PARAMETER Experiment Name: Zm_Hybrid_Seed_Dev_P Parameter: Plant Line Value: 35A19
  misc_feature: MA Experiment 20000535 PARAMETER Experiment Name: Zm_Hybrid_Seed_Dev_P Parameter: Tissue Value: Embryo vs. Unfert Floret
  misc_feature: MA Experiment ID: 20001608 Result: Down-regulated in Transcription
  misc_feature: MA Experiment 20001608 PARAMETER Experiment Name: Zm_50ppm_KNO3_L-to-H_P Parameter: Age (day) Value: 21
  misc_feature: MA Experiment 20001608 PARAMETER Experiment Name: Zm_50ppm_KNO3_L-to-H_P Parameter: Organism Value: Zea mays
  misc_feature: MA Experiment 20001608 PARAMETER Experiment Name: Zm_50ppm_KNO3_L-to-H_P Parameter: Plant Line Value: 35A19
  misc_feature: MA Experiment 20001608 PARAMETER Experiment Name: Zm_50ppm_KNO3_L-to-H_P Parameter: Timepoint (hr) Value: 48
  misc_feature: MA Experiment 20001608 PARAMETER Experiment Name: Zm_50ppm_KNO3_L-to-H_P Parameter: Tissue Value: Shoots
  misc_feature: MA Experiment 20001608 PARAMETER Experiment Name: Zm_50ppm_KNO3_L-to-H_P Parameter: Treatment Value: 50ppm KNO3 vs. 50ppm KCl
aaggagaggcacccacgacggcgacgcattggattgggttgggacagaacgagcgacggcgaggagacggcgataagatttggcacacctcggactgtagctgggagactgcacggacggcggcgtccacgagtcacgaggagcccagaggcttcttcacagcagcagcggcaggtccgctgatgccagactccccccagctccaccaaccgcctccccctcccgcgccgccgccggccagcgcaacaccagccgcgccagcggcagcaaatgcgcaacccaagctgactgccgtgaagctgaggatgatcatcaagggcgtgctcgggcggtaccagcgctggaaccccgtgcacccgacggccggcaccttctggggtgtggggctcggcgtcggctgcggcgttggctggggccccggcttcgggcctgaggtgattgggtacgtaggcgccgggtgcggcgtggggttcagcgttgggttcacgctcgccggcgtcggcatcggcctgccgcagcacagcctcatcaggaaccacgaccacggtggttttgcgagcagcgtccctgttgattcagcgagattctacgccctaaccatcatcagaggtctggtatgggacgccatcagctacgtgggcaatgtagcggctatgaggaaagaatctcgacagaagcttccgagnttccaggacagccntcaggttccagggggagttgatctgccgaagctggggaaggcgtgtcgagcagcatccggtccacggtagaatgcatcagggccttcaccaactgactgatcaactccagcccaggaaccatctctgcctgccatgcctgtccctcactcgatttgtatgtttgtatggcttaggtccttcgattcgtacgttcgtgcgtggtagcaccaataaacatgcgatcgattgagttgtgtgtgcttctccattcattcacttgctctttctgcagctcgtgatcgagttgtgtgtgctccattcccaaattatgtatgatcgattagtagcgttaggggttaaccagtagccgctgtgtacttgtgtcacccttggacaaacaatgagatatttctttgtcgcc

SEQ ID NO: 11293 - protein, 255 aa, Zea mays subsp. mays
  peptide (1)..(255): Ceres Seq. ID no. 12411876
  misc_feature (32)..(246): Homolog of NCBI NO: 34899622 NR Description: cadmium-induced protein-like [Oryza sativa
  misc_feature (102)..(176): Homolog of NCBI NO: 15234117 NR Description: cadmium-induced protein; protein id: At4g19070.1, by cDNA: gi_18176471 [Arabidopsis thaliana]
  misc_feature (228)..(228): Xaa is any aa, unknown or other
  misc_feature (233)..(233): Xaa is any aa, unknown or other
GEAPTTATHWIGLGQNERRRGDGDKIWHTSDCSWETARTAASTSHEEPRGFFTAAAAGPLMPDSPQLHQPPPPPAPPPASATPAAPAAANAQPKLTAVKLRMIIKGVLGRYQRWNPVHPTAGTFWGVGLGVGCGVGWGPGFGPEVIGYVGAGCGVGFSVGFTLAGVGIGLPQHSLIRNHDHGGFASSVPVDSARFYALTIIRGLVWDAISYVGNVAAMRKESRQKLPXFQDSXQVPGGVDLPKLGKACRAASGPR

SEQ ID NO: 11294 - protein, 195 aa, Zea mays subsp. mays
  peptide (1)..(195): Ceres Seq. ID no. 12411877
  misc_feature (1)..(186): Homolog of NCBI NO: 34899622 NR Description: cadmium-induced protein-like [Oryza sativa
  misc_feature (42)..(116): Homolog of NCBI NO: 15234117 NR Description: cadmium-induced protein; protein id: At4g19070.1, by cDNA: gi_18176471 [Arabidopsis thaliana]
  misc_feature (168)..(168): Xaa is any aa, unknown or other
  misc_feature (173)..(173): Xaa is any aa, unknown or other
MPDSPQLHQPPPPPAPPPASATPAAPAAANAQPKLTAVKLRMIIKGVLGRYQRWNPVHPTAGTFWGVGLGVGCGVGWGPGFGPEVIGYVGAGCGVGFSVGFTLAGVGIGLPQHSLIRNHDHGGFASSVPVDSARFYALTIIRGLVWDAISYVGNVAAMRKESRQKLPXFQDSXQVPGGVDLPKLGKACRAASGPR

SEQ ID NO: 11295 - protein, 154 aa, Zea mays subsp. mays
  peptide (1)..(154): Ceres Seq. ID no. 12411878
  misc_feature (1)..(145): Homolog of NCBI NO: 34899622 NR Description: cadmium-induced protein-like [Oryza sativa
  misc_feature (1)..(75): Homolog of NCBI NO: 15234117 NR Description: cadmium-induced protein; protein id: At4g19070.1, by cDNA: gi_18176471 [Arabidopsis thaliana]
  misc_feature (127)..(127): Xaa is any aa, unknown or other
  misc_feature (132)..(132): Xaa is any aa, unknown or other
MIIKGVLGRYQRWNPVHPTAGTFWGVGLGVGCGVGWGPGFGPEVIGYVGAGCGVGFSVGFTLAGVGIGLPQHSLIRNHDHGGFASSVPVDSARFYALTIIRGLVWDAISYVGNVAAMRKESRQKLPXFQDSXQVPGGVDLPKLGKACRAASGPR

SEQ ID NO: 11296 - DNA, 1614 bp, Zea mays subsp. mays
  misc_feature (1)..(1614): Ceres Seq. ID no. 12364958
  misc_feature: MA Experiment ID: 20000535 Result: Down-regulated in Transcription
  misc_feature: MA Experiment 20000535 PARAMETER Experiment Name: Zm_Hybrid_Seed_Dev_P Parameter: DAP Value: 30 vs. 12
  misc_feature: MA Experiment 20000535 PARAMETER Experiment Name: Zm_Hybrid_Seed_Dev_P Parameter: Organism Value: Zea mays
  misc_feature: MA Experiment 20000535 PARAMETER Experiment Name: Zm_Hybrid_Seed_Dev_P Parameter: Plant Line Value: 35A19
  misc_feature: MA Experiment 20000535 PARAMETER Experiment Name: Zm_Hybrid_Seed_Dev_P Parameter: Tissue Value: Embryo vs. Unfert Floret
gccgttctttctccctcagaccctcaccaaccaggcaaccaaaccttctccgatggccgcgcccgtgtcgcagccgccggtgtccgccagggcgtccacacggtttctcccccgcgggataggcgcgctcccggagtccgctcccacgtccctccggttatccgtcggccgccgtcgccgggccgccagcctagaggtgaaggcatcgggaaatgtgttcgggaactacttccaggttgcaacctatggcgaatcccatggagggggtgttggttgcgttatcagtggctgcccacccagaattcctctcactgaggcagacatgcaagtagaactcgataaagacgtccgggtcaaagtagaattacaaccccaagaaaggagactgatacatgcaaaattctatcagggacacatgatgggatgactactggtacaccaattcacgtctttgtcccaaacacagatcaaaggggtggtgattacagtgaaatgtctaaggcgtacagaccatcccatgcagatgcaacctatgacttcaagtatggagttagagctgtgcagggaggtggaaggtcatcagccagagaaaccattggcagggtggctgcaggagctcttgcaaagaaaattctaaagctcaaatcaggagtggagatcttggcatttgtttctaaagtgcaccaagtcgtacttccagaagatgcagttgattatgagactgtaaccttggaacatatagagagcaacatcgttagatgtcctgatccagaatatgcagagaagatgattgctgccattgatacggtacgagttagaggagattcaattggtggggtcgtcacatgcattgcaagaaatgttcctcgtggtcttggctctcctgtttttgacaaacttgaagctgaactggcaaaagccatgctttctcttcctgcaagcaaggggtttgagattggcagtgggttcgctggtacggactttactggaagtgagcataatgatgagttctatatggatgaggctggaaatgtgaggacacgaactaatcgctcaggcggtgttcagggagggatatcaaatggtgaaattatttacttcaaagtggcttttaagccaacagcaactatcggaaagaagcaaaatactgtgtcaagggagcatgaggatgttgaacttttggcaagggggcgccatgacccctgtgttgtccctcgagctgttcctatggtggaatccatggctgcgctggtcctgatggaccagctcatggcgcatattgcccagtgtgagatgtttccgctgaaccttgccctacaagagcccattggctctgctagcagtgcatctgaactgtcaccaaacctatcataatgtttgtcgtggaacatgtcccagctttccttctatcgaaattctggtctttgctaagcagtttgcaattcggaacccccataaaccctcgactattgtacctagagataaagtgaacggatatcaagatagaaatgcattaatgtttttgtgatgtgtagtataactgatatttaccccttttctttttttgagagaggacgcatgatgtcgtttgagcaataaagtttaatttgggag

SEQ ID NO: 11297 - protein, 316 aa, Zea mays subsp. mays
  peptide (1)..(316): Ceres Seq. ID no. 12364959
  misc_feature (1)..(283): Pfam Name: Chorismate synthase Pfam Description: Chorismate synthase
  misc_feature (1)..(291): Homolog of NCBI NO: 22298006 NR Description: chorismate synthase [Thermosynechococcus BP-1] >gi|22294184|dbj|BAC08015.1| chorismate synthase
  misc_feature (1)..(312): Homolog of NCBI NO: 2492952 NR Description: Chorismate synthase 1, chloroplast precursor (5-
  misc_feature (1)..(309): Homolog of NCBI NO: 2492953 NR Description: Chorismate synthase 2, chloroplast precursor (5-
  misc_feature (1)..(312): Homolog of NCBI NO: 114182 NR Description: Chorismate synthase, chloroplast precursor (5-
  misc_feature (1)..(302): Homolog of NCBI NO: 12229700 NR Description: Chorismate synthase, chloroplast precursor (5-
  misc_feature (1)..(302): Homolog of NCBI NO: 18402389 NR Description: chorismate synthase, putative; protein id: supported by cDNA: gi_15982823 [Arabidopsis thaliana]
  misc_feature (1)..(289): Homolog of NCBI NO: 23039390 NR Description: hypothetical protein [Trichodesmium erythraeum
  misc_feature (1)..(291): Homolog of NCBI NO: 23126882 NR Description: hypothetical protein [Nostoc punctiforme]
  misc_feature (1)..(290): Homolog of NCBI NO: 16330007 NR Description: chorismate synthase [Synechocystis sp. PCC 6803]
  misc_feature (1)..(291): Homolog of NCBI NO: 17228292 NR Description: chorismate synthase [Nostoc sp. PCC 7120]
MTTGTPIHVFVPNTDQRGGDYSEMSKAYRPSHADATYDFKYGVRAVQGGGRSSARETIGRVAAGALAKKILKLKSGVEILAFVSKVHQVVLPEDAVDYETVTLEHIESNIVRCPDPEYAEKMIAAIDTVRVRGDSIGGVVTCIARNVPRGLGSPVFDKLEAELAKAMLSLPASKGFEIGSGFAGTDFTGSEHNDEFYMDEAGNVRTRTNRSGGVQGGISNGEIIYFKVAFKPTATIGKKQNTVSREHEDVELLARGRHDPCVVPRAVPMVESMAALVLMDQLMAHIAQCEMFPLNLALQEPIGSASSASELSPNLS

SEQ ID NO: 11298 - protein, 293 aa, Zea mays subsp. mays
  peptide (1)..(293): Ceres Seq. ID no. 12364960
  misc_feature (1)..(260): Pfam Name: Chorismate synthase Pfam Description: Chorismate synthase
  misc_feature (1)..(289): Homolog of NCBI NO: 2492952 NR Description: Chorismate synthase 1, chloroplast precursor (5-
  misc_feature (1)..(286): Homolog of NCBI NO: 2492953 NR Description: Chorismate synthase 2, chloroplast precursor (5-
  misc_feature (1)..(289): Homolog of NCBI NO: 114182 NR Description: Chorismate synthase, chloroplast precursor (5-
  misc_feature (1)..(279): Homolog of NCBI NO: 12229700 NR Description: Chorismate synthase, chloroplast precursor (5-
  misc_feature (1)..(279): Homolog of NCBI NO: 18402389 NR Description: chorismate synthase, putative; protein id: supported by cDNA: gi_15982823 [Arabidopsis thaliana]
  misc_feature (1)..(266): Homolog of NCBI NO: 23039390 NR Description: hypothetical protein [Trichodesmium erythraeum
  misc_feature (1)..(268): Homolog of NCBI NO: 23126882 NR Description: hypothetical protein [Nostoc punctiforme]
  misc_feature (1)..(267): Homolog of NCBI NO: 16330007 NR Description: chorismate synthase [Synechocystis sp. PCC 6803]
  misc_feature (1)..(268): Homolog of NCBI NO: 17228292 NR Description: chorismate synthase [Nostoc sp. PCC 7120]
  misc_feature (1)..(268): Homolog of NCBI NO: 22298006 NR Description: chorismate synthase [Thermosynechococcus BP-1] >gi|22294184|dbj|BAC08015.1| chorismate synthase
MSKAYRPSHADATYDFKYGVRAVQGGGRSSARETIGRVAAGALAKKILKLKSGVEILAFVSKVHQVVLPEDAVDYETVTLEHIESNIVRCPDPEYAEKMIAAIDTVRVRGDSIGGVVTCIARNVPRGLGSPVFDKLEAELAKAMLSLPASKGFEIGSGFAGTDFTGSEHNDEFYMDEAGNVRTRTNRSGGVQGGISNGEIIYFKVAFKPTATIGKKQNTVSREHEDVELLARGRHDPCVVPRAVPMVESMAALVLMDQLMAHIAQCEMFPLNLALQEPIGSASSASELSPNLS

SEQ ID NO: 11299 - protein, 195 aa, Zea mays subsp. mays
  peptide (1)..(195): Ceres Seq. ID no. 12364961
  misc_feature (1)..(162): Pfam Name: Chorismate synthase Pfam Description: Chorismate synthase
  misc_feature (1)..(191): Homolog of NCBI NO: 2492952 NR Description: Chorismate synthase 1, chloroplast precursor (5-
  misc_feature (1)..(188): Homolog of NCBI NO: 2492953 NR Description: Chorismate synthase 2, chloroplast precursor (5-
  misc_feature (1)..(191): Homolog of NCBI NO: 114182 NR Description: Chorismate synthase, chloroplast precursor (5-
  misc_feature (1)..(181): Homolog of NCBI NO: 12229700 NR Description: Chorismate synthase, chloroplast precursor (5-
  misc_feature (1)..(181): Homolog of NCBI NO: 18402389 NR Description: chorismate synthase, putative; protein id: supported by cDNA: gi_15982823 [Arabidopsis thaliana]
  misc_feature (1)..(168): Homolog of NCBI NO: 23039390 NR Description: hypothetical protein [Trichodesmium erythraeum
  misc_feature (1)..(170): Homolog of NCBI NO: 23126882 NR Description: hypothetical protein [Nostoc punctiforme]
  misc_feature (1)..(169): Homolog of NCBI NO: 16330007 NR Description: chorismate synthase [Synechocystis sp. PCC 6803]
  misc_feature (1)..(170): Homolog of NCBI NO: 17228292 NR Description: chorismate synthase [Nostoc sp. PCC 7120]
  misc_feature (1)..(170): Homolog of NCBI NO: 22298006 NR Description: chorismate synthase [Thermosynechococcus BP-1] >gi|22294184|dbj|BAC08015.1| chorismate synthase
MIAAIDTVRVRGDSIGGVVTCIARNVPRGLGSPVFDKLEAELAKAMLSLPASKGFEIGSGFAGTDFTGSEHNDEFYMDEAGNVRTRTNRSGGVQGGISNGEIIYFKVAFKPTATIGKKQNTVSREHEDVELLARGRHDPCVVPRAVPMVESMAALVLMDQLMAHIAQCEMFPLNLALQEPIGSASSASELSPNLS

SEQ ID NO: 11300 - DNA, 1284 bp, Zea mays subsp. mays
  misc_feature (1)..(1284): Ceres Seq. ID no. 12412345
  misc_feature: MA Experiment ID: 108688 Result: Down-regulated in Transcription
  misc_feature: MA Experiment 108688 PARAMETER Experiment Name: Zm_Embryos-Flowers__P Parameter: Tissue Value: Immature Flowers vs. Aerial+
  misc_feature: MA Experiment ID: 20000479 Result: Up-regulated in Transcription
  misc_feature: MA Experiment 20000479 PARAMETER Experiment Name: Zm_Drought_P Parameter: Age (day) Value: 10
  misc_feature: MA Experiment 20000479 PARAMETER Experiment Name: Zm_Drought_P Parameter: Organism Value: Zea mays
  misc_feature: MA Experiment 20000479 PARAMETER Experiment Name: Zm_Drought_P Parameter: Plant Line Value: 35A19
  misc_feature: MA Experiment 20000479 PARAMETER Experiment Name: Zm_Drought_P Parameter: Timepoint (hr) Value: 48
  misc_feature: MA Experiment 20000479 PARAMETER Experiment Name: Zm_Drought_P Parameter: Tissue Value: Aerial
  misc_feature: MA Experiment 20000479 PARAMETER Experiment Name: Zm_Drought_P Parameter: Treatment Value: Drought vs. No Drought
  misc_feature: MA Experiment ID: 20000480 Result: Up-regulated in Transcription
  misc_feature: MA Experiment 20000480 PARAMETER Experiment Name: Zm_Drought_P Parameter: Age (day) Value: 11
  misc_feature: MA Experiment 20000480 PARAMETER Experiment Name: Zm_Drought_P Parameter: Organism Value: Zea mays
  misc_feature: MA Experiment 20000480 PARAMETER Experiment Name: Zm_Drought_P Parameter: Plant Line Value: 35A19
  misc_feature: MA Experiment 20000480 PARAMETER Experiment Name: Zm_Drought_P Parameter: Timepoint (hr) Value: 72
  misc_feature: MA Experiment 20000480 PARAMETER Experiment Name: Zm_Drought_P Parameter: Tissue Value: Aerial
  misc_feature: MA Experiment 20000480 PARAMETER Experiment Name: Zm_Drought_P Parameter: Treatment Value: Drought vs. No Drought
  misc_feature: MA Experiment ID: 20000492 Result: Down-regulated in Transcription
  misc_feature: MA Experiment 20000492 PARAMETER Experiment Name: Zm_Hybrid_Seed_Dev_P Parameter: DAP Value: 12
  misc_feature: MA Experiment 20000492 PARAMETER Experiment Name: Zm_Hybrid_Seed_Dev_P Parameter: Organism Value: Zea mays
  misc_feature: MA Experiment 20000492 PARAMETER Experiment Name: Zm_Hybrid_Seed_Dev_P Parameter: Plant Line Value: 35A19
  misc_feature: MA Experiment 20000492 PARAMETER Experiment Name: Zm_Hybrid_Seed_Dev_P Parameter: Tissue Value: Fert Kernel vs. Unfert Floret
gtttcggttcgcgtagcagaactgctcgtgcaacaagcaaacaacccaagagccgggagagttggtgactgcgaggccgagacagaggggatagattgagagagccagagaggtgggcagatggcgacaccgtcgtcgtcgctttgctccagcttcgcctccctgcggaccgcctccatcggccacccccgcggcatcgcgtcatctacacccaggaaggcgttccaagtgagggcatcagctcgggttgacaagttctcaaagagtgatatcattgtgtccccttcgattctgtctgcaaacttcgccaagcttggtgatcaggtaaaagccgtggaggtggcaggatgtgactggattcatgtcgatgtcatggacgggcgctttgtgccaaatatcacaattggacctttcgttgttgatgctctgcgtcctgtgactgatcttccattggatgtacatctgatgattgtggaacctgagcagcgagtccctgattttatcaaggcaggtgctgatattgttagtgtccactgtgaacaaacatcgaccatccatttgcacagaacagtcaatcagattaaaagtctaggagcaaaggcaggagttgttttgaatccagcgactccactcactgcaattgattacattcttgatgttgttgacctggtgttgattatgtctgtgaatcctgggtttggtggccagagctttatcgagagtcaagtaaggaaaattgcagaattgagaaggttatgtgcagagaagggagtgaacccctggattgaggttgatggtggtgttggtccgaaaaatgcctacaaggttattgaagctggggcgaatgccatcgttgctggctctgcagttttcggggctccagactacgctgaagctatcaaaggaatcaagaccagccaaaggcctgcagctgtacacgcataaggaactggacgtgtgatcgtgctctgttcaggtttagcagtgttgggattcgtatagatagatgtgtcttgttttcgagccatacgttatactggagatgaaaggagacggaggaaatatttctctacgtgggtgaatcaatcatgtggacggtaatcacatgacgacaaagcatatggacgagcgctggctcacgagacagagtaatcaacgggagaggcttctagacagctctgcatgtccattccctctataaacaggagagcagttcagtctccattgtaaaggcacccagatatagaagaaagaaataaagagctctctatttgtctctgtttc

SEQ ID NO: 11301 - protein, 274 aa, Zea mays subsp. mays
  peptide (1)..(274): Ceres Seq. ID no. 12412346
  misc_feature (52)..(254): Pfam Name: Ribulose-phosphate 3 epimerase family Pfam Description: Ribulose-phosphate 3 epimerase family
  misc_feature (1)..(274): Homolog of NCBI NO: 19071636 NR Description: ribulose-5-phosphate-3-epimerase [Oryza sativa
  misc_feature (1)..(274): Homolog of NCBI NO: 6647761 NR Description: Ribulose-phosphate 3-epimerase, chloroplast
  misc_feature (1)..(272): Homolog of NCBI NO: 20339362 NR Description: ribulose-5-phosphate-3-epimerase [Pisum sativum]
  misc_feature (15)..(272): Homolog of NCBI NO: 2499728 NR Description: Ribulose-phosphate 3-epimerase, chloroplast
  misc_feature (1)..(272): Homolog of NCBI NO: 15240250 NR Description: ribulose-5-phosphate-3-epimerase; protein id: supported by cDNA: gi_15027996, supported by cDNA: gi_20259208,
  misc_feature (41)..(269): Homolog of NCBI NO: 4930130 NR Description: Chain A, D-Ribulose-5-Phosphate 3-Epimerase From
  misc_feature (19)..(272): Homolog of NCBI NO: 2833386 NR Description: Ribulose-phosphate 3-epimerase, chloroplast
  misc_feature (19)..(272): Homolog of NCBI NO: 3264790 NR Description: ribulose-phosphate 3-epimerase transit form
  misc_feature (39)..(272): Homolog of NCBI NO: 3264792 NR Description: ribulose-phosphate 3-epimerase mature form
  misc_feature (47)..(269): Homolog of NCBI NO: 17228277 NR Description: ribulose-phosphate 3-epimerase [Nostoc sp. PCC
MATPSSSLCSSFASLRTASIGHPRGIASSTPRKAFQVRASARVDKFSKSDIIVSPSILSANFAKLGDQVKAVEVAGCDWIHVDVMDGRFVPNITIGPFVVDALRPVTDLPLDVHLMIVEPEQRVPDFIKAGADIVSVHCEQTSTIHLHRTVNQIKSLGAKAGVVLNPATPLTAIDYILDVVDLVLIMSVNPGFGGQSFIESQVRKIAELRRLCAEKGVNPWIEVDGGVGPKNAYKVIEAGANAIVAGSAVFGAPDYAEAIKGIKTSQRPAAVHA

SEQ ID NO: 11302 - protein, 190 aa, Zea mays subsp. mays
  peptide (1)..(190): Ceres Seq. ID no. 12412347
  misc_feature (1)..(170): Pfam Name: Ribulose-phosphate 3 epimerase family Pfam Description: Ribulose-phosphate 3 epimerase family
  misc_feature (1)..(190): Homolog of NCBI NO: 19071636 NR Description: ribulose-5-phosphate-3-epimerase [Oryza sativa
  misc_feature (1)..(190): Homolog of NCBI NO: 6647761 NR Description: Ribulose-phosphate 3-epimerase, chloroplast
  misc_feature (1)..(188): Homolog of NCBI NO: 20339362 NR Description: ribulose-5-phosphate-3-epimerase [Pisum sativum]
  misc_feature (1)..(188): Homolog of NCBI NO: 2499728 NR Description: Ribulose-phosphate 3-epimerase, chloroplast
  misc_feature (1)..(188): Homolog of NCBI NO: 15240250 NR Description: ribulose-5-phosphate-3-epimerase; protein id: supported by cDNA: gi_15027996, supported by cDNA: gi_20259208,
  misc_feature (1)..(185): Homolog of NCBI NO: 4930130 NR Description: Chain A, D-Ribulose-5-Phosphate 3-Epimerase From
  misc_feature (1)..(188): Homolog of NCBI NO: 2833386 NR Description: Ribulose-phosphate 3-epimerase, chloroplast
  misc_feature (1)..(188): Homolog of NCBI NO: 3264790 NR Description: ribulose-phosphate 3-epimerase transit form
  misc_feature (1)..(188): Homolog of NCBI NO: 3264792 NR Description: ribulose-phosphate 3-epimerase mature form
  misc_feature (1)..(185): Homolog of NCBI NO: 17228277 NR Description: ribulose-phosphate 3-epimerase [Nostoc sp. PCC
MDGRFVPNITIGPFVVDALRPVTDLPLDVHLMIVEPEQRVPDFIKAGADIVSVHCEQTSTIHLHRTVNQIKSLGAKAGVVLNPATPLTAIDYILDVVDLVLIMSVNPGFGGQSFIESQVRKIAELRRLCAEKGVNPWIEVDGGVGPKNAYKVIEAGANAIVAGSAVFGAPDYAEAIKGIKTSQRPAAVHA

SEQ ID NO: 11303 - protein, 159 aa, Zea mays subsp. mays
  peptide (1)..(159): Ceres Seq. ID no. 12412348
  misc_feature (1)..(139): Pfam Name: Ribulose-phosphate 3 epimerase family Pfam Description: Ribulose-phosphate 3 epimerase family
  misc_feature (1)..(159): Homolog of NCBI NO: 19071636 NR Description: ribulose-5-phosphate-3-epimerase [Oryza sativa
  misc_feature (1)..(159): Homolog of NCBI NO: 6647761 NR Description: Ribulose-phosphate 3-epimerase, chloroplast
  misc_feature (1)..(157): Homolog of NCBI NO: 20339362 NR Description: ribulose-5-phosphate-3-epimerase [Pisum sativum]
  misc_feature (1)..(157): Homolog of NCBI NO: 2499728 NR Description: Ribulose-phosphate 3-epimerase, chloroplast
  misc_feature (1)..(157): Homolog of NCBI NO: 15240250 NR Description: ribulose-5-phosphate-3-epimerase; protein id: supported by cDNA: gi_15027996, supported by cDNA: gi_20259208,
  misc_feature (1)..(154): Homolog of NCBI NO: 4930130 NR Description: Chain A, D-Ribulose-5-Phosphate 3-Epimerase From
  misc_feature (1)..(157): Homolog of NCBI NO: 2833386 NR Description: Ribulose-phosphate 3-epimerase, chloroplast
  misc_feature (1)..(157): Homolog of NCBI NO: 3264790 NR Description: ribulose-phosphate 3-epimerase transit form
  misc_feature (1)..(157): Homolog of NCBI NO: 3264792 NR Description: ribulose-phosphate 3-epimerase mature form
  misc_feature (1)..(154): Homolog of NCBI NO: 17228277 NR Description: ribulose-phosphate 3-epimerase [Nostoc sp. PCC
MIVEPEQRVPDFIKAGADIVSVHCEQTSTIHLHRTVNQIKSLGAKAGVVLNPATPLTAIDYILDVVDLVLIMSVNPGFGGQSFIESQVRKIAELRRLCAEKGVNPWIEVDGGVGPKNAYKVIEAGANAIVAGSAVFGAPDYAEAIKGIKTSQRPAAVHA

SEQ ID NO: 11304 - DNA, 1476 bp, Zea mays subsp. mays
  misc_feature (1)..(1476): Ceres Seq. ID no. 15180582
  misc_feature: MA Experiment ID: 20000534 Result: Up-regulated in Transcription
  misc_feature: MA Experiment 20000534 PARAMETER Experiment Name: Zm_Hybrid_Pollen_P Parameter: Age (day) Value: 8
  misc_feature: MA Experiment 20000534 PARAMETER Experiment Name: Zm_Hybrid_Pollen_P Parameter: Organism Value: Zea mays
  misc_feature: MA Experiment 20000534 PARAMETER Experiment Name: Zm_Hybrid_Pollen_P Parameter: Plant Line Value: 35A19
  misc_feature: MA Experiment 20000534 PARAMETER Experiment Name: Zm_Hybrid_Pollen_P Parameter: Tissue Value: Pollen vs. Aerial
tgtggagcctgggagaaatgagagattctctagttttaatttgaagtatgtagaagttgaataaagacctattggatcagaatattgggaaccgagatttgccggccaccaaagtctgcaagaaagagaggagtcatacaaagcccatgaccaacagttgacatgtgcttttgttaagggtccaaatggtacaagcactggttttgatatatctgatgatgatcgaaagtacatgagtaaatgccacattgctgtatcatcctgcatctttggaaattctgatcgactgaggactccatttagcaaaacgattacaagcctctcaaagaagacagtttgctttgctatgtttttggatgaagtcacattgcaaactttagaatctgaaggccagaaaatggacggcatgggtttcattggtatatggaagatcatattgattaagaatatgccgtataatgacatgcgtagagtggggaaaataccaaaatttttggcacacaggctatttccatcatcgaggttctcaatctggttagacagcaaactgagactacaaactgatcctatccttatcctagagtattttctctggcggcatggttatgaatatgctatttccaatcactatgatcgccattgtgtttgggaggaagtagcacaaaataaaaagctgaacaagttcaaccacacaataattgaccagcaatttgagttttatcaagcggatggactgacaaggttcaacccatcggatcccagcaggcttctaccaagctatgtccctgaaggctcttttatcgcaagagagcacacaccgatgtccaacttattttcctgcctgtggtacaatgaagttgatcgattcacacctcgtgaccagctcagctttgcatatacatacttaaaactgagaaggacaaatcctgacagaccattccgtctcaatatgtttaaggattgtgagagacgatcaatagcgaagctattccatcaccggacagaagagagacacaacagtgcacaattaacaagatgacacatccttcctagtgatggagggcagaagagagaggtcagggattgtattctttgatatagttcagctatccacaagactctccattgaaactttatgcccctgtctaggagtttgtactttatataatgcaagccttctttcctttgtcactccagtcctgcaggccagttcccgcctaacatttttttgcagttgacaaggcggattaggagtttctaactgtttggtttttctttgttctccgtaaatctctgtttattcttttgataatatggcccatggatgatctggggaagctatgagtgatcatggacttttcccagattgcccatgcacaatgtattattaccacaccactgtaggactgtgtagtgaggccattgttctcctgcaattctgactgaaatgtaccatacacaactagtaaattactc

SEQ ID NO: 11305 - protein, 268 aa, Zea mays subsp. mays
  peptide (1)..(268): Ceres Seq. ID no. 15180583
  misc_feature (1)..(255): Pfam Name: Protein of unknown function (DUF616) Pfam Description: Protein of unknown function (DUF616)
  misc_feature (1)..(265): Homolog of NCBI NO: 25403429 NR Description: protein F12K21.12 [imported] - Arabidopsis >gi|8778248|gb|AAF79257.1|AC023279_6 F12K21.12 [Arabidopsis
  misc_feature (1)..(265): Homolog of NCBI NO: 15233955 NR Description: expressed protein [Arabidopsis thaliana]
  misc_feature (1)..(242): Homolog of NCBI NO: 15218687 NR Description: hypothetical protein [Arabidopsis thaliana]
  misc_feature (1)..(258): Homolog of NCBI NO: 15227062 NR Description: hypothetical protein [Arabidopsis thaliana]
  misc_feature (1)..(265): Homolog of NCBI NO: 15217874 NR Description: expressed protein [Arabidopsis thaliana]
  misc_feature (1)..(265): Homolog of NCBI NO: 17064856 NR Description: Unknown protein [Arabidopsis thaliana]
  misc_feature (84)..(256): Homolog of NCBI NO: 34905662 NR Description: P0475H04.14 [Oryza sativa (japonica
  misc_feature (1)..(89): Homolog of NCBI NO: 34905662 NR Description: P0475H04.14 [Oryza sativa (japonica
  misc_feature (1)..(256): Homolog of NCBI NO: 25405617 NR Description: hypothetical protein F8L10.10 [imported] - thaliana >gi|9454542|gb|AAF87865.1|AC022520_9 Unknown protein
  misc_feature (1)..(256): Homolog of NCBI NO: 30695403 NR Description: expressed protein [Arabidopsis thaliana]
MSKCHIAVSSCIFGNSDRLRTPFSKTITSLSKKTVCFAMFLDEVTLQTLESEGQKMDGMGFIGIWKIILIKNMPYNDMRRVGKIPKFLAHRLFPSSRFSIWLDSKLRLQTDPILILEYFLWRHGYEYAISNHYDRHCVWEEVAQNKKLNKFNHTIIDQQFEFYQADGLTRFNPSDPSRLLPSYVPEGSFIAREHTPMSNLFSCLWYNEVDRFTPRDQLSFAYTYLKLRRTNPDRPFRLNMFKDCERRSIAKLFHHRTEERHNSAQLTR

SEQ ID NO: 11306 - protein, 230 aa, Zea mays subsp. mays
  peptide (1)..(230): Ceres Seq. ID no. 15180584
  misc_feature (1)..(217): Pfam Name: Protein of unknown function (DUF616) Pfam Description: Protein of unknown function (DUF616)
  misc_feature (1)..(227): Homolog of NCBI NO: 25403429 NR Description: protein F12K21.12 [imported] - Arabidopsis >gi|8778248|gb|AAF79257.1|AC023279_6 F12K21.12 [Arabidopsis
  misc_feature (1)..(227): Homolog of NCBI NO: 15233955 NR Description: expressed protein [Arabidopsis thaliana]
  misc_feature (1)..(204): Homolog of NCBI NO: 15218687 NR Description: hypothetical protein [Arabidopsis thaliana]
  misc_feature (1)..(220): Homolog of NCBI NO: 15227062 NR Description: hypothetical protein [Arabidopsis thaliana]
  misc_feature (1)..(227): Homolog of NCBI NO: 15217874 NR Description: expressed protein [Arabidopsis thaliana]
  misc_feature (1)..(227): Homolog of NCBI NO: 17064856 NR Description: Unknown protein [Arabidopsis thaliana]
  misc_feature (46)..(218): Homolog of NCBI NO: 34905662 NR Description: P0475H04.14 [Oryza sativa (japonica
  misc_feature (1)..(51): Homolog of NCBI NO: 34905662 NR Description: P0475H04.14 [Oryza sativa (japonica
  misc_feature (1)..(218): Homolog of NCBI NO: 25405617 NR Description: hypothetical protein F8L10.10 [imported] - thaliana >gi|9454542|gb|AAF87865.1|AC022520_9 Unknown protein
  misc_feature (1)..(218): Homolog of NCBI NO: 30695403 NR Description: expressed protein [Arabidopsis thaliana]
MFLDEVTLQTLESEGQKMDGMGFIGIWKIILIKNMPYNDMRRVGKIPKFLAHRLFPSSRFSIWLDSKLRLQTDPILILEYFLWRHGYEYAISNHYDRHCVWEEVAQNKKLNKFNHTIIDQQFEFYQADGLTRFNPSDPSRLLPSYVPEGSFIAREHTPMSNLFSCLWYNEVDRFTPRDQLSFAYTYLKLRRTNPDRPFRLNMFKDCERRSIAKLFHHRTEERHNSAQLTR

SEQ ID NO: 11307 - protein, 213 aa, Zea mays subsp. mays
  peptide (1)..(213): Ceres Seq. ID no. 15180585
  misc_feature (1)..(200): Pfam Name: Protein of unknown function (DUF616) Pfam Description: Protein of unknown function (DUF616)
  misc_feature (1)..(210): Homolog of NCBI NO: 25403429 NR Description: protein F12K21.12 [imported] - Arabidopsis >gi|8778248|gb|AAF79257.1|AC023279_6 F12K21.12 [Arabidopsis
  misc_feature (1)..(210): Homolog of NCBI NO: 15233955 NR Description: expressed protein [Arabidopsis thaliana]
  misc_feature (1)..(187): Homolog of NCBI NO: 15218687 NR Description: hypothetical protein [Arabidopsis thaliana]
  misc_feature (1)..(203): Homolog of NCBI NO: 15227062 NR Description: hypothetical protein [Arabidopsis thaliana]
  misc_feature (1)..(210): Homolog of NCBI NO: 15217874 NR Description: expressed protein [Arabidopsis thaliana]
  misc_feature (1)..(210): Homolog of NCBI NO: 17064856 NR Description: Unknown protein [Arabidopsis thaliana]
  misc_feature (29)..(201): Homolog of NCBI NO: 34905662 NR Description: P0475H04.14 [Oryza sativa (japonica
  misc_feature (1)..(34): Homolog of NCBI NO: 34905662 NR Description: P0475H04.14 [Oryza sativa (japonica
  misc_feature (1)..(201): Homolog of NCBI NO: 25405617 NR Description: hypothetical protein F8L10.10 [imported] - thaliana >gi|9454542|gb|AAF87865.1|AC022520_9 Unknown protein
  misc_feature (1)..(201): Homolog of NCBI NO: 30695403 NR Description: expressed protein [Arabidopsis thaliana]
MDGMGFIGIWKIILIKNMPYNDMRRVGKIPKFLAHRLFPSSRFSIWLDSKLRLQTDPILILEYFLWRHGYEYAISNHYDRHCVWEEVAQNKKLNKFNHTIIDQQFEFYQADGLTRFNPSDPSRLLPSYVPEGSFIAREHTPMSNLFSCLWYNEVDRFTPRDQLSFAYTYLKLRRTNPDRPFRLNMFKDCERRSIAKLFHHRTEERHNSAQLTR

SEQ ID NO: 11308 - DNA, 1552 bp, Zea mays subsp. mays
  misc_feature (1)..(1552): Ceres Seq. ID no. 12355643
  misc_feature: MA Experiment ID: 108523 Result: Up-regulated in Transcription
  misc_feature: MA Experiment 108523 PARAMETER Experiment Name: Zm_42deg_Heat_P Parameter: Age (day) Value: 8
  misc_feature: MA Experiment 108523 PARAMETER Experiment Name: Zm_42deg_Heat_P Parameter: Organism Value: Zea mays
  misc_feature: MA Experiment 108523 PARAMETER Experiment Name: Zm_42deg_Heat_P Parameter: Plant Line Value: 35A19
  misc_feature: MA Experiment 108523 PARAMETER Experiment Name: Zm_42deg_Heat_P Parameter: Temperature (deg C) Value: 42 vs. 22
  misc_feature: MA Experiment 108523 PARAMETER Experiment Name: Zm_42deg_Heat_P Parameter: Timepoint (hr) Value: 6
  misc_feature: MA Experiment 108523 PARAMETER Experiment Name: Zm_42deg_Heat_P Parameter: Tissue Value: Aerial
  misc_feature: MA Experiment ID: 108534 Result: Down-regulated in Transcription
  misc_feature: MA Experiment 108534 PARAMETER Experiment Name: Zm_4deg_Cold_P Parameter: Age (hr) Value: 8
  misc_feature: MA Experiment 108534 PARAMETER Experiment Name: Zm_4deg_Cold_P Parameter: Organism Value: Zea mays
  misc_feature: MA Experiment 108534 PARAMETER Experiment Name: Zm_4deg_Cold_P Parameter: Plant Line Value: 35A19
  misc_feature: MA Experiment 108534 PARAMETER Experiment Name: Zm_4deg_Cold_P Parameter: Temperature (deg C) Value: 4 vs. 22
  misc_feature: MA Experiment 108534 PARAMETER Experiment Name: Zm_4deg_Cold_P Parameter: Timepoint (hr) Value: 6
  misc_feature: MA Experiment 108534 PARAMETER Experiment Name: Zm_4deg_Cold_P Parameter: Tissue Value: Aerial
  misc_feature: MA Experiment ID: 108535 Result: Up-regulated in Transcription
  misc_feature: MA Experiment 108535 PARAMETER Experiment Name: Zm_Meristem_P Parameter: Age (day) Value: 8
  misc_feature: MA Experiment 108535 PARAMETER Experiment Name: Zm_Meristem_P Parameter: Organism Value: Zea mays
  misc_feature: MA Experiment 108535 PARAMETER Experiment Name: Zm_Meristem_P Parameter: Plant Line Value: 35A19
  misc_feature: MA Experiment 108535 PARAMETER Experiment Name: Zm_Meristem_P Parameter: Tissue Value: Root Meristem vs. Above Root Meristem
  misc_feature: MA Experiment ID: 20000480 Result: Up-regulated in Transcription
  misc_feature: MA Experiment 20000480 PARAMETER Experiment Name: Zm_Drought_P Parameter: Age (day) Value: 11
  misc_feature: MA Experiment 20000480 PARAMETER Experiment Name: Zm_Drought_P Parameter: Organism Value: Zea mays
  misc_feature: MA Experiment 20000480 PARAMETER Experiment Name: Zm_Drought_P Parameter: Plant Line Value: 35A19
  misc_feature: MA Experiment 20000480 PARAMETER Experiment Name: Zm_Drought_P Parameter: Timepoint (hr) Value: 72
  misc_feature: MA Experiment 20000480 PARAMETER Experiment Name: Zm_Drought_P Parameter: Tissue Value: Aerial
  misc_feature: MA Experiment 20000480 PARAMETER Experiment Name: Zm_Drought_P Parameter: Treatment Value: Drought vs. No Drought
ataggccataggttgccctgcgggttttacaaaacaagaagaaaaaaaatcacctgctcaacggcggcatcatcggcaagacggcgggtttctgtaccaatctcagccttcgtgtctatctgattccaggaatcaagcgtattgtggtgaacatgaactccacatcttctcagcgtggttaccctgccaagaggtggtgtgcagcgaacatgagctccacatctatgcgtcactctgcatggaagtctgagccctggactcaccttacccacaaacagagacgaccacaatggattgcttataatccaaggacaatgaggcctccaccacttagcactgataccaattctatgaagattctgtcctggaacgttaatggactgcaagctattgtacagtcagggttttctgcagatgaattggttgccagagagaactttgacgtcttatgtcttcaagagacacacttggaggagcgcaatgttgacctttttaaaaacctggtacatgaatatgattacacctgttggtcatgcagtgttgcaaggcttggttattcaggaactgctgttatatcacgggtacaaccaatctcagttcaatatgggcttggcataccagagcatgatcaggaaggcaggcttattaccttggagtttgatgatttttacttggtcaatgcttatgtcccaaattctggccgtggtttacgtagactgaattacaggatcaatgattgggatccatgctttagcgacttcataaagaaactggaatgttctaaaccagtaattgttgctggggatctaaactgtgctcgtcaaagtattgacattcacaatcctcaagcaaaaaccgaggctgcaggtttcacaattgaagagagagagtcatttgaggtcaacttctcaagaaaaggcctcgttgatacattccgtaaacaacacccgaatgcagtggcctacactttctggggtgaaaaccagcgcattaccaacaaaggctggagactggattactttcttgcgtcagagtctattgccgacaaggtccatgattcttacactctgccagatgtagcgctcagcgatcacagtccaattggccttttgctgaagttgtaggcacttatacatctctcagctatttgacaactaaagcaggaagttttaacatcgtcctagataaaagacttgtagaaagattttgcttatgtaggctgaaaactattcaaactcgggtggtacttcgcgtggtctcctgtcgtctgtggaggttgtggatagactattcacgttgtgttcgagaagttaaaacatagcctagaacaattagctgatgttctatagcttgtgaatacatctgtttagtcggcgtaaccggcgaaagagcatctagccgaggagcatctagtcaagttagttaggtggtctaagtagcacctcttaagtgttgagtttgactctccgtggcaacaaattttaggcttggggtaaaaaaacctcttgtttatcccacgctaaagcatatgtctaagacccggtttccggtc

SEQ ID NO: 11309 - protein, 323 aa, Zea mays subsp. mays
  peptide (1)..(323): Ceres Seq. ID no. 12355644
  misc_feature (67)..(321): Pfam Name: Endonuclease/Exonuclease/phosphatase family Pfam Description: Endonuclease/Exonuclease/phosphatase family
  misc_feature (33)..(323): Homolog of NCBI NO: 34908950 NR Description: putative exodeoxyribonuclease [Oryza sativa
  misc_feature (33)..(323): Homolog of NCBI NO: 34908948 NR Description: putative exodeoxyribonuclease [Oryza sativa
  misc_feature (31)..(323): Homolog of NCBI NO: 472869 NR Description: ARP protein [Arabidopsis thaliana]
  misc_feature (31)..(323): Homolog of NCBI NO: 15227354 NR Description: DNA-(apurinic or apyrimidinic site) lyase (ARP); id: At2g41460.1 [Arabidopsis thaliana]
  misc_feature (67)..(319): Homolog of NCBI NO: 30021833 NR Description: Exodeoxyribonuclease III [Bacillus cereus ATCC >gi|29897389|gb|AAP10665.1| Exodeoxyribonuclease III [Bacillus
  misc_feature (67)..(322): Homolog of NCBI NO: 20808602 NR Description: Exonuclease III [Thermoanaerobacter >gi|20517232|gb|AAM25377.1| Exonuclease III [Thermoanaerobacter
  misc_feature (67)..(323): Homolog of NCBI NO: 16800960 NR Description: similar to 3'-exo-deoxyribonuclease exoA
  misc_feature (11)..(323): Homolog of NCBI NO: 28829076 NR Description: similar to Dictyostelium discoideum (Slime mold).
  misc_feature (67)..(323): Homolog of NCBI NO: 16803822 NR Description: similar to 3'-exo-deoxyribonuclease exoA [Listeria
  misc_feature (11)..(323): Homolog of NCBI NO: 1703336 NR Description: DNA-(apurinic or apyrimidinic site) lyase (Class
MNSTSSQRGYPAKRWCAANMSSTSMRHSAWKSEPWTHLTHKQRRPQWIAYNPRTMRPPPLSTDTNSMKILSWNVNGLQAIVQSGFSADELVARENFDVLCLQETHLEERNVDLFKNLVHEYDYTCWSCSVARLGYSGTAVISRVQPISVQYGLGIPEHDQEGRLITLEFDDFYLVNAYVPNSGRGLRRLNYRINDWDPCFSDFIKKLECSKPVIVAGDLNCARQSIDIHNPQAKTEAAGFTIEERESFEVNFSRKGLVDTFRKQHPNAVAYTFWGENQRITNKGWRLDYFLASESIADKVHDSYTLPDVALSDHSPIGLLLKL

SEQ ID NO: 11310 - protein, 304 aa, Zea mays subsp. mays
  peptide (1)..(304): Ceres Seq. ID no. 12355645
  misc_feature (48)..(302): Pfam Name: Endonuclease/Exonuclease/phosphatase family Pfam Description: Endonuclease/Exonuclease/phosphatase family
  misc_feature (14)..(304): Homolog of NCBI NO: 34908950 NR Description: putative exodeoxyribonuclease [Oryza sativa
  misc_feature (14)..(304): Homolog of NCBI NO: 34908948 NR Description: putative exodeoxyribonuclease [Oryza sativa
  misc_feature (12)..(304): Homolog of NCBI NO: 472869 NR Description: ARP protein [Arabidopsis thaliana]
  misc_feature (12)..(304): Homolog of NCBI NO: 15227354 NR Description: DNA-(apurinic or apyrimidinic site) lyase (ARP); id: At2g41460.1 [Arabidopsis thaliana]
  misc_feature (48)..(300): Homolog of NCBI NO: 30021833 NR Description: Exodeoxyribonuclease III [Bacillus cereus ATCC >gi|29897389|gb|AAP10665.1| Exodeoxyribonuclease III [Bacillus
  misc_feature (48)..(303): Homolog of NCBI NO: 20808602 NR Description: Exonuclease III [Thermoanaerobacter >gi|20517232|gb|AAM25377.1| Exonuclease III [Thermoanaerobacter
  misc_feature (48)..(304): Homolog of NCBI NO: 16800960 NR Description: similar to 3'-exo-deoxyribonuclease exoA
  misc_feature (1)..(304): Homolog of NCBI NO: 28829076 NR Description: similar to Dictyostelium discoideum (Slime mold).
  misc_feature (48)..(304): Homolog of NCBI NO: 16803822 NR Description: similar to 3'-exo-deoxyribonuclease exoA [Listeria
  misc_feature (1)..(304): Homolog of NCBI NO: 1703336 NR Description: DNA-(apurinic or apyrimidinic site) lyase (Class
MSSTSMRHSAWKSEPWTHLTHKQRRPQWIAYNPRTMRPPPLSTDTNSMKILSWNVNGLQAIVQSGFSADELVARENFDVLCLQETHLEERNVDLFKNLVHEYDYTCWSCSVARLGYSGTAVISRVQPISVQYGLGIPEHDQEGRLITLEFDDFYLVNAYVPNSGRGLRRLNYRINDWDPCFSDFIKKLECSKPVIVAGDLNCARQSIDIHNPQAKTEAAGFTIEERESFEVNFSRKGLVDTFRKQHPNAVAYTFWGENQRITNKGWRLDYFLASESIADKVHDSYTLPDVALSDHSPIGLLLKL

SEQ ID NO: 11311 - protein, 299 aa, Zea mays subsp. mays
  peptide (1)..(299): Ceres Seq. ID no. 12355646
  misc_feature (43)..(297): Pfam Name: Endonuclease/Exonuclease/phosphatase family Pfam Description: Endonuclease/Exonuclease/phosphatase family
  misc_feature (9)..(299): Homolog of NCBI NO: 34908950 NR Description: putative exodeoxyribonuclease [Oryza sativa
  misc_feature (9)..(299): Homolog of NCBI NO: 34908948 NR Description: putative exodeoxyribonuclease [Oryza sativa
  misc_feature (7)..(299): Homolog of NCBI NO: 472869 NR Description: ARP protein [Arabidopsis thaliana]
  misc_feature (7)..(299): Homolog of NCBI NO: 15227354 NR Description: DNA-(apurinic or apyrimidinic site) lyase (ARP); id: At2g41460.1 [Arabidopsis thaliana]
  misc_feature (43)..(295): Homolog of NCBI NO: 30021833 NR Description: Exodeoxyribonuclease III [Bacillus cereus ATCC >gi|29897389|gb|AAP10665.1| Exodeoxyribonuclease III [Bacillus
  misc_feature (43)..(298): Homolog of NCBI NO: 20808602 NR Description: Exonuclease III [Thermoanaerobacter >gi|20517232|gb|AAM25377.1| Exonuclease III [Thermoanaerobacter
  misc_feature (43)..(299): Homolog of NCBI NO: 16800960 NR Description: similar to 3'-exo-deoxyribonuclease exoA
  misc_feature (1)..(299): Homolog of NCBI NO: 28829076 NR Description: similar to Dictyostelium discoideum (Slime mold).
  misc_feature (43)..(299): Homolog of NCBI NO: 16803822 NR Description: similar to 3'-exo-deoxyribonuclease exoA [Listeria
  misc_feature (1)..(299): Homolog of NCBI NO: 1703336 NR Description: DNA-(apurinic or apyrimidinic site) lyase (Class
MRHSAWKSEPWTHLTHKQRRPQWIAYNPRTMRPPPLSTDTNSMKILSWNVNGLQAIVQSGFSADELVARENFDVLCLQETHLEERNVDLFKNLVHEYDYTCWSCSVARLGYSGTAVISRVQPISVQYGLGIPEHDQEGRLITLEFDDFYLVNAYVPNSGRGLRRLNYRINDWDPCFSDFIKKLECSKPVIVAGDLNCARQSIDIHNPQAKTEAAGFTIEERESFEVNFSRKGLVDTFRKQHPNAVAYTFWGENQRITNKGWRLDYFLASESIADKVHDSYTLPDVALSDHSPIGLLLKL

SEQ ID NO: 11312 - DNA, 1828 bp, Zea mays subsp. mays
  misc_feature (1)..(1828): Ceres Seq. ID no. 12374352
  misc_feature: MA Experiment ID: 108504 Result: Down-regulated in Transcription
  misc_feature: MA Experiment 108504 PARAMETER Experiment Name: Zm_Drought_P Parameter: Age (day) Value: 8
  misc_feature: MA Experiment 108504 PARAMETER Experiment Name: Zm_Drought_P Parameter: Organism Value: Zea mays
  misc_feature: MA Experiment 108504 PARAMETER Experiment Name: Zm_Drought_P Parameter: Plant Line Value: 35A19
  misc_feature: MA Experiment 108504 PARAMETER Experiment Name: Zm_Drought_P Parameter: Timepoint (hr) Value: 12
  misc_feature: MA Experiment 108504 PARAMETER Experiment Name: Zm_Drought_P Parameter: Tissue Value: Aerial
  misc_feature: MA Experiment 108504 PARAMETER Experiment Name: Zm_Drought_P Parameter: Treatment Value: Drought vs. No Drought
  misc_feature: MA Experiment ID: 108523 Result: Down-regulated in Transcription
  misc_feature: MA Experiment 108523 PARAMETER Experiment Name: Zm_42deg_Heat_P Parameter: Age (day) Value: 8
  misc_feature: MA Experiment 108523 PARAMETER Experiment Name: Zm_42deg_Heat_P Parameter: Organism Value: Zea mays
  misc_feature: MA Experiment 108523 PARAMETER Experiment Name: Zm_42deg_Heat_P Parameter: Plant Line Value: 35A19
  misc_feature: MA Experiment 108523 PARAMETER Experiment Name: Zm_42deg_Heat_P Parameter: Temperature (deg C) Value: 42 vs. 22
  misc_feature: MA Experiment 108523 PARAMETER Experiment Name: Zm_42deg_Heat_P Parameter: Timepoint (hr) Value: 6
  misc_feature: MA Experiment 108523 PARAMETER Experiment Name: Zm_42deg_Heat_P Parameter: Tissue Value: Aerial
  misc_feature: MA Experiment ID: 108528 Result: Up-regulated in Transcription
  misc_feature: MA Experiment 108528 PARAMETER Experiment Name: Zm_Imbibed_Seeds_P Parameter: Age (day) Value: 5 vs. 2
  misc_feature: MA Experiment 108528 PARAMETER Experiment Name: Zm_Imbibed_Seeds_P Parameter: Organism Value: Zea mays
  misc_feature: MA Experiment 108528 PARAMETER Experiment Name: Zm_Imbibed_Seeds_P Parameter: Plant Line Value: 35A19
  misc_feature: MA Experiment 108528 PARAMETER Experiment Name: Zm_Imbibed_Seeds_P Parameter: Tissue Value: Aerial vs. Embryo
  misc_feature: MA Experiment ID: 108529 Result: Down-regulated in Transcription
  misc_feature: MA Experiment 108529 PARAMETER Experiment Name: Zm_Imbibed_Seeds_P Parameter: Age (day) Value: 5 vs. 2
  misc_feature: MA Experiment 108529 PARAMETER Experiment Name: Zm_Imbibed_Seeds_P Parameter: Organism Value: Zea mays
  misc_feature: MA Experiment 108529 PARAMETER Experiment Name: Zm_Imbibed_Seeds_P Parameter: Plant Line Value: 35A19
  misc_feature: MA Experiment 108529 PARAMETER Experiment Name: Zm_Imbibed_Seeds_P Parameter: Tissue Value: Roots vs. Embryo
  misc_feature: MA Experiment ID: 108530 Result: Up-regulated in Transcription
  misc_feature: MA Experiment 108530 PARAMETER Experiment Name: Zm_Imbibed_Seeds_P Parameter: Age (day) Value: 6 vs. 2
  misc_feature: MA Experiment 108530 PARAMETER Experiment Name: Zm_Imbibed_Seeds_P Parameter: Organism Value: Zea mays
  misc_feature: MA Experiment 108530 PARAMETER Experiment Name: Zm_Imbibed_Seeds_P Parameter: Plant Line Value: 35A19
  misc_feature: MA Experiment 108530 PARAMETER Experiment Name: Zm_Imbibed_Seeds_P Parameter: Tissue Value: Aerial vs. Embryo
  misc_feature: MA Experiment ID: 108535 Result: Up-regulated in Transcription
  misc_feature: MA Experiment 108535 PARAMETER Experiment Name: Zm_Meristem_P Parameter: Age (day) Value: 8
  misc_feature: MA Experiment 108535 PARAMETER Experiment Name: Zm_Meristem_P Parameter: Organism Value: Zea mays
  misc_feature: MA Experiment 108535 PARAMETER Experiment Name: Zm_Meristem_P Parameter: Plant Line Value: 35A19
  misc_feature: MA Experiment 108535 PARAMETER Experiment Name: Zm_Meristem_P Parameter: Tissue Value: Root Meristem vs. Above Root Meristem
  misc_feature: MA Experiment ID: 108536 Result: Down-regulated in Transcription
  misc_feature: MA Experiment 108536 PARAMETER Experiment Name: Zm_Meristem_P Parameter: Age (day) Value: 8
  misc_feature: MA Experiment 108536 PARAMETER Experiment Name: Zm_Meristem_P Parameter: Organism Value: Zea mays
  misc_feature: MA Experiment 108536 PARAMETER Experiment Name: Zm_Meristem_P Parameter: Plant Line Value: 35A19
  misc_feature: MA Experiment 108536 PARAMETER Experiment Name: Zm_Meristem_P Parameter: Tissue Value: Shoot Meristem vs. Above Shoot Meristem
  misc_feature: MA Experiment ID: 108543 Result: Up-regulated in Transcription
  misc_feature: MA Experiment ID: 108544 Result: Down-regulated in Transcription
  misc_feature: MA Experiment ID: 108545 Result: Up-regulated in Transcription
  misc_feature: MA Experiment 108545 PARAMETER Experiment Name: Zm_Imbibed_Seeds_P Parameter: Age (day) Value: 3 vs. 2
  misc_feature: MA Experiment 108545 PARAMETER Experiment Name: Zm_Imbibed_Seeds_P Parameter: Organism Value: Zea mays
  misc_feature: MA Experiment 108545 PARAMETER Experiment Name: Zm_Imbibed_Seeds_P Parameter: Plant Line Value: 35A19
  misc_feature: MA Experiment 108545 PARAMETER Experiment Name: Zm_Imbibed_Seeds_P Parameter: Tissue Value: Aerial vs. Embryo
  misc_feature: MA Experiment ID: 108547 Result: Up-regulated in Transcription
  misc_feature: MA Experiment 108547 PARAMETER Experiment Name: Zm_Imbibed_Seeds_P Parameter: Age (day) Value: 4 vs. 2
  misc_feature: MA Experiment 108547 PARAMETER Experiment Name: Zm_Imbibed_Seeds_P Parameter: Organism Value: Zea mays
  misc_feature: MA Experiment 108547 PARAMETER Experiment Name: Zm_Imbibed_Seeds_P Parameter: Plant Line Value: 35A19
  misc_feature: MA Experiment 108547 PARAMETER Experiment Name: Zm_Imbibed_Seeds_P Parameter: Tissue Value: Aerial vs. Embryo
  misc_feature: MA Experiment ID: 108556 Result: Down-regulated in Transcription
  misc_feature: MA Experiment 108556 PARAMETER Experiment Name: Zm_Drought_P Parameter: Age (day) Value: 9
  misc_feature: MA Experiment 108556 PARAMETER Experiment Name: Zm_Drought_P Parameter: Organism Value: Zea mays
  misc_feature: MA Experiment 108556 PARAMETER Experiment Name: Zm_Drought_P Parameter: Plant Line Value: 35A19
  misc_feature: MA Experiment 108556 PARAMETER Experiment Name: Zm_Drought_P Parameter: Timepoint (hr) Value: 24
  misc_feature: MA Experiment 108556 PARAMETER Experiment Name: Zm_Drought_P Parameter: Tissue Value: Aerial
  misc_feature: MA Experiment 108556 PARAMETER Experiment Name: Zm_Drought_P Parameter: Treatment Value: Drought vs. No Drought
  misc_feature: MA Experiment ID: 108559 Result: Down-regulated in Transcription
  misc_feature: MA Experiment 108559 PARAMETER Experiment Name: Zm_5mM_NO_P Parameter: Age (day) Value: 8
  misc_feature: MA Experiment 108559 PARAMETER Experiment Name: Zm_5mM_NO_P Parameter: Organism Value: Zea mays
  misc_feature: MA Experiment 108559 PARAMETER Experiment Name: Zm_5mM_NO_P Parameter: Plant Line Value: 35A19
  misc_feature: MA Experiment 108559 PARAMETER Experiment Name: Zm_5mM_NO_P Parameter: Timepoint (hr) Value: 12
  misc_feature: MA Experiment 108559 PARAMETER Experiment Name: Zm_5mM_NO_P Parameter: Tissue Value: Aerial
  misc_feature: MA Experiment 108559 PARAMETER Experiment Name: Zm_5mM_NO_P Parameter: Treatment Value: 5mM NO vs. No Treatment
  misc_feature: MA Experiment ID: 108597 Result: Down-regulated in Transcription
  misc_feature: MA Experiment 108597 PARAMETER Experiment Name: Zm_100uM_ABA_P Parameter: Age (day) Value: 9
  misc_feature: MA Experiment 108597 PARAMETER Experiment Name: Zm_100uM_ABA_P Parameter: Organism Value: Zea mays
  misc_feature: MA Experiment 108597 PARAMETER Experiment Name: Zm_100uM_ABA_P Parameter: Plant Line Value: 35A19
  misc_feature: MA Experiment 108597 PARAMETER Experiment Name: Zm_100uM_ABA_P Parameter: Timepoint (hr) Value: 24
  misc_feature: MA Experiment 108597 PARAMETER Experiment Name: Zm_100uM_ABA_P Parameter: Tissue Value: Aerial
  misc_feature: MA Experiment 108597 PARAMETER Experiment Name: Zm_100uM_ABA_P Parameter: Treatment Value: 100uM ABA vs. No Treatment
  misc_feature: MA Experiment ID: 108687 Result: Down-regulated in Transcription
  misc_feature: MA Experiment 108687 PARAMETER Experiment Name: Zm_Embryos-Flowers__P Parameter: Tissue Value: Embryo vs. Aerial+
  misc_feature: MA Experiment ID: 108688 Result: Down-regulated in Transcription
  misc_feature: MA Experiment 108688 PARAMETER Experiment Name: Zm_Embryos-Flowers__P Parameter: Tissue Value: Immature Flowers vs. Aerial+
  misc_feature: MA Experiment ID: 20000108 Result: Up-regulated in Transcription
  misc_feature: MA Experiment 20000108 PARAMETER Experiment Name: Zm_Root-Tips_P Parameter: Age (day) Value: 12
  misc_feature: MA Experiment 20000108 PARAMETER Experiment Name: Zm_Root-Tips_P Parameter: Organism Value: Zea mays
  misc_feature: MA Experiment 20000108 PARAMETER Experiment Name: Zm_Root-Tips_P Parameter: Tissue Value: Root tips vs. Root mid region    35
  misc_feature: MA Experiment 20000108 PARAMETER Experiment Name: Zm_Root-Tips_P Parameter: Tissue Value: Root tips vs. Root mid region   Sequence Listing-Misc Features (4)
  misc_feature: MA Experiment ID: 20000478 Result: Down-regulated in Transcription
  misc_feature: MA Experiment 20000478 PARAMETER Experiment Name: Zm_5mM_SA_P Parameter: Age (day) Value: 11
  misc_feature: MA Experiment 20000478 PARAMETER Experiment Name: Zm_5mM_SA_P Parameter: Organism Value: Zea mays
  misc_feature: MA Experiment 20000478 PARAMETER Experiment Name: Zm_5mM_SA_P Parameter: Plant Line Value: 35A19
  misc_feature: MA Experiment 20000478 PARAMETER Experiment Name: Zm_5mM_SA_P Parameter: Timepoint (hr) Value: 72
  misc_feature: MA Experiment 20000478 PARAMETER Experiment Name: Zm_5mM_SA_P Parameter: Tissue Value: Aerial
  misc_feature: MA Experiment 20000478 PARAMETER Experiment Name: Zm_5mM_SA_P Parameter: Treatment Value: 5mM SA vs. No Treatment
  misc_feature: MA Experiment ID: 20000480 Result: Down-regulated in Transcription
  misc_feature: MA Experiment 20000480 PARAMETER Experiment Name: Zm_Drought_P Parameter: Age (day) Value: 11
  misc_feature: MA Experiment 20000480 PARAMETER Experiment Name: Zm_Drought_P Parameter: Organism Value: Zea mays
  misc_feature: MA Experiment 20000480 PARAMETER Experiment Name: Zm_Drought_P Parameter: Plant Line Value: 35A19
  misc_feature: MA Experiment 20000480 PARAMETER Experiment Name: Zm_Drought_P Parameter: Timepoint (hr) Value: 72
  misc_feature: MA Experiment 20000480 PARAMETER Experiment Name: Zm_Drought_P Parameter: Tissue Value: Aerial
  misc_feature: MA Experiment 20000480 PARAMETER Experiment Name: Zm_Drought_P Parameter: Treatment Value: Drought vs. No Drought
  misc_feature: MA Experiment ID: 20000535 Result: Down-regulated in Transcription
  misc_feature: MA Experiment 20000535 PARAMETER Experiment Name: Zm_Hybrid_Seed_Dev_P Parameter: DAP Value: 30 vs. 12
  misc_feature: MA Experiment 20000535 PARAMETER Experiment Name: Zm_Hybrid_Seed_Dev_P Parameter: Organism Value: Zea mays
  misc_feature: MA Experiment 20000535 PARAMETER Experiment Name: Zm_Hybrid_Seed_Dev_P Parameter: Plant Line Value: 35A19
  misc_feature: MA Experiment 20000535 PARAMETER Experiment Name: Zm_Hybrid_Seed_Dev_P Parameter: Tissue Value: Embryo vs. Unfert Floret
  misc_feature: MA Experiment ID: 20000626 Result: Down-regulated in Transcription
  misc_feature: MA Experiment 20000626 PARAMETER Experiment Name: Zm_Herbicide-Treatments_P Parameter: Timepoint (hr) Value: 12
  misc_feature: MA Experiment 20000626 PARAMETER Experiment Name: Zm_Herbicide-Treatments_P Parameter: Tissue Value: Aerial
  misc_feature: MA Experiment 20000626 PARAMETER Experiment Name: Zm_Herbicide-Treatments_P Parameter: Treatment Value: Roundup vs. No Treatment
acgcgaatccgcatctccagactccaaccagcgctcgtccctccccgttctttcctcctcccttcagccatcgcagtcgcagcgcaggttcttggctggttgctggtgtcgacagcaaagtccgcaactccaatcctgcctgcgctcctcccgtcctcactcagcacccgcgcacgccgcctgcctgtcgattgagatctctttcacgcccctttctgccatcgcacaactgaggtacggttctttgcttattgcagagtatagtatggatgcccgcagtgagtcgtcgtgtcgtgccttcagtaggagccgcagctagtaacatccattttgctggtcaataagtcgtgggaggaagaagatggattatttgaaggtgcaggtggtagagtcatcatttgtagtgccgagcgagccgacggccaacgaaggcgctctggctctcttgcttggacatggttcagtccaacaaagcccacaccccaacgatccacttgtacagctccaacgatgctgcggcggctgattttttcgacctgggcagactcaagaaggctacggccaaagccttggtggccttctaccccctcgccggacgcctcgtcgacagcgacgatggtaggaaggagatcagctgcaacggcgaaggtgcactctttgttgtcgctcgcgcggatggtgatctcactatcgatgaagtcaagaaattcaagccatcaccagagttgaggaggctgtttattccactcatcgagccatcgtccatcataatggccatacaggtgactttcttgaagtgtggaggtgtggtgttaggaacagctatccaccacgccgccacagacgtttcaagcgcgttccacttttttcagacatggtcggcgttctgcaagcatggtgacagtgctgccgtggagctcccgtgccacgaccgcaccctactccgcgcacggtccccgcccacagtccaccccgacgcgctctccacattgcagcctcggctcgtcctcactgaacccgaggggcctcttgccatcgaaatcttcaccatttccagggatcatgtcgcctccctgaagcagctctgcggtggcacgagcaccttttgcgccgtcagcgctctcatctggcagtgcgcgtgcgttgcacgacggatcccaccggactctcaggtgcgcgtgatgttcccggccgacgtccgccgccggatgaggccgcccctcccgacccactacttcggcaacgcagtgatcaggctatacgccgctggcccggcaggggacattggcacggcggcgttggcatccgtcgctgcccgcatcaagggcgccgtcgagcggatggatgacgagctggtgcggtccgcgattgactactacgagatggccgagacgaacaagagacggactgggacaggcatcttaccaccgacggacctgaatattaccagctggttgggtaggccacagcacgacgcagattttggctggggaaagccgcaatccatgtcgcgggcggagtctgtccgcggcggctctatgcacttgatgaacgacgacggtggtaccggcaacgtccgcgtgctcgtgtgcttggaggctgaaaatataaaggagctaggacggctgctttatgcaaagctctagcaagctgctagtgctatgcactaaaaataatattaataataataaggtttgttactttgcttaaggggaaccatactttttccctcgcgatttattattattaattatggcagtttgaataatgaaaaccatttgtaattcctgtgacaattagtttatgcgtccacactagaaataaaaac

SEQ ID NO: 11313 - protein, 396 aa, Zea mays subsp. mays
  peptide (1)..(396): Ceres Seq. ID no. 12374353
  misc_feature (1)..(393): Pfam Name: Transferase family Pfam Description: Transferase family
  misc_feature (1)..(310): Homolog of NCBI NO: 40253398 NR Description: putative hydroxyanthranilate
  misc_feature (1)..(393): Homolog of NCBI NO: 6469032 NR Description: N-hydroxycinnamoyl/benzoyltransferase [Ipomoea
  misc_feature (1)..(393): Homolog of NCBI NO: 40644899 NR Description: hydroxycinnamoyl CoA quinate transferase
  misc_feature (1)..(393): Homolog of NCBI NO: 27475616 NR Description: hydroxycinnamoyl transferase [Nicotiana tabacum]
  misc_feature (1)..(393): Homolog of NCBI NO: 40644084 NR Description: hydroxycinnamoyl CoA quinate transferase
  misc_feature (1)..(393): Homolog of NCBI NO: 15239747 NR Description: anthranilate N-benzoyltransferase; protein id: supported by cDNA: 114130. [Arabidopsis thaliana]
  misc_feature (1)..(393): Homolog of NCBI NO: 21536883 NR Description: anthranilate N-benzoyltransferase [Arabidopsis
  misc_feature (1)..(310): Homolog of NCBI NO: 38345030 NR Description: OSJNBa0029H02.14 [Oryza sativa (japonica
  misc_feature (105)..(393): Homolog of NCBI NO: 38345030 NR Description: OSJNBa0029H02.14 [Oryza sativa (japonica
  misc_feature (25)..(393): Homolog of NCBI NO: 7484692 NR Description: anthranilate N-benzoyltransferase (EC 2.3.1.144)
MVQSNKAHTPTIHLYSSNDAAAADFFDLGRLKKATAKALVAFYPLAGRLVDSDDGRKEISCNGEGALFVVARADGDLTIDEVKKFKPSPELRRLFIPLIEPSSIIMAIQVTFLKCGGVVLGTAIHHAATDVSSAFHFFQTWSAFCKHGDSAAVELPCHDRTLLRARSPPTVHPDALSTLQPRLVLTEPEGPLAIEIFTISRDHVASLKQLCGGTSTFCAVSALIWQCACVARRIPPDSQVRVMFPADVRRRMRPPLPTHYFGNAVIRLYAAGPAGDIGTAALASVAARIKGAVERMDDELVRSAIDYYEMAETNKRRTGTGILPPTDLNITSWLGRPQHDADFGWGKPQSMSRAESVRGGSMHLMNDDGGTGNVRVLVCLEAENIKELGRLLYAKL

SEQ ID NO: 11314 - protein, 291 aa, Zea mays subsp. mays
  peptide (1)..(291): Ceres Seq. ID no. 12374354
  misc_feature (1)..(288): Pfam Name: Transferase family Pfam Description: Transferase family
  misc_feature (1)..(288): Homolog of NCBI NO: 40644899 NR Description: hydroxycinnamoyl CoA quinate transferase
  misc_feature (1)..(288): Homolog of NCBI NO: 27475616 NR Description: hydroxycinnamoyl transferase [Nicotiana tabacum]
  misc_feature (1)..(288): Homolog of NCBI NO: 40644084 NR Description: hydroxycinnamoyl CoA quinate transferase
  misc_feature (1)..(288): Homolog of NCBI NO: 15239747 NR Description: anthranilate N-benzoyltransferase; protein id: supported by cDNA: 114130. [Arabidopsis thaliana]
  misc_feature (1)..(205): Homolog of NCBI NO: 40253398 NR Description: putative hydroxyanthranilate
  misc_feature (1)..(288): Homolog of NCBI NO: 6469032 NR Description: N-hydroxycinnamoyl/benzoyltransferase [Ipomoea
  misc_feature (1)..(288): Homolog of NCBI NO: 21536883 NR Description: anthranilate N-benzoyltransferase [Arabidopsis
  misc_feature (1)..(205): Homolog of NCBI NO: 38345030 NR Description: OSJNBa0029H02.14 [Oryza sativa (japonica
  misc_feature (1)..(288): Homolog of NCBI NO: 38345030 NR Description: OSJNBa0029H02.14 [Oryza sativa (japonica
  misc_feature (1)..(288): Homolog of NCBI NO: 7484692 NR Description: anthranilate N-benzoyltransferase (EC 2.3.1.144)
MAIQVTFLKCGGVVLGTAIHHAATDVSSAFHFFQTWSAFCKHGDSAAVELPCHDRTLLRARSPPTVHPDALSTLQPRLVLTEPEGPLAIEIFTISRDHVASLKQLCGGTSTFCAVSALIWQCACVARRIPPDSQVRVMFPADVRRRMRPPLPTHYFGNAVIRLYAAGPAGDIGTAALASVAARIKGAVERMDDELVRSAIDYYEMAETNKRRTGTGILPPTDLNITSWLGRPQHDADFGWGKPQSMSRAESVRGGSMHLMNDDGGTGNVRVLVCLEAENIKELGRLLYAKL

SEQ ID NO: 11315 - DNA, 1355 bp, Zea mays subsp. mays
  misc_feature (1)..(1355): Ceres Seq. ID no. 12364918
  misc_feature: MA Experiment ID: 108522 Result: Down-regulated in Transcription
  misc_feature: MA Experiment 108522 PARAMETER Experiment Name: Zm_42deg_Heat_P Parameter: Age (day) Value: 8
  misc_feature: MA Experiment 108522 PARAMETER Experiment Name: Zm_42deg_Heat_P Parameter: Organism Value: Zea mays
  misc_feature: MA Experiment 108522 PARAMETER Experiment Name: Zm_42deg_Heat_P Parameter: Plant Line Value: 35A19
  misc_feature: MA Experiment 108522 PARAMETER Experiment Name: Zm_42deg_Heat_P Parameter: Temperature (deg C) Value: 42 vs. 22
  misc_feature: MA Experiment 108522 PARAMETER Experiment Name: Zm_42deg_Heat_P Parameter: Timepoint (hr) Value: 1
  misc_feature: MA Experiment 108522 PARAMETER Experiment Name: Zm_42deg_Heat_P Parameter: Tissue Value: Aerial
aaaacagacacttccgtttttattgtccaccctccgccgccggcgtctctccaaaacccaaccaaaccctagatccgccgcactcagttccggtgagaccctcctttccagcgaaaatgccgaacctcgagtgccggatgtatgagcagcggttcccggaggtggacgccgcggtgatgatccaggtgaagcacatcgctgacatgggcgcgtacgtctcgttgctcgagtacaacaacatcgagggcatgatcctcttctccgagctctcccgccgtcgtatccgctccatctcctccctcatcaaggttggccgccaggagcccgccatcgtgctccgtgtcgaccgcgacaagggctacatcgacctttcgaagcgtcgcgtctccgaggaggaggcgcacgcatgcgaggacaggtacaacaagtccaagctcgtgcactccatcatgcgccacgtcgccgagacgctcgagatcgacctcgagccgctctaccagcggattggctggccgctctaccgcaagtacggccacgccttcgaggccttcaagctcatagttgccgaccctgacgccatcctcgacgcactcacctatgaggagaaggaggtcggcccggatggccaggaggtgactaaggtggtgcctgctgtcacccccgaggttaaggattctctggttaagaacataaggaggaggatgacaccacagcctctcaagatccgtgctgatatagagatgaaatgcttccagtttgatggagtgctccatattaagcaagctatgaagaaagctgaagctgcgggcaatgataactgtcctgtgaagattaagctagttgctcctccactttatgttttgaccacacagacccttgacaaggatcaaggcatttcagttctcactactgcagtcaaggcttgtacagcagagattgaaaagtacaaaggaaagttagtagtgaaggaaccaccaagagctgttagtgagcgggaagacaagctattcctcgaccagattgattccctaatggagcaaaacgcagaggtcgatggtgatgctgacagtgaagaggaggaagatacaggaatgggggacgtcgacattacaaattctggcgtcgctgcttactaaggctacactggttgatttggatgagctttgctgtacagcaccagctaagttctaagccgttctgtttggaagcagtttctttctgttaggttttggtgaattcgctgaaactcgttacctgcgttgttaatgttttgggctcagccggtgttggggtagcgtttacttctgtcgagaatcaccaattttttcttgggagtgaaaacaaagcccgttgcc

SEQ ID NO: 11316 - protein, 377 aa, Zea mays subsp. mays
  peptide (1)..(377): Ceres Seq. ID no. 12364919
  misc_feature (51)..(126): Pfam Name: S1 RNA binding domain Pfam Description: S1 RNA binding domain
  misc_feature (39)..(376): Homolog of NCBI NO: 34898218 NR Description: putative eukaryotic translation initiation factor
  misc_feature (37)..(374): Homolog of NCBI NO: 18405334 NR Description: putative eukaryotic translation initiation factor alpha subunit, eIF2; protein id: At2g40290.1, supported by cDNA: supported by cDNA: gi_19347785 [Arabidopsis thaliana]
  misc_feature (37)..(374): Homolog of NCBI NO: 21537411 NR Description: putative eukaryotic translation initiation factor
  misc_feature (40)..(374): Homolog of NCBI NO: 15239135 NR Description: eukaryotic translation initiation factor 2 alpha like protein; protein id: At5g05470.1, supported by cDNA: supported by cDNA: gi_13549159 [Arabidopsis thaliana]
  misc_feature (40)..(374): Homolog of NCBI NO: 13549160 NR Description: protein synthesis initiation factor eIF2 alpha
  misc_feature (37)..(301): Homolog of NCBI NO: 4588003 NR Description: hypothetical EIF-2-Alpha [Arabidopsis thaliana]
  misc_feature (39)..(221): Homolog of NCBI NO: 19114993 NR Description: eukaryotic translation initiation factor 2 alpha [Schizosaccharomyces pombe] >gi|3024013|sp|P56286|IF2A_SCHPO
  misc_feature (222)..(363): Homolog of NCBI NO: 19114993 NR Description: eukaryotic translation initiation factor 2 alpha [Schizosaccharomyces pombe] >gi|3024013|sp|P56286|IF2A_SCHPO
  misc_feature (44)..(195): Homolog of NCBI NO: 40744551 NR Description: hypothetical protein AN3156.2 [Aspergillus
  misc_feature (222)..(364): Homolog of NCBI NO: 40744551 NR Description: hypothetical protein AN3156.2 [Aspergillus
NRHFRFYCPPSAAGVSPKPNQTLDPPHSVPVRPSFPAKMPNLECRMYEQRFPEVDAAVMIQVKHIADMGAYVSLLEYNNIEGMILFSELSRRRIRSISSLIKVGRQEPAIVLRVDRDKGYIDLSKRRVSEEEAHACEDRYNKSKLVHSIMRHVAETLEIDLEPLYQRIGWPLYRKYGHAFEAFKLIVADPDAILDALTYEEKEVGPDGQEVTKVVPAVTPEVKDSLVKNIRRRMTPQPLKIRADIEMKCFQFDGVLHIKQAMKKAEAAGNDNCPVKIKLVAPPLYVLTTQTLDKDQGISVLTTAVKACTAEIEKYKGKLVVKEPPRAVSEREDKLFLDQIDSLMEQNAEVDGDADSEEEEDTGMGDVDITNSGVAAY

SEQ ID NO: 11317 - protein, 339 aa, Zea mays subsp. mays
  peptide (1)..(339): Ceres Seq. ID no. 12364920
  misc_feature (13)..(88): Pfam Name: S1 RNA binding domain Pfam Description: S1 RNA binding domain
  misc_feature (1)..(338): Homolog of NCBI NO: 34898218 NR Description: putative eukaryotic translation initiation factor
  misc_feature (1)..(336): Homolog of NCBI NO: 18405334 NR Description: putative eukaryotic translation initiation factor alpha subunit, eIF2; protein id: At2g40290.1, supported by cDNA: supported by cDNA: gi_19347785 [Arabidopsis thaliana]
  misc_feature (1)..(336): Homolog of NCBI NO: 21537411 NR Description: putative eukaryotic translation initiation factor
  misc_feature (2)..(336): Homolog of NCBI NO: 15239135 NR Description: eukaryotic translation initiation factor 2 alpha like protein; protein id: At5g05470.1, supported by cDNA: supported by cDNA: gi_13549159 [Arabidopsis thaliana]
  misc_feature (2)..(336): Homolog of NCBI NO: 13549160 NR Description: protein synthesis initiation factor eIF2 alpha
  misc_feature (1)..(263): Homolog of NCBI NO: 4588003 NR Description: hypothetical EIF-2-Alpha [Arabidopsis thaliana]
  misc_feature (1)..(183): Homolog of NCBI NO: 19114993 NR Description: eukaryotic translation initiation factor 2 alpha [Schizosaccharomyces pombe] >gi|3024013|sp|P56286|IF2A_SCHPO
  misc_feature (184)..(325): Homolog of NCBI NO: 19114993 NR Description: eukaryotic translation initiation factor 2 alpha [Schizosaccharomyces pombe] >gi|3024013|sp|P56286|IF2A_SCHPO
  misc_feature (6)..(157): Homolog of NCBI NO: 40744551 NR Description: hypothetical protein AN3156.2 [Aspergillus
  misc_feature (184)..(326): Homolog of NCBI NO: 40744551 NR Description: hypothetical protein AN3156.2 [Aspergillus
MPNLECRMYEQRFPEVDAAVMIQVKHIADMGAYVSLLEYNNIEGMILFSELSRRRIRSISSLIKVGRQEPAIVLRVDRDKGYIDLSKRRVSEEEAHACEDRYNKSKLVHSIMRHVAETLEIDLEPLYQRIGWPLYRKYGHAFEAFKLIVADPDAILDALTYEEKEVGPDGQEVTKVVPAVTPEVKDSLVKNIRRRMTPQPLKIRADIEMKCFQFDGVLHIKQAMKKAEAAGNDNCPVKIKLVAPPLYVLTTQTLDKDQGISVLTTAVKACTAEIEKYKGKLVVKEPPRAVSEREDKLFLDQIDSLMEQNAEVDGDADSEEEEDTGMGDVDITNSGVAAY

SEQ ID NO: 11318 - protein, 332 aa, Zea mays subsp. mays
  peptide (1)..(332): Ceres Seq. ID no. 12364921
  misc_feature (6)..(81): Pfam Name: S1 RNA binding domain Pfam Description: S1 RNA binding domain
  misc_feature (1)..(331): Homolog of NCBI NO: 34898218 NR Description: putative eukaryotic translation initiation factor
  misc_feature (1)..(329): Homolog of NCBI NO: 18405334 NR Description: putative eukaryotic translation initiation factor alpha subunit, eIF2; protein id: At2g40290.1, supported by cDNA: supported by cDNA: gi_19347785 [Arabidopsis thaliana]
  misc_feature (1)..(329): Homolog of NCBI NO: 21537411 NR Description: putative eukaryotic translation initiation factor
  misc_feature (1)..(329): Homolog of NCBI NO: 15239135 NR Description: eukaryotic translation initiation factor 2 alpha like protein; protein id: At5g05470.1, supported by cDNA: supported by cDNA: gi_13549159 [Arabidopsis thaliana]
  misc_feature (1)..(329): Homolog of NCBI NO: 13549160 NR Description: protein synthesis initiation factor eIF2 alpha
  misc_feature (1)..(256): Homolog of NCBI NO: 4588003 NR Description: hypothetical EIF-2-Alpha [Arabidopsis thaliana]
  misc_feature (1)..(176): Homolog of NCBI NO: 19114993 NR Description: eukaryotic translation initiation factor 2 alpha [Schizosaccharomyces pombe] >gi|3024013|sp|P56286|IF2A_SCHPO
  misc_feature (177)..(318): Homolog of NCBI NO: 19114993 NR Description: eukaryotic translation initiation factor 2 alpha [Schizosaccharomyces pombe] >gi|3024013|sp|P56286|IF2A_SCHPO
  misc_feature (1)..(150): Homolog of NCBI NO: 40744551 NR Description: hypothetical protein AN3156.2 [Aspergillus
  misc_feature (177)..(319): Homolog of NCBI NO: 40744551 NR Description: hypothetical protein AN3156.2 [Aspergillus
MYEQRFPEVDAAVMIQVKHIADMGAYVSLLEYNNIEGMILFSELSRRRIRSISSLIKVGRQEPAIVLRVDRDKGYIDLSKRRVSEEEAHACEDRYNKSKLVHSIMRHVAETLEIDLEPLYQRIGWPLYRKYGHAFEAFKLIVADPDAILDALTYEEKEVGPDGQEVTKVVPAVTPEVKDSLVKNIRRRMTPQPLKIRADIEMKCFQFDGVLHIKQAMKKAEAAGNDNCPVKIKLVAPPLYVLTTQTLDKDQGISVLTTAVKACTAEIEKYKGKLVVKEPPRAVSEREDKLFLDQIDSLMEQNAEVDGDADSEEEEDTGMGDVDITNSGVAAY

SEQ ID NO: 11319 - DNA, 1699 bp, Zea mays subsp. mays
  misc_feature (1)..(1699): Ceres Seq. ID no. 12376457
  misc_feature: MA Experiment ID: 108544 Result: Down-regulated in Transcription
  misc_feature: MA Experiment ID: 108556 Result: Down-regulated in Transcription
  misc_feature: MA Experiment 108556 PARAMETER Experiment Name: Zm_Drought_P Parameter: Age (day) Value: 9
  misc_feature: MA Experiment 108556 PARAMETER Experiment Name: Zm_Drought_P Parameter: Organism Value: Zea mays
  misc_feature: MA Experiment 108556 PARAMETER Experiment Name: Zm_Drought_P Parameter: Plant Line Value: 35A19
  misc_feature: MA Experiment 108556 PARAMETER Experiment Name: Zm_Drought_P Parameter: Timepoint (hr) Value: 24
  misc_feature: MA Experiment 108556 PARAMETER Experiment Name: Zm_Drought_P Parameter: Tissue Value: Aerial
  misc_feature: MA Experiment 108556 PARAMETER Experiment Name: Zm_Drought_P Parameter: Treatment Value: Drought vs. No Drought
  misc_feature: MA Experiment ID: 20000477 Result: Down-regulated in Transcription
  misc_feature: MA Experiment 20000477 PARAMETER Experiment Name: Zm_5mM_SA_P Parameter: Age (day) Value: 10
  misc_feature: MA Experiment 20000477 PARAMETER Experiment Name: Zm_5mM_SA_P Parameter: Organism Value: Zea mays
  misc_feature: MA Experiment 20000477 PARAMETER Experiment Name: Zm_5mM_SA_P Parameter: Plant Line Value: 35A19
  misc_feature: MA Experiment 20000477 PARAMETER Experiment Name: Zm_5mM_SA_P Parameter: Timepoint (hr) Value: 48
  misc_feature: MA Experiment 20000477 PARAMETER Experiment Name: Zm_5mM_SA_P Parameter: Tissue Value: Aerial
  misc_feature: MA Experiment 20000477 PARAMETER Experiment Name: Zm_5mM_SA_P Parameter: Treatment Value: 5mM SA vs. No Treatment
  misc_feature: MA Experiment ID: 20000478 Result: Down-regulated in Transcription
  misc_feature: MA Experiment 20000478 PARAMETER Experiment Name: Zm_5mM_SA_P Parameter: Age (day) Value: 11
  misc_feature: MA Experiment 20000478 PARAMETER Experiment Name: Zm_5mM_SA_P Parameter: Organism Value: Zea mays
  misc_feature: MA Experiment 20000478 PARAMETER Experiment Name: Zm_5mM_SA_P Parameter: Plant Line Value: 35A19
  misc_feature: MA Experiment 20000478 PARAMETER Experiment Name: Zm_5mM_SA_P Parameter: Timepoint (hr) Value: 72
  misc_feature: MA Experiment 20000478 PARAMETER Experiment Name: Zm_5mM_SA_P Parameter: Tissue Value: Aerial
  misc_feature: MA Experiment 20000478 PARAMETER Experiment Name: Zm_5mM_SA_P Parameter: Treatment Value: 5mM SA vs. No Treatment
  misc_feature: MA Experiment ID: 20000480 Result: Down-regulated in Transcription
  misc_feature: MA Experiment 20000480 PARAMETER Experiment Name: Zm_Drought_P Parameter: Age (day) Value: 11
  misc_feature: MA Experiment 20000480 PARAMETER Experiment Name: Zm_Drought_P Parameter: Organism Value: Zea mays
  misc_feature: MA Experiment 20000480 PARAMETER Experiment Name: Zm_Drought_P Parameter: Plant Line Value: 35A19
  misc_feature: MA Experiment 20000480 PARAMETER Experiment Name: Zm_Drought_P Parameter: Timepoint (hr) Value: 72
  misc_feature: MA Experiment 20000480 PARAMETER Experiment Name: Zm_Drought_P Parameter: Tissue Value: Aerial
  misc_feature: MA Experiment 20000480 PARAMETER Experiment Name: Zm_Drought_P Parameter: Treatment Value: Drought vs. No Drought
  misc_feature: MA Experiment ID: 20000534 Result: Down-regulated in Transcription
  misc_feature: MA Experiment 20000534 PARAMETER Experiment Name: Zm_Hybrid_Pollen_P Parameter: Age (day) Value: 8
  misc_feature: MA Experiment 20000534 PARAMETER Experiment Name: Zm_Hybrid_Pollen_P Parameter: Organism Value: Zea mays
  misc_feature: MA Experiment 20000534 PARAMETER Experiment Name: Zm_Hybrid_Pollen_P Parameter: Plant Line Value: 35A19
  misc_feature: MA Experiment 20000534 PARAMETER Experiment Name: Zm_Hybrid_Pollen_P Parameter: Tissue Value: Pollen vs. Aerial
  misc_feature: MA Experiment ID: 20000626 Result: Down-regulated in Transcription
  misc_feature: MA Experiment 20000626 PARAMETER Experiment Name: Zm_Herbicide-Treatments_P Parameter: Timepoint (hr) Value: 12
  misc_feature: MA Experiment 20000626 PARAMETER Experiment Name: Zm_Herbicide-Treatments_P Parameter: Tissue Value: Aerial
  misc_feature: MA Experiment 20000626 PARAMETER Experiment Name: Zm_Herbicide-Treatments_P Parameter: Treatment Value: Roundup vs. No Treatment
agagcagagctgcctccagacgagacgaggaggacgcggcgccgctcgggcttggcagcaaccagcgtcgagcgcagtgcccttctgtctcctatctccccgctgcccagccgggtctcactttccagtctccgagactctgagtctcgctcgcaccccgtcccccgcagcctgtgctctgggttggagggaggtgagctgcgagggagcgcggagggggcgaggagatggaggcagattcggcgaggaagagacttgcattgctggccctgcttctcctggcggcgcccgtccgcccggcctcggcggctccggtggaggatggcctgctcagcaatggtgactttgagacagcaccaagtggtggttttgtaaaatctgcgtctgttgctgagggtgcatcgtcaatccctggttggacgatcaacggcacggttgaactcatttcagcaggccaacactagggtggcatgatcctgattgttccacagggggaccatgcagtaaggctagggaatgatgctagcgttgggcaggtggtggacgttgagaagggttcggagtatgctatcacattcagtgctgcccggacatgtgcacaactggaggcactgaatgtttccgtgctaggtggcgtatctcagacagtagacttgcagacgttgtacaacatagaaggctgggatgcgtacgcgttggcttttcaggcgacggaagagcaggcacatcttcaattcatgaaccctggcatggaggatgatccaacttgtggtcctatcctagacaacgttgcagtcaagaagctcttcaccccagacaaaccaaaggataacgtggtgctgaatggagactttgaggagggtccatggatgttcccgaacacgagcttcggcgtgctgctcccaactaaccttgacgagcagacgtctgccatacctgggtggatgatcgagtcaaaccgcgccgtccgctacatagactctgatgagtacaaggttccccagggaaagcgtgccattgagcttctgtcaggcaaggagggtatcatctcccagatggttgagaccacccctcagaaggtttacagcctgacgttcacactgggcacggcgggggactcgtgccaaccaccaatggccgtcatggcgttcgcgggggatcaggcccagaacttccactactccccaatgagcaatgccaccagccaggctgcgaatgtgacgttcactgcacgcgctgagagaacacgtgtggcgttctatagcgtgtactacaacacgaggagtgacgaccacagctcgctgtgtggcccagtgattgacgatgtccgggtatgggcattgaacgccgcggctgggttgaaggcaagtattggactggttcttggcgttgttggtgtcgttggcatggtgctgttctgaaatctgaatctctcggtggcagtggtcttgggaagtatggatgtataacttcttctgttagttggaggcttactagttttggtagtaagcttgaagtttgttgagtgatatgagcttaggttaaaaagctacgagaacctacatggtattgcttgtgttacttcattggtgacatgcagttgtatggtattgtgtggcttgtttgccctagcttgtaatatgagatgtcagaattattcgagatcatctcttcaatatattagaaaagagtaaagtgc

SEQ ID NO: 11320 - protein, 316 aa, Zea mays subsp. mays
  peptide (1)..(316): Ceres Seq. ID no. 12376458
  misc_feature (1)..(292): Pfam Name: Protein of unknown function, DUF642 Pfam Description: Protein of unknown function, DUF642
  misc_feature (1)..(316): Homolog of NCBI NO: 34909656 NR Description: OJ1414_E05.5 [Oryza sativa (japonica
  misc_feature (69)..(316): Homolog of NCBI NO: 34913458 NR Description: P0702H08.18 [Oryza sativa (japonica
  misc_feature (1)..(314): Homolog of NCBI NO: 18397308 NR Description: expressed protein; protein id: At1g29980.1, by cDNA: gi_15010695 [Arabidopsis thaliana]
  misc_feature (1)..(308): Homolog of NCBI NO: 15226760 NR Description: unknown protein; protein id: At2g34510.1, by cDNA: gi_13272420 [Arabidopsis thaliana]
  misc_feature (1)..(288): Homolog of NCBI NO: 7488898 NR Description: hypothetical protein - castor bean
  misc_feature (1)..(288): Homolog of NCBI NO: 18418018 NR Description: putative protein; protein id: At4g32460.1, by cDNA: 37529. [Arabidopsis thaliana]
  misc_feature (1)..(296): Homolog of NCBI NO: 15220093 NR Description: hypothetical protein; protein id: At1g80240.1
  misc_feature (1)..(294): Homolog of NCBI NO: 7488741 NR Description: hypothetical protein precursor - alfalfa
  misc_feature (1)..(288): Homolog of NCBI NO: 23397043 NR Description: unknown protein [Arabidopsis thaliana]
  misc_feature (1)..(288): Homolog of NCBI NO: 15239049 NR Description: putative protein; protein id: At5g11420.1, by cDNA: 25522., supported by cDNA: gi_15028264, supported by
MILIVPQGDHAVRLGNDASVGQVVDVEKGSEYAITFSAARTCAQLEALNVSVLGGVSQTVDLQTLYNIEGWDAYALAFQATEEQAHLQFMNPGMEDDPTCGPILDNVAVKKLFTPDKPKDNVVLNGDFEEGPWMFPNTSFGVLLPTNLDEQTSAIPGWMIESNRAVRYIDSDEYKVPQGKRAIELLSGKEGIISQMVETTPQKVYSLTFTLGTAGDSCQPPMAVMAFAGDQAQNFHYSPMSNATSQAANVTFTARAERTRVAFYSVYYNTRSDDHSSLCGPVIDDVRVWALNAAAGLKASIGLVLGVVGVVGMVLF

SEQ ID NO: 11321 - protein, 227 aa, Zea mays subsp. mays
  peptide (1)..(227): Ceres Seq. ID no. 12376459
  misc_feature (1)..(203): Pfam Name: Protein of unknown function, DUF642 Pfam Description: Protein of unknown function, DUF642
  misc_feature (1)..(227): Homolog of NCBI NO: 34909656 NR Description: OJ1414_E05.5 [Oryza sativa (japonica
  misc_feature (1)..(227): Homolog of NCBI NO: 34913458 NR Description: P0702H08.18 [Oryza sativa (japonica
  misc_feature (1)..(225): Homolog of NCBI NO: 18397308 NR Description: expressed protein; protein id: At1g29980.1, by cDNA: gi_15010695 [Arabidopsis thaliana]
  misc_feature (1)..(219): Homolog of NCBI NO: 15226760 NR Description: unknown protein; protein id: At2g34510.1, by cDNA: gi_13272420 [Arabidopsis thaliana]
  misc_feature (1)..(199): Homolog of NCBI NO: 7488898 NR Description: hypothetical protein - castor bean
  misc_feature (1)..(199): Homolog of NCBI NO: 18418018 NR Description: putative protein; protein id: At4g32460.1, by cDNA: 37529. [Arabidopsis thaliana]
  misc_feature (1)..(207): Homolog of NCBI NO: 15220093 NR Description: hypothetical protein; protein id: At1g80240.1
  misc_feature (1)..(205): Homolog of NCBI NO: 7488741 NR Description: hypothetical protein precursor - alfalfa
  misc_feature (1)..(199): Homolog of NCBI NO: 23397043 NR Description: unknown protein [Arabidopsis thaliana]
  misc_feature (1)..(199): Homolog of NCBI NO: 15239049 NR Description: putative protein; protein id: At5g11420.1, by cDNA: 25522., supported by cDNA: gi_15028264, supported by
MNPGMEDDPTCGPILDNVAVKKLFTPDKPKDNVVLNGDFEEGPWMFPNTSFGVLLPTNLDEQTSAIPGWMIESNRAVRYIDSDEYKVPQGKRAIELLSGKEGIISQMVETTPQKVYSLTFTLGTAGDSCQPPMAVMAFAGDQAQNFHYSPMSNATSQAANVTFTARAERTRVAFYSVYYNTRSDDHSSLCGPVIDDVRVWALNAAAGLKASIGLVLGVVGVVGMVLF

SEQ ID NO: 11322 - protein, 223 aa, Zea mays subsp. mays
  peptide (1)..(223): Ceres Seq. ID no. 12376460
  misc_feature (1)..(199): Pfam Name: Protein of unknown function, DUF642 Pfam Description: Protein of unknown function, DUF642
  misc_feature (1)..(223): Homolog of NCBI NO: 34909656 NR Description: OJ1414_E05.5 [Oryza sativa (japonica
  misc_feature (1)..(223): Homolog of NCBI NO: 34913458 NR Description: P0702H08.18 [Oryza sativa (japonica
  misc_feature (1)..(221): Homolog of NCBI NO: 18397308 NR Description: expressed protein; protein id: At1g29980.1, by cDNA: gi_15010695 [Arabidopsis thaliana]
  misc_feature (1)..(215): Homolog of NCBI NO: 15226760 NR Description: unknown protein; protein id: At2g34510.1, by cDNA: gi_13272420 [Arabidopsis thaliana]
  misc_feature (1)..(195): Homolog of NCBI NO: 7488898 NR Description: hypothetical protein - castor bean
  misc_feature (1)..(195): Homolog of NCBI NO: 18418018 NR Description: putative protein; protein id: At4g32460.1, by cDNA: 37529. [Arabidopsis thaliana]
  misc_feature (1)..(203): Homolog of NCBI NO: 15220093 NR Description: hypothetical protein; protein id: At1g80240.1
  misc_feature (1)..(201): Homolog of NCBI NO: 7488741 NR Description: hypothetical protein precursor - alfalfa
  misc_feature (1)..(195): Homolog of NCBI NO: 23397043 NR Description: unknown protein [Arabidopsis thaliana]
  misc_feature (1)..(195): Homolog of NCBI NO: 15239049 NR Description: putative protein; protein id: At5g11420.1, by cDNA: 25522., supported by cDNA: gi_15028264, supported by
MEDDPTCGPILDNVAVKKLFTPDKPKDNVVLNGDFEEGPWMFPNTSFGVLLPTNLDEQTSAIPGWMIESNRAVRYIDSDEYKVPQGKRAIELLSGKEGIISQMVETTPQKVYSLTFTLGTAGDSCQPPMAVMAFAGDQAQNFHYSPMSNATSQAANVTFTARAERTRVAFYSVYYNTRSDDHSSLCGPVIDDVRVWALNAAAGLKASIGLVLGVVGVVGMVLF

SEQ ID NO: 11323 - DNA, 1778 bp, Zea mays subsp. mays
  misc_feature (1)..(1778): Ceres Seq. ID no. 12413850
  misc_feature: MA Experiment ID: 108504 Result: Up-regulated in Transcription
  misc_feature: MA Experiment 108504 PARAMETER Experiment Name: Zm_Drought_P Parameter: Age (day) Value: 8
  misc_feature: MA Experiment 108504 PARAMETER Experiment Name: Zm_Drought_P Parameter: Organism Value: Zea mays
  misc_feature: MA Experiment 108504 PARAMETER Experiment Name: Zm_Drought_P Parameter: Plant Line Value: 35A19
  misc_feature: MA Experiment 108504 PARAMETER Experiment Name: Zm_Drought_P Parameter: Timepoint (hr) Value: 12
  misc_feature: MA Experiment 108504 PARAMETER Experiment Name: Zm_Drought_P Parameter: Tissue Value: Aerial
  misc_feature: MA Experiment 108504 PARAMETER Experiment Name: Zm_Drought_P Parameter: Treatment Value: Drought vs. No Drought
  misc_feature: MA Experiment ID: 108527 Result: Up-regulated in Transcription
  misc_feature: MA Experiment 108527 PARAMETER Experiment Name: Zm_5mM_NO_P Parameter: Age (day) Value: 8
  misc_feature: MA Experiment 108527 PARAMETER Experiment Name: Zm_5mM_NO_P Parameter: Organism Value: Zea mays
  misc_feature: MA Experiment 108527 PARAMETER Experiment Name: Zm_5mM_NO_P Parameter: Plant Line Value: 35A19
  misc_feature: MA Experiment 108527 PARAMETER Experiment Name: Zm_5mM_NO_P Parameter: Timepoint (hr) Value: 6
  misc_feature: MA Experiment 108527 PARAMETER Experiment Name: Zm_5mM_NO_P Parameter: Tissue Value: Aerial
  misc_feature: MA Experiment 108527 PARAMETER Experiment Name: Zm_5mM_NO_P Parameter: Treatment Value: 5mM NO vs. No Treatment
  misc_feature: MA Experiment ID: 108533 Result: Up-regulated in Transcription
  misc_feature: MA Experiment 108533 PARAMETER Experiment Name: Zm_4deg_Cold_P Parameter: Age (hr) Value: 8
  misc_feature: MA Experiment 108533 PARAMETER Experiment Name: Zm_4deg_Cold_P Parameter: Organism Value: Zea mays
  misc_feature: MA Experiment 108533 PARAMETER Experiment Name: Zm_4deg_Cold_P Parameter: Plant Line Value: 35A19
  misc_feature: MA Experiment 108533 PARAMETER Experiment Name: Zm_4deg_Cold_P Parameter: Temperature (deg C) Value: 4 vs. 22
  misc_feature: MA Experiment 108533 PARAMETER Experiment Name: Zm_4deg_Cold_P Parameter: Timepoint (hr) Value: 1
  misc_feature: MA Experiment 108533 PARAMETER Experiment Name: Zm_4deg_Cold_P Parameter: Tissue Value: Aerial
  misc_feature: MA Experiment ID: 108539 Result: Up-regulated in Transcription
  misc_feature: MA Experiment 108539 PARAMETER Experiment Name: Zm_20percent_PEG_P Parameter: Age (day) Value: 8
  misc_feature: MA Experiment 108539 PARAMETER Experiment Name: Zm_20percent_PEG_P Parameter: Organism Value: Zea mays
  misc_feature: MA Experiment 108539 PARAMETER Experiment Name: Zm_20percent_PEG_P Parameter: Plant Line Value: 35A19
  misc_feature: MA Experiment 108539 PARAMETER Experiment Name: Zm_20percent_PEG_P Parameter: Timepoint (hr) Value: 1
  misc_feature: MA Experiment 108539 PARAMETER Experiment Name: Zm_20percent_PEG_P Parameter: Tissue Value: Aerial
  misc_feature: MA Experiment 108539 PARAMETER Experiment Name: Zm_20percent_PEG_P Parameter: Treatment Value: 20percent PEG vs. No Treatment
  misc_feature: MA Experiment ID: 108556 Result: Up-regulated in Transcription
  misc_feature: MA Experiment 108556 PARAMETER Experiment Name: Zm_Drought_P Parameter: Age (day) Value: 9
  misc_feature: MA Experiment 108556 PARAMETER Experiment Name: Zm_Drought_P Parameter: Organism Value: Zea mays
  misc_feature: MA Experiment 108556 PARAMETER Experiment Name: Zm_Drought_P Parameter: Plant Line Value: 35A19
  misc_feature: MA Experiment 108556 PARAMETER Experiment Name: Zm_Drought_P Parameter: Timepoint (hr) Value: 24
  misc_feature: MA Experiment 108556 PARAMETER Experiment Name: Zm_Drought_P Parameter: Tissue Value: Aerial
  misc_feature: MA Experiment 108556 PARAMETER Experiment Name: Zm_Drought_P Parameter: Treatment Value: Drought vs. No Drought
  misc_feature: MA Experiment ID: 20000108 Result: Down-regulated in Transcription
  misc_feature: MA Experiment 20000108 PARAMETER Experiment Name: Zm_Root-Tips_P Parameter: Age (day) Value: 12
  misc_feature: MA Experiment 20000108 PARAMETER Experiment Name: Zm_Root-Tips_P Parameter: Organism Value: Zea mays
  misc_feature: MA Experiment 20000108 PARAMETER Experiment Name: Zm_Root-Tips_P Parameter: Tissue Value: Root tips vs. Root mid region    35
  misc_feature: MA Experiment 20000108 PARAMETER Experiment Name: Zm_Root-Tips_P Parameter: Tissue Value: Root tips vs. Root mid region   Sequence Listing-Misc Features (4)
  misc_feature: MA Experiment ID: 20000477 Result: Up-regulated in Transcription
  misc_feature: MA Experiment 20000477 PARAMETER Experiment Name: Zm_5mM_SA_P Parameter: Age (day) Value: 10
  misc_feature: MA Experiment 20000477 PARAMETER Experiment Name: Zm_5mM_SA_P Parameter: Organism Value: Zea mays
  misc_feature: MA Experiment 20000477 PARAMETER Experiment Name: Zm_5mM_SA_P Parameter: Plant Line Value: 35A19
  misc_feature: MA Experiment 20000477 PARAMETER Experiment Name: Zm_5mM_SA_P Parameter: Timepoint (hr) Value: 48
  misc_feature: MA Experiment 20000477 PARAMETER Experiment Name: Zm_5mM_SA_P Parameter: Tissue Value: Aerial
  misc_feature: MA Experiment 20000477 PARAMETER Experiment Name: Zm_5mM_SA_P Parameter: Treatment Value: 5mM SA vs. No Treatment
  misc_feature: MA Experiment ID: 20000478 Result: Up-regulated in Transcription
  misc_feature: MA Experiment 20000478 PARAMETER Experiment Name: Zm_5mM_SA_P Parameter: Age (day) Value: 11
  misc_feature: MA Experiment 20000478 PARAMETER Experiment Name: Zm_5mM_SA_P Parameter: Organism Value: Zea mays
  misc_feature: MA Experiment 20000478 PARAMETER Experiment Name: Zm_5mM_SA_P Parameter: Plant Line Value: 35A19
  misc_feature: MA Experiment 20000478 PARAMETER Experiment Name: Zm_5mM_SA_P Parameter: Timepoint (hr) Value: 72
  misc_feature: MA Experiment 20000478 PARAMETER Experiment Name: Zm_5mM_SA_P Parameter: Tissue Value: Aerial
  misc_feature: MA Experiment 20000478 PARAMETER Experiment Name: Zm_5mM_SA_P Parameter: Treatment Value: 5mM SA vs. No Treatment
  misc_feature: MA Experiment ID: 20000479 Result: Up-regulated in Transcription
  misc_feature: MA Experiment 20000479 PARAMETER Experiment Name: Zm_Drought_P Parameter: Age (day) Value: 10
  misc_feature: MA Experiment 20000479 PARAMETER Experiment Name: Zm_Drought_P Parameter: Organism Value: Zea mays
  misc_feature: MA Experiment 20000479 PARAMETER Experiment Name: Zm_Drought_P Parameter: Plant Line Value: 35A19
  misc_feature: MA Experiment 20000479 PARAMETER Experiment Name: Zm_Drought_P Parameter: Timepoint (hr) Value: 48
  misc_feature: MA Experiment 20000479 PARAMETER Experiment Name: Zm_Drought_P Parameter: Tissue Value: Aerial
  misc_feature: MA Experiment 20000479 PARAMETER Experiment Name: Zm_Drought_P Parameter: Treatment Value: Drought vs. No Drought
  misc_feature: MA Experiment ID: 20000480 Result: Up-regulated in Transcription
  misc_feature: MA Experiment 20000480 PARAMETER Experiment Name: Zm_Drought_P Parameter: Age (day) Value: 11
  misc_feature: MA Experiment 20000480 PARAMETER Experiment Name: Zm_Drought_P Parameter: Organism Value: Zea mays
  misc_feature: MA Experiment 20000480 PARAMETER Experiment Name: Zm_Drought_P Parameter: Plant Line Value: 35A19
  misc_feature: MA Experiment 20000480 PARAMETER Experiment Name: Zm_Drought_P Parameter: Timepoint (hr) Value: 72
  misc_feature: MA Experiment 20000480 PARAMETER Experiment Name: Zm_Drought_P Parameter: Tissue Value: Aerial
  misc_feature: MA Experiment 20000480 PARAMETER Experiment Name: Zm_Drought_P Parameter: Treatment Value: Drought vs. No Drought
aacttctttcttgttcggatcgggtcaggtcagtgctccgtgttgcgttttcttaagaacacgaaaaaaaaagaggggagagtttctttcgggtcctctttttctttgattgtcgaaaggccgctcctttaggagatttgcgcgcttctcgtcgagattagccgccggtgctcggatcgatctgtttgcggtggaggaattttgaggccaagaagagagttggaatcggatcgggagttcttgtggtcacagggtgcgaaaaaagcgagtgatttttgggaggatttcttgttgggaaaaaatcggttgttcagcggattagaggcggagatgggagccggggctgaggtcatgcatcaggtcgtgccgctgctggagccgccgctccaccggtgcgtcgttaagagcgtcgatgtcatggaggaggtggttgccgtggcgcctgggcaggtgcagccagcgacgtcgccgaaggcgctgttggaggttgccgtagaggtgcccgatctggagttgaagagatcttctaatgctgggagtagtgtatctgcagaacaactgcagtttgtccctatcattcgatctggtagctttgctgatattggacctaggcggttcatggaagatgagcatattagaattgatgatctttctggtcatcttggctcactgttgatggtctctgcgcctagcgcgttctacggggtgtttgacggtcatgggggttcagatgcagcagcctacatgaaaacacatgcaatgaggttgttctttgaagatgctgacttccctcaagcatcacaagaggataaaatatttgctgaatctgttgaggattcggtccgcagagctttcttgcgggctgaccttgcacttgctgatgattcagtcatcaaccgttcttctggcaccacagcgctgacagcattggtccttgggaggcaactgttggtagcaaacgctggggactgccgcgccgtcctgtgtaggaaagggacagcggtggaggtgtcaaaggatcacaggccgacatacgacgcagagcgtcaaagggttatcgagtgcggtggatacatcgaagatgggtacctcaacggcgtactctctgtgacccgggctttaggggactgggacatgaagctgccccaaggctctccgtcgccccttatcgcagagccagagatccactggaccaccctgacggaagacgacgagttcctcatcatcggctgcgatgggatatgggatgtgatgagcagccagcacgcggtgagcacggtccgcaagggcctccggaggcacgatgaccccgggcggagtgcccaggagctcgccatggaggcgaagaggctcgagaccttcgacaacctcaccgtgatcgttgtctgctttgtccccgacctcgccgggggcgtcggctacgccctcggagcaggtgccggctggaaggatcaggtgccgcaagagcttgtcgccagaggcactctgcaagctgaggagatggctcgagtctgaccagtagacgcttctatctgtagaggccagcgccagcctgtgtttctgtgctgtggctgtgtaaatattggcgctgatggtgttccgtctagtacggctgtgcttacacggccagcaattttgtagctgagagagagttccccccaccgccgctgccgcttttgttttcacaccgttttgtacttttgtgggatgtacataccattaccattgttgctcggttcggctcagtttggcagagagaataactactctagttcgct

SEQ ID NO: 11324 - protein, 394 aa, Zea mays subsp. mays
  peptide (1)..(394): Ceres Seq. ID no. 12413851
  misc_feature (83)..(347): Pfam Name: Protein phosphatase 2C Pfam Description: Protein phosphatase 2C
  misc_feature (1)..(361): Homolog of NCBI NO: 34894410 NR Description: putative protein phosphatase [Oryza sativa
  misc_feature (47)..(354): Homolog of NCBI NO: 25352221 NR Description: phosphoprotein phosphatase (EC 3.1.3.16) 2C
  misc_feature (77)..(355): Homolog of NCBI NO: 15228717 NR Description: protein phosphatase 2C (PP2C); protein id: supported by cDNA: 20050. [Arabidopsis thaliana]
  misc_feature (77)..(355): Homolog of NCBI NO: 30695577 NR Description: protein phosphatase 2C (PP2C), putative
  misc_feature (40)..(354): Homolog of NCBI NO: 15221047 NR Description: protein phosphatase-2C, putative; protein id: [Arabidopsis thaliana] >gi|8778520|gb|AAF79528.1|AC023673_16 [Arabidopsis thaliana] >gi|12323084|gb|AAG51521.1|AC051631_1
  misc_feature (56)..(354): Homolog of NCBI NO: 30684431 NR Description: protein phosphatase 2C (PP2C) -related
  misc_feature (75)..(357): Homolog of NCBI NO: 15226152 NR Description: protein phosphatase 2C (PP2C); protein id: supported by cDNA: gi_17979441, supported by cDNA: gi_20259092
  misc_feature (79)..(357): Homolog of NCBI NO: 10140768 NR Description: putative protein phosphatase-2C [Oryza sativa]
  misc_feature (79)..(357): Homolog of NCBI NO: 37536524 NR Description: putative protein phosphatase-2C [Oryza sativa
  misc_feature (79)..(357): Homolog of NCBI NO: 15230495 NR Description: protein phosphatase 2C (PP2C); protein id:
MGAGAEVMHQVVPLLEPPLHRCVVKSVDVMEEVVAVAPGQVQPATSPKALLEVAVEVPDLELKRSSNAGSSVSAEQLQFVPIIRSGSFADIGPRRFMEDEHIRIDDLSGHLGSLLMVSAPSAFYGVFDGHGGSDAAAYMKTHAMRLFFEDADFPQASQEDKIFAESVEDSVRRAFLRADLALADDSVINRSSGTTALTALVLGRQLLVANAGDCRAVLCRKGTAVEVSKDHRPTYDAERQRVIECGGYIEDGYLNGVLSVTRALGDWDMKLPQGSPSPLIAEPEIHWTTLTEDDEFLIIGCDGIWDVMSSQHAVSTVRKGLRRHDDPGRSAQELAMEAKRLETFDNLTVIVVCFVPDLAGGVGYALGAGAGWKDQVPQELVARGTLQAEEMARV

SEQ ID NO: 11325 - protein, 387 aa, Zea mays subsp. mays
  peptide (1)..(387): Ceres Seq. ID no. 12413852
  misc_feature (76)..(340): Pfam Name: Protein phosphatase 2C Pfam Description: Protein phosphatase 2C
  misc_feature (1)..(354): Homolog of NCBI NO: 34894410 NR Description: putative protein phosphatase [Oryza sativa
  misc_feature (40)..(347): Homolog of NCBI NO: 25352221 NR Description: phosphoprotein phosphatase (EC 3.1.3.16) 2C
  misc_feature (70)..(348): Homolog of NCBI NO: 15228717 NR Description: protein phosphatase 2C (PP2C); protein id: supported by cDNA: 20050. [Arabidopsis thaliana]
  misc_feature (70)..(348): Homolog of NCBI NO: 30695577 NR Description: protein phosphatase 2C (PP2C), putative
  misc_feature (33)..(347): Homolog of NCBI NO: 15221047 NR Description: protein phosphatase-2C, putative; protein id: [Arabidopsis thaliana] >gi|8778520|gb|AAF79528.1|AC023673_16 [Arabidopsis thaliana] >gi|12323084|gb|AAG51521.1|AC051631_1
  misc_feature (49)..(347): Homolog of NCBI NO: 30684431 NR Description: protein phosphatase 2C (PP2C) -related
  misc_feature (68)..(350): Homolog of NCBI NO: 15226152 NR Description: protein phosphatase 2C (PP2C); protein id: supported by cDNA: gi_17979441, supported by cDNA: gi_20259092
  misc_feature (72)..(350): Homolog of NCBI NO: 10140768 NR Description: putative protein phosphatase-2C [Oryza sativa]
  misc_feature (72)..(350): Homolog of NCBI NO: 37536524 NR Description: putative protein phosphatase-2C [Oryza sativa
  misc_feature (72)..(350): Homolog of NCBI NO: 15230495 NR Description: protein phosphatase 2C (PP2C); protein id:
MHQVVPLLEPPLHRCVVKSVDVMEEVVAVAPGQVQPATSPKALLEVAVEVPDLELKRSSNAGSSVSAEQLQFVPIIRSGSFADIGPRRFMEDEHIRIDDLSGHLGSLLMVSAPSAFYGVFDGHGGSDAAAYMKTHAMRLFFEDADFPQASQEDKIFAESVEDSVRRAFLRADLALADDSVINRSSGTTALTALVLGRQLLVANAGDCRAVLCRKGTAVEVSKDHRPTYDAERQRVIECGGYIEDGYLNGVLSVTRALGDWDMKLPQGSPSPLIAEPEIHWTTLTEDDEFLIIGCDGIWDVMSSQHAVSTVRKGLRRHDDPGRSAQELAMEAKRLETFDNLTVIVVCFVPDLAGGVGYALGAGAGWKDQVPQELVARGTLQAEEMARV

SEQ ID NO: 11326 - protein, 365 aa, Zea mays subsp. mays
  peptide (1)..(365): Ceres Seq. ID no. 12413853
  misc_feature (54)..(318): Pfam Name: Protein phosphatase 2C Pfam Description: Protein phosphatase 2C
  misc_feature (1)..(332): Homolog of NCBI NO: 34894410 NR Description: putative protein phosphatase [Oryza sativa
  misc_feature (18)..(325): Homolog of NCBI NO: 25352221 NR Description: phosphoprotein phosphatase (EC 3.1.3.16) 2C
  misc_feature (48)..(326): Homolog of NCBI NO: 15228717 NR Description: protein phosphatase 2C (PP2C); protein id: supported by cDNA: 20050. [Arabidopsis thaliana]
  misc_feature (48)..(326): Homolog of NCBI NO: 30695577 NR Description: protein phosphatase 2C (PP2C), putative
  misc_feature (11)..(325): Homolog of NCBI NO: 15221047 NR Description: protein phosphatase-2C, putative; protein id: [Arabidopsis thaliana] >gi|8778520|gb|AAF79528.1|AC023673_16 [Arabidopsis thaliana] >gi|12323084|gb|AAG51521.1|AC051631_1
  misc_feature (27)..(325): Homolog of NCBI NO: 30684431 NR Description: protein phosphatase 2C (PP2C) -related
  misc_feature (46)..(328): Homolog of NCBI NO: 15226152 NR Description: protein phosphatase 2C (PP2C); protein id: supported by cDNA: gi_17979441, supported by cDNA: gi_20259092
  misc_feature (50)..(328): Homolog of NCBI NO: 10140768 NR Description: putative protein phosphatase-2C [Oryza sativa]
  misc_feature (50)..(328): Homolog of NCBI NO: 37536524 NR Description: putative protein phosphatase-2C [Oryza sativa
  misc_feature (50)..(328): Homolog of NCBI NO: 15230495 NR Description: protein phosphatase 2C (PP2C); protein id:
MEEVVAVAPGQVQPATSPKALLEVAVEVPDLELKRSSNAGSSVSAEQLQFVPIIRSGSFADIGPRRFMEDEHIRIDDLSGHLGSLLMVSAPSAFYGVFDGHGGSDAAAYMKTHAMRLFFEDADFPQASQEDKIFAESVEDSVRRAFLRADLALADDSVINRSSGTTALTALVLGRQLLVANAGDCRAVLCRKGTAVEVSKDHRPTYDAERQRVIECGGYIEDGYLNGVLSVTRALGDWDMKLPQGSPSPLIAEPEIHWTTLTEDDEFLIIGCDGIWDVMSSQHAVSTVRKGLRRHDDPGRSAQELAMEAKRLETFDNLTVIVVCFVPDLAGGVGYALGAGAGWKDQVPQELVARGTLQAEEMARV

SEQ ID NO: 11327 - DNA, 882 bp, Zea mays subsp. mays
  misc_feature (1)..(882): Ceres Seq. ID no. 12402320
  misc_feature: MA Experiment ID: 108530 Result: Down-regulated in Transcription
  misc_feature: MA Experiment 108530 PARAMETER Experiment Name: Zm_Imbibed_Seeds_P Parameter: Age (day) Value: 6 vs. 2
  misc_feature: MA Experiment 108530 PARAMETER Experiment Name: Zm_Imbibed_Seeds_P Parameter: Organism Value: Zea mays
  misc_feature: MA Experiment 108530 PARAMETER Experiment Name: Zm_Imbibed_Seeds_P Parameter: Plant Line Value: 35A19
  misc_feature: MA Experiment 108530 PARAMETER Experiment Name: Zm_Imbibed_Seeds_P Parameter: Tissue Value: Aerial vs. Embryo
  misc_feature: MA Experiment ID: 108535 Result: Up-regulated in Transcription
  misc_feature: MA Experiment 108535 PARAMETER Experiment Name: Zm_Meristem_P Parameter: Age (day) Value: 8
  misc_feature: MA Experiment 108535 PARAMETER Experiment Name: Zm_Meristem_P Parameter: Organism Value: Zea mays
  misc_feature: MA Experiment 108535 PARAMETER Experiment Name: Zm_Meristem_P Parameter: Plant Line Value: 35A19
  misc_feature: MA Experiment 108535 PARAMETER Experiment Name: Zm_Meristem_P Parameter: Tissue Value: Root Meristem vs. Above Root Meristem
  misc_feature: MA Experiment ID: 108543 Result: Up-regulated in Transcription
  misc_feature: MA Experiment ID: 108544 Result: Down-regulated in Transcription
  misc_feature: MA Experiment ID: 108556 Result: Down-regulated in Transcription
  misc_feature: MA Experiment 108556 PARAMETER Experiment Name: Zm_Drought_P Parameter: Age (day) Value: 9
  misc_feature: MA Experiment 108556 PARAMETER Experiment Name: Zm_Drought_P Parameter: Organism Value: Zea mays
  misc_feature: MA Experiment 108556 PARAMETER Experiment Name: Zm_Drought_P Parameter: Plant Line Value: 35A19
  misc_feature: MA Experiment 108556 PARAMETER Experiment Name: Zm_Drought_P Parameter: Timepoint (hr) Value: 24
  misc_feature: MA Experiment 108556 PARAMETER Experiment Name: Zm_Drought_P Parameter: Tissue Value: Aerial
  misc_feature: MA Experiment 108556 PARAMETER Experiment Name: Zm_Drought_P Parameter: Treatment Value: Drought vs. No Drought
  misc_feature: MA Experiment ID: 20000108 Result: Up-regulated in Transcription
  misc_feature: MA Experiment 20000108 PARAMETER Experiment Name: Zm_Root-Tips_P Parameter: Age (day) Value: 12
  misc_feature: MA Experiment 20000108 PARAMETER Experiment Name: Zm_Root-Tips_P Parameter: Organism Value: Zea mays
  misc_feature: MA Experiment 20000108 PARAMETER Experiment Name: Zm_Root-Tips_P Parameter: Tissue Value: Root tips vs. Root mid region    35
  misc_feature: MA Experiment 20000108 PARAMETER Experiment Name: Zm_Root-Tips_P Parameter: Tissue Value: Root tips vs. Root mid region   Sequence Listing-Misc Features (4)
  misc_feature: MA Experiment ID: 20000477 Result: Down-regulated in Transcription
  misc_feature: MA Experiment 20000477 PARAMETER Experiment Name: Zm_5mM_SA_P Parameter: Age (day) Value: 10
  misc_feature: MA Experiment 20000477 PARAMETER Experiment Name: Zm_5mM_SA_P Parameter: Organism Value: Zea mays
  misc_feature: MA Experiment 20000477 PARAMETER Experiment Name: Zm_5mM_SA_P Parameter: Plant Line Value: 35A19
  misc_feature: MA Experiment 20000477 PARAMETER Experiment Name: Zm_5mM_SA_P Parameter: Timepoint (hr) Value: 48
  misc_feature: MA Experiment 20000477 PARAMETER Experiment Name: Zm_5mM_SA_P Parameter: Tissue Value: Aerial
  misc_feature: MA Experiment 20000477 PARAMETER Experiment Name: Zm_5mM_SA_P Parameter: Treatment Value: 5mM SA vs. No Treatment
  misc_feature: MA Experiment ID: 20000478 Result: Down-regulated in Transcription
  misc_feature: MA Experiment 20000478 PARAMETER Experiment Name: Zm_5mM_SA_P Parameter: Age (day) Value: 11
  misc_feature: MA Experiment 20000478 PARAMETER Experiment Name: Zm_5mM_SA_P Parameter: Organism Value: Zea mays
  misc_feature: MA Experiment 20000478 PARAMETER Experiment Name: Zm_5mM_SA_P Parameter: Plant Line Value: 35A19
  misc_feature: MA Experiment 20000478 PARAMETER Experiment Name: Zm_5mM_SA_P Parameter: Timepoint (hr) Value: 72
  misc_feature: MA Experiment 20000478 PARAMETER Experiment Name: Zm_5mM_SA_P Parameter: Tissue Value: Aerial
  misc_feature: MA Experiment 20000478 PARAMETER Experiment Name: Zm_5mM_SA_P Parameter: Treatment Value: 5mM SA vs. No Treatment
  misc_feature: MA Experiment ID: 20000480 Result: Down-regulated in Transcription
  misc_feature: MA Experiment 20000480 PARAMETER Experiment Name: Zm_Drought_P Parameter: Age (day) Value: 11
  misc_feature: MA Experiment 20000480 PARAMETER Experiment Name: Zm_Drought_P Parameter: Organism Value: Zea mays
  misc_feature: MA Experiment 20000480 PARAMETER Experiment Name: Zm_Drought_P Parameter: Plant Line Value: 35A19
  misc_feature: MA Experiment 20000480 PARAMETER Experiment Name: Zm_Drought_P Parameter: Timepoint (hr) Value: 72
  misc_feature: MA Experiment 20000480 PARAMETER Experiment Name: Zm_Drought_P Parameter: Tissue Value: Aerial
  misc_feature: MA Experiment 20000480 PARAMETER Experiment Name: Zm_Drought_P Parameter: Treatment Value: Drought vs. No Drought
  misc_feature: MA Experiment ID: 20000492 Result: Up-regulated in Transcription
  misc_feature: MA Experiment 20000492 PARAMETER Experiment Name: Zm_Hybrid_Seed_Dev_P Parameter: DAP Value: 12
  misc_feature: MA Experiment 20000492 PARAMETER Experiment Name: Zm_Hybrid_Seed_Dev_P Parameter: Organism Value: Zea mays
  misc_feature: MA Experiment 20000492 PARAMETER Experiment Name: Zm_Hybrid_Seed_Dev_P Parameter: Plant Line Value: 35A19
  misc_feature: MA Experiment 20000492 PARAMETER Experiment Name: Zm_Hybrid_Seed_Dev_P Parameter: Tissue Value: Fert Kernel vs. Unfert Floret
  misc_feature: MA Experiment ID: 20000533 Result: Down-regulated in Transcription
  misc_feature: MA Experiment 20000533 PARAMETER Experiment Name: Zm_0.001percent_MeJA_P Parameter: Age (day) Value: 11
  misc_feature: MA Experiment 20000533 PARAMETER Experiment Name: Zm_0.001percent_MeJA_P Parameter: Organism Value: Zea mays
  misc_feature: MA Experiment 20000533 PARAMETER Experiment Name: Zm_0.001percent_MeJA_P Parameter: Plant Line Value: 35A19
  misc_feature: MA Experiment 20000533 PARAMETER Experiment Name: Zm_0.001percent_MeJA_P Parameter: Timepoint (hr) Value: 72
  misc_feature: MA Experiment 20000533 PARAMETER Experiment Name: Zm_0.001percent_MeJA_P Parameter: Tissue Value: Aerial
  misc_feature: MA Experiment 20000533 PARAMETER Experiment Name: Zm_0.001percent_MeJA_P Parameter: Treatment Value: 0.001percent MeJA vs. No Treatment
  misc_feature: MA Experiment ID: 20000626 Result: Down-regulated in Transcription
  misc_feature: MA Experiment 20000626 PARAMETER Experiment Name: Zm_Herbicide-Treatments_P Parameter: Timepoint (hr) Value: 12
  misc_feature: MA Experiment 20000626 PARAMETER Experiment Name: Zm_Herbicide-Treatments_P Parameter: Tissue Value: Aerial
  misc_feature: MA Experiment 20000626 PARAMETER Experiment Name: Zm_Herbicide-Treatments_P Parameter: Treatment Value: Roundup vs. No Treatment
attcactcctcgcgcctcgtgatcccatccaaatcccgatcagtccccgcccaagcctagcagatccgccggcgagcgcgcgggggcaatgggtgtcgtctcggcagcggcggacgcgattgtcgcggttttctccctcaccatcgtcgtcgcggcgccgctactcgacgcgcagtccgtcctcccgcataccctctacccggcgccgctcctggaactcaagcgctggtacgccgccgagtttggcgactacctcatggcccagccccccggcttcttccgtggccttgtttgcctcgagctcgccttccaatggccgctcgccgtcgccacactctacggcatcctcacccgccgccgctggggctgccaccacctccctcatggccggcgttggcaccctcacctccatgtctgcaattcttggtgagatgttaggttcaggcaaatcaacaccaaagttgcttcagatgtatgttccttatgctgtttttgctgtcattgctattctacgtggactttgctcatgctctggacgcactactgctggttcatcacttgggccttctgcccggaagaagagggtctagatcagcagtgacacttggagaattttcggtttgagacagtggcgccagagcactaatgctggtcagaagacgattatctggatcaggtttctatccctggtatttagcacggatgttgaaaaatccagatagtgttagtggctgtttctctaggatttggtgttcgttttcccttaaatgtgatattcatcttgcctttatttccattttaccctttgattatatgtcttgctaactaagacattgatttgtttactggatgagctgattctactctggcattgttctggcc

SEQ ID NO: 11328 - protein, 195 aa, Zea mays subsp. mays
  peptide (1)..(195): Ceres Seq. ID no. 12402321
  misc_feature (122)..(194): Homolog of NCBI NO: 28411944 NR Description: OSJNBa0027N13.37 [Oryza sativa (japonica
  misc_feature (122)..(194): Homolog of NCBI NO: 28411943 NR Description: OSJNBa0027N13.35 [Oryza sativa (japonica
  misc_feature (124)..(194): Homolog of NCBI NO: 18402955 NR Description: expressed protein; protein id: At2g32380.1, by cDNA: 9671. [Arabidopsis thaliana] >gi|25372728|pir||D84732
  misc_feature (124)..(185): Homolog of NCBI NO: 18390494 NR Description: expressed protein; protein id: At1g05210.1, by cDNA: 29808. [Arabidopsis thaliana] >gi|25372732|pir||E86186
  misc_feature (124)..(177): Homolog of NCBI NO: 15220447 NR Description: hypothetical protein; protein id: At1g05220.1
SLLAPRDPIQIPISPRPSLADPPASARGQWVSSRQRRTRLSRFSPSPSSSRRRYSTRSPSSRIPSTRRRSWNSSAGTPPSLATTSWPSPPASSVALFASSSPSNGRSPSPHSTASSPAAAGAATTSLMAGVGTLTSMSAILGEMLGSGKSTPKLLQMYVPYAVFAVIAILRGLCSCSGRTTAGSSLGPSARKKRV

SEQ ID NO: 11329 - protein, 113 aa, Zea mays subsp. mays
  peptide (1)..(113): Ceres Seq. ID no. 12402322
  misc_feature (1)..(100): Homolog of NCBI NO: 18402955 NR Description: expressed protein; protein id: At2g32380.1, by cDNA: 9671. [Arabidopsis thaliana] >gi|25372728|pir||D84732
  misc_feature (1)..(92): Homolog of NCBI NO: 18390494 NR Description: expressed protein; protein id: At1g05210.1, by cDNA: 29808. [Arabidopsis thaliana] >gi|25372732|pir||E86186
  misc_feature (1)..(100): Homolog of NCBI NO: 15220447 NR Description: hypothetical protein; protein id: At1g05220.1
  misc_feature (1)..(92): Homolog of NCBI NO: 19526880 NR Description: RIKEN cDNA 1810014L12 [Mus musculus]
  misc_feature (1)..(92): Homolog of NCBI NO: 27688749 NR Description: similar to RIKEN cDNA 1810014L12 [Mus musculus] norvegicus] >gi|27688753|ref|XP_220742.1| similar to RIKEN cDNA
  misc_feature (11)..(87): Homolog of NCBI NO: 2135212 NR Description: gene MAC30 protein - human (fragment)
  misc_feature (1)..(92): Homolog of NCBI NO: 28411944 NR Description: OSJNBa0027N13.37 [Oryza sativa (japonica
  misc_feature (1)..(92): Homolog of NCBI NO: 28411943 NR Description: OSJNBa0027N13.35 [Oryza sativa (japonica
MGVVSAAADAIVAVFSLTIVVAAPLLDAQSVLPHTLYPAPLLELKRWYAAEFGDYLMAQPPGFFRGLVCLELAFQWPLAVATLYGILTRRRWGCHHLPHGRRWHPHLHVCNSW

SEQ ID NO: 11330 - DNA, 1162 bp, Zea mays subsp. mays
  misc_feature (1)..(1162): Ceres Seq. ID no. 12401808
  misc_feature: MA Experiment ID: 108535 Result: Up-regulated in Transcription
  misc_feature: MA Experiment 108535 PARAMETER Experiment Name: Zm_Meristem_P Parameter: Age (day) Value: 8
  misc_feature: MA Experiment 108535 PARAMETER Experiment Name: Zm_Meristem_P Parameter: Organism Value: Zea mays
  misc_feature: MA Experiment 108535 PARAMETER Experiment Name: Zm_Meristem_P Parameter: Plant Line Value: 35A19
  misc_feature: MA Experiment 108535 PARAMETER Experiment Name: Zm_Meristem_P Parameter: Tissue Value: Root Meristem vs. Above Root Meristem
  misc_feature: MA Experiment ID: 108543 Result: Up-regulated in Transcription
  misc_feature: MA Experiment ID: 108544 Result: Down-regulated in Transcription
  misc_feature: MA Experiment ID: 20000535 Result: Down-regulated in Transcription
  misc_feature: MA Experiment 20000535 PARAMETER Experiment Name: Zm_Hybrid_Seed_Dev_P Parameter: DAP Value: 30 vs. 12
  misc_feature: MA Experiment 20000535 PARAMETER Experiment Name: Zm_Hybrid_Seed_Dev_P Parameter: Organism Value: Zea mays
  misc_feature: MA Experiment 20000535 PARAMETER Experiment Name: Zm_Hybrid_Seed_Dev_P Parameter: Plant Line Value: 35A19
  misc_feature: MA Experiment 20000535 PARAMETER Experiment Name: Zm_Hybrid_Seed_Dev_P Parameter: Tissue Value: Embryo vs. Unfert Floret
agtccgccacaagcacacgcgcacacaggggccaagcgcctacacctacagaggagagacaaggtctgccgtccgcgcgtgcgcggaagaggggacggaggaagaaggctgccagcaatcagagatggaggtggggttcttgggtctgggcatcatgggcaaggcaatggcgaccaacctcctccgccacggcttccgcgtcaccgtctggaacaggaccctcgccaagtgccaagagctcgccgcgctcggcgccaccgtcggggagacgcctgcctccgtcgtctccaagtgcagatacaccatcgccatgctctccgaccccagcgccgccctatcagtcgtcttcgacaaggatggcgtgctcgagcagatcggtagcgggaagggctatgtggacatgtccactgttgacgctgcaacttcgaccaagattagcgaggcagttaaacaaaaagggggagctttccttgaagctccagtttcagggagcaagaagccagctgaagatggccaattggtcattcttgctgcagggaacaagccattgtatgatggtatgattcctgcatttgatgtactggggaagaagtcattctttctgggagagattggaaatggggcaaagatgaagcttgtggtcaacatggtcatgggaagtatgatgaattctttgtccgagggactctgtttggccgacaaaagtgggctgagcccccaaacacttcttgatgtactggaccttggcgccatcgcaaacccaatgttcaagctgaaggggcctacaatgctgcaaggcagctacagccctgcgtttcccctgaagcatcagcagaaggacatgaggttagcgcttgctctgggagatgagaacgccgtcgccatgcccgtctcagcagctgccaatgaggcgttcaagaaggcgaggagcctggggctgggagaccaggatttttcggcggtctatgaggttgtgaagggcgcgggtggttctggatctggccagccgtgatagaaggaccatttgtgagttgtgactttgttagcccatttccatgccgatttgcaacatagcgacgtacgagtacgtgtgtattcgaaatttggaaccagaccatacgttgcaaaagaaataataaatcaaagagatggtgctagctcg

SEQ ID NO: 11331 - protein, 336 aa, Zea mays subsp. mays
  peptide (1)..(336): Ceres Seq. ID no. 12401809
  misc_feature (43)..(203): Pfam Name: NAD binding domain of 6-phosphogluconate dehydrogenase Pfam Description: NAD binding domain of 6-phosphogluconate
  misc_feature (42)..(332): Homolog of NCBI NO: 29368238 NR Description: gamma hydroxybutyrate dehydrogenase-like protein
  misc_feature (42)..(326): Homolog of NCBI NO: 15375068 NR Description: gamma hydroxybutyrate dehydrogenase [Arabidopsis
  misc_feature (42)..(326): Homolog of NCBI NO: 18404556 NR Description: expressed protein; protein id: At3g25530.1, by cDNA: gi_15146313, supported by cDNA: gi_15375067 [Arabidopsis
  misc_feature (42)..(267): Homolog of NCBI NO: 15146314 NR Description: AT3g25530/MWL2_15 [Arabidopsis thaliana]
  misc_feature (45)..(326): Homolog of NCBI NO: 23054597 NR Description: hypothetical protein [Geobacter metallireducens]
  misc_feature (42)..(328): Homolog of NCBI NO: 18394513 NR Description: Expressed protein; protein id: At1g17650.1, by cDNA: 17110., supported by cDNA: gi_20260471 [Arabidopsis >gi|20260472|gb|AAM13134.1| unknown protein [Arabidopsis
  misc_feature (112)..(328): Homolog of NCBI NO: 8778467 NR Description: F1L3.35 [Arabidopsis thaliana]
  misc_feature (42)..(112): Homolog of NCBI NO: 8778467 NR Description: F1L3.35 [Arabidopsis thaliana]
  misc_feature (45)..(326): Homolog of NCBI NO: 39996474 NR Description: 3-hydroxyisobutyrate dehydrogenase family protein
  misc_feature (19)..(322): Homolog of NCBI NO: 13277568 NR Description: Similar to RIKEN cDNA 3930401K13 gene [Homo
VRHKHTRTQGPSAYTYRGETRSAVRACAEEGTEEEGCQQSEMEVGFLGLGIMGKAMATNLLRHGFRVTVWNRTLAKCQELAALGATVGETPASVVSKCRYTIAMLSDPSAALSVVFDKDGVLEQIGSGKGYVDMSTVDAATSTKISEAVKQKGGAFLEAPVSGSKKPAEDGQLVILAAGNKPLYDGMIPAFDVLGKKSFFLGEIGNGAKMKLVVNMVMGSMMNSLSEGLCLADKSGLSPQTLLDVLDLGAIANPMFKLKGPTMLQGSYSPAFPLKHQQKDMRLALALGDENAVAMPVSAAANEAFKKARSLGLGDQDFSAVYEVVKGAGGSGSGQP

SEQ ID NO: 11332 - protein, 295 aa, Zea mays subsp. mays
  peptide (1)..(295): Ceres Seq. ID no. 12401810
  misc_feature (2)..(162): Pfam Name: NAD binding domain of 6-phosphogluconate dehydrogenase Pfam Description: NAD binding domain of 6-phosphogluconate
  misc_feature (1)..(291): Homolog of NCBI NO: 29368238 NR Description: gamma hydroxybutyrate dehydrogenase-like protein
  misc_feature (1)..(285): Homolog of NCBI NO: 15375068 NR Description: gamma hydroxybutyrate dehydrogenase [Arabidopsis
  misc_feature (1)..(285): Homolog of NCBI NO: 18404556 NR Description: expressed protein; protein id: At3g25530.1, by cDNA: gi_15146313, supported by cDNA: gi_15375067 [Arabidopsis
  misc_feature (1)..(226): Homolog of NCBI NO: 15146314 NR Description: AT3g25530/MWL2_15 [Arabidopsis thaliana]
  misc_feature (4)..(285): Homolog of NCBI NO: 23054597 NR Description: hypothetical protein [Geobacter metallireducens]
  misc_feature (1)..(287): Homolog of NCBI NO: 18394513 NR Description: Expressed protein; protein id: At1g17650.1, by cDNA: 17110., supported by cDNA: gi_20260471 [Arabidopsis >gi|20260472|gb|AAM13134.1| unknown protein [Arabidopsis
  misc_feature (71)..(287): Homolog of NCBI NO: 8778467 NR Description: F1L3.35 [Arabidopsis thaliana]
  misc_feature (1)..(71): Homolog of NCBI NO: 8778467 NR Description: F1L3.35 [Arabidopsis thaliana]
  misc_feature (4)..(285): Homolog of NCBI NO: 39996474 NR Description: 3-hydroxyisobutyrate dehydrogenase family protein
  misc_feature (1)..(281): Homolog of NCBI NO: 13277568 NR Description: Similar to RIKEN cDNA 3930401K13 gene [Homo
MEVGFLGLGIMGKAMATNLLRHGFRVTVWNRTLAKCQELAALGATVGETPASVVSKCRYTIAMLSDPSAALSVVFDKDGVLEQIGSGKGYVDMSTVDAATSTKISEAVKQKGGAFLEAPVSGSKKPAEDGQLVILAAGNKPLYDGMIPAFDVLGKKSFFLGEIGNGAKMKLVVNMVMGSMMNSLSEGLCLADKSGLSPQTLLDVLDLGAIANPMFKLKGPTMLQGSYSPAFPLKHQQKDMRLALALGDENAVAMPVSAAANEAFKKARSLGLGDQDFSAVYEVVKGAGGSGSGQP

SEQ ID NO: 11333 - protein, 285 aa, Zea mays subsp. mays
  peptide (1)..(285): Ceres Seq. ID no. 12401811
  misc_feature (1)..(152): Pfam Name: NAD binding domain of 6-phosphogluconate dehydrogenase Pfam Description: NAD binding domain of 6-phosphogluconate
  misc_feature (1)..(281): Homolog of NCBI NO: 29368238 NR Description: gamma hydroxybutyrate dehydrogenase-like protein
  misc_feature (1)..(275): Homolog of NCBI NO: 15375068 NR Description: gamma hydroxybutyrate dehydrogenase [Arabidopsis
  misc_feature (1)..(275): Homolog of NCBI NO: 18404556 NR Description: expressed protein; protein id: At3g25530.1, by cDNA: gi_15146313, supported by cDNA: gi_15375067 [Arabidopsis
  misc_feature (1)..(216): Homolog of NCBI NO: 15146314 NR Description: AT3g25530/MWL2_15 [Arabidopsis thaliana]
  misc_feature (1)..(275): Homolog of NCBI NO: 23054597 NR Description: hypothetical protein [Geobacter metallireducens]
  misc_feature (1)..(277): Homolog of NCBI NO: 18394513 NR Description: Expressed protein; protein id: At1g17650.1, by cDNA: 17110., supported by cDNA: gi_20260471 [Arabidopsis >gi|20260472|gb|AAM13134.1| unknown protein [Arabidopsis
  misc_feature (61)..(277): Homolog of NCBI NO: 8778467 NR Description: F1L3.35 [Arabidopsis thaliana]
  misc_feature (1)..(61): Homolog of NCBI NO: 8778467 NR Description: F1L3.35 [Arabidopsis thaliana]
  misc_feature (1)..(275): Homolog of NCBI NO: 39996474 NR Description: 3-hydroxyisobutyrate dehydrogenase family protein
  misc_feature (1)..(271): Homolog of NCBI NO: 13277568 NR Description: Similar to RIKEN cDNA 3930401K13 gene [Homo
MGKAMATNLLRHGFRVTVWNRTLAKCQELAALGATVGETPASVVSKCRYTIAMLSDPSAALSVVFDKDGVLEQIGSGKGYVDMSTVDAATSTKISEAVKQKGGAFLEAPVSGSKKPAEDGQLVILAAGNKPLYDGMIPAFDVLGKKSFFLGEIGNGAKMKLVVNMVMGSMMNSLSEGLCLADKSGLSPQTLLDVLDLGAIANPMFKLKGPTMLQGSYSPAFPLKHQQKDMRLALALGDENAVAMPVSAAANEAFKKARSLGLGDQDFSAVYEVVKGAGGSGSGQP

SEQ ID NO: 11334 - DNA, 1220 bp, Zea mays subsp. mays
  misc_feature (1)..(1220): Ceres Seq. ID no. 12404052
  misc_feature: MA Experiment ID: 108504 Result: Down-regulated in Transcription
  misc_feature: MA Experiment 108504 PARAMETER Experiment Name: Zm_Drought_P Parameter: Age (day) Value: 8
  misc_feature: MA Experiment 108504 PARAMETER Experiment Name: Zm_Drought_P Parameter: Organism Value: Zea mays
  misc_feature: MA Experiment 108504 PARAMETER Experiment Name: Zm_Drought_P Parameter: Plant Line Value: 35A19
  misc_feature: MA Experiment 108504 PARAMETER Experiment Name: Zm_Drought_P Parameter: Timepoint (hr) Value: 12
  misc_feature: MA Experiment 108504 PARAMETER Experiment Name: Zm_Drought_P Parameter: Tissue Value: Aerial
  misc_feature: MA Experiment 108504 PARAMETER Experiment Name: Zm_Drought_P Parameter: Treatment Value: Drought vs. No Drought
  misc_feature: MA Experiment ID: 108513 Result: Down-regulated in Transcription
  misc_feature: MA Experiment 108513 PARAMETER Experiment Name: Zm_100uM_ABA_P Parameter: Age (day) Value: 8
  misc_feature: MA Experiment 108513 PARAMETER Experiment Name: Zm_100uM_ABA_P Parameter: Organism Value: Zea mays
  misc_feature: MA Experiment 108513 PARAMETER Experiment Name: Zm_100uM_ABA_P Parameter: Plant Line Value: 35A19
  misc_feature: MA Experiment 108513 PARAMETER Experiment Name: Zm_100uM_ABA_P Parameter: Timepoint (hr) Value: 6
  misc_feature: MA Experiment 108513 PARAMETER Experiment Name: Zm_100uM_ABA_P Parameter: Tissue Value: Aerial
  misc_feature: MA Experiment 108513 PARAMETER Experiment Name: Zm_100uM_ABA_P Parameter: Treatment Value: 100uM ABA vs. No Treatment
  misc_feature: MA Experiment ID: 108515 Result: Down-regulated in Transcription
  misc_feature: MA Experiment 108515 PARAMETER Experiment Name: Zm_2mM_SA_P Parameter: Age (day) Value: 8
  misc_feature: MA Experiment 108515 PARAMETER Experiment Name: Zm_2mM_SA_P Parameter: Organism Value: Zea mays
  misc_feature: MA Experiment 108515 PARAMETER Experiment Name: Zm_2mM_SA_P Parameter: Plant Line Value: 35A19
  misc_feature: MA Experiment 108515 PARAMETER Experiment Name: Zm_2mM_SA_P Parameter: Timepoint (hr) Value: 12
  misc_feature: MA Experiment 108515 PARAMETER Experiment Name: Zm_2mM_SA_P Parameter: Tissue Value: Aerial
  misc_feature: MA Experiment 108515 PARAMETER Experiment Name: Zm_2mM_SA_P Parameter: Treatment Value: 2mM SA vs. No Treatment
  misc_feature: MA Experiment ID: 108523 Result: Down-regulated in Transcription
  misc_feature: MA Experiment 108523 PARAMETER Experiment Name: Zm_42deg_Heat_P Parameter: Age (day) Value: 8
  misc_feature: MA Experiment 108523 PARAMETER Experiment Name: Zm_42deg_Heat_P Parameter: Organism Value: Zea mays
  misc_feature: MA Experiment 108523 PARAMETER Experiment Name: Zm_42deg_Heat_P Parameter: Plant Line Value: 35A19
  misc_feature: MA Experiment 108523 PARAMETER Experiment Name: Zm_42deg_Heat_P Parameter: Temperature (deg C) Value: 42 vs. 22
  misc_feature: MA Experiment 108523 PARAMETER Experiment Name: Zm_42deg_Heat_P Parameter: Timepoint (hr) Value: 6
  misc_feature: MA Experiment 108523 PARAMETER Experiment Name: Zm_42deg_Heat_P Parameter: Tissue Value: Aerial
  misc_feature: MA Experiment ID: 108527 Result: Down-regulated in Transcription
  misc_feature: MA Experiment 108527 PARAMETER Experiment Name: Zm_5mM_NO_P Parameter: Age (day) Value: 8
  misc_feature: MA Experiment 108527 PARAMETER Experiment Name: Zm_5mM_NO_P Parameter: Organism Value: Zea mays
  misc_feature: MA Experiment 108527 PARAMETER Experiment Name: Zm_5mM_NO_P Parameter: Plant Line Value: 35A19
  misc_feature: MA Experiment 108527 PARAMETER Experiment Name: Zm_5mM_NO_P Parameter: Timepoint (hr) Value: 6
  misc_feature: MA Experiment 108527 PARAMETER Experiment Name: Zm_5mM_NO_P Parameter: Tissue Value: Aerial
  misc_feature: MA Experiment 108527 PARAMETER Experiment Name: Zm_5mM_NO_P Parameter: Treatment Value: 5mM NO vs. No Treatment
  misc_feature: MA Experiment ID: 108529 Result: Down-regulated in Transcription
  misc_feature: MA Experiment 108529 PARAMETER Experiment Name: Zm_Imbibed_Seeds_P Parameter: Age (day) Value: 5 vs. 2
  misc_feature: MA Experiment 108529 PARAMETER Experiment Name: Zm_Imbibed_Seeds_P Parameter: Organism Value: Zea mays
  misc_feature: MA Experiment 108529 PARAMETER Experiment Name: Zm_Imbibed_Seeds_P Parameter: Plant Line Value: 35A19
  misc_feature: MA Experiment 108529 PARAMETER Experiment Name: Zm_Imbibed_Seeds_P Parameter: Tissue Value: Roots vs. Embryo
  misc_feature: MA Experiment ID: 108535 Result: Down-regulated in Transcription
  misc_feature: MA Experiment 108535 PARAMETER Experiment Name: Zm_Meristem_P Parameter: Age (day) Value: 8
  misc_feature: MA Experiment 108535 PARAMETER Experiment Name: Zm_Meristem_P Parameter: Organism Value: Zea mays
  misc_feature: MA Experiment 108535 PARAMETER Experiment Name: Zm_Meristem_P Parameter: Plant Line Value: 35A19
  misc_feature: MA Experiment 108535 PARAMETER Experiment Name: Zm_Meristem_P Parameter: Tissue Value: Root Meristem vs. Above Root Meristem
  misc_feature: MA Experiment ID: 108536 Result: Down-regulated in Transcription
  misc_feature: MA Experiment 108536 PARAMETER Experiment Name: Zm_Meristem_P Parameter: Age (day) Value: 8
  misc_feature: MA Experiment 108536 PARAMETER Experiment Name: Zm_Meristem_P Parameter: Organism Value: Zea mays
  misc_feature: MA Experiment 108536 PARAMETER Experiment Name: Zm_Meristem_P Parameter: Plant Line Value: 35A19
  misc_feature: MA Experiment 108536 PARAMETER Experiment Name: Zm_Meristem_P Parameter: Tissue Value: Shoot Meristem vs. Above Shoot Meristem
  misc_feature: MA Experiment ID: 108540 Result: Down-regulated in Transcription
  misc_feature: MA Experiment 108540 PARAMETER Experiment Name: Zm_20percent_PEG_P Parameter: Age (day) Value: 8
  misc_feature: MA Experiment 108540 PARAMETER Experiment Name: Zm_20percent_PEG_P Parameter: Organism Value: Zea mays
  misc_feature: MA Experiment 108540 PARAMETER Experiment Name: Zm_20percent_PEG_P Parameter: Plant Line Value: 35A19
  misc_feature: MA Experiment 108540 PARAMETER Experiment Name: Zm_20percent_PEG_P Parameter: Timepoint (hr) Value: 6
  misc_feature: MA Experiment 108540 PARAMETER Experiment Name: Zm_20percent_PEG_P Parameter: Tissue Value: Aerial
  misc_feature: MA Experiment 108540 PARAMETER Experiment Name: Zm_20percent_PEG_P Parameter: Treatment Value: 20percent PEG vs. No Treatment
  misc_feature: MA Experiment ID: 108542 Result: Down-regulated in Transcription
  misc_feature: MA Experiment 108542 PARAMETER Experiment Name: Zm_150mM_NaCl_P Parameter: Age (day) Value: 8
  misc_feature: MA Experiment 108542 PARAMETER Experiment Name: Zm_150mM_NaCl_P Parameter: Organism Value: Zea mays
  misc_feature: MA Experiment 108542 PARAMETER Experiment Name: Zm_150mM_NaCl_P Parameter: Plant Line Value: 35A19
  misc_feature: MA Experiment 108542 PARAMETER Experiment Name: Zm_150mM_NaCl_P Parameter: Timepoint (hr) Value: 6
  misc_feature: MA Experiment 108542 PARAMETER Experiment Name: Zm_150mM_NaCl_P Parameter: Tissue Value: Aerial
  misc_feature: MA Experiment 108542 PARAMETER Experiment Name: Zm_150mM_NaCl_P Parameter: Treatment Value: 150mM NaCl vs. No Treatment
  misc_feature: MA Experiment ID: 108543 Result: Up-regulated in Transcription
  misc_feature: MA Experiment ID: 108546 Result: Down-regulated in Transcription
  misc_feature: MA Experiment 108546 PARAMETER Experiment Name: Zm_Imbibed_Seeds_P Parameter: Age (day) Value: 3 vs. 2
  misc_feature: MA Experiment 108546 PARAMETER Experiment Name: Zm_Imbibed_Seeds_P Parameter: Organism Value: Zea mays
  misc_feature: MA Experiment 108546 PARAMETER Experiment Name: Zm_Imbibed_Seeds_P Parameter: Plant Line Value: 35A19
  misc_feature: MA Experiment 108546 PARAMETER Experiment Name: Zm_Imbibed_Seeds_P Parameter: Tissue Value: Roots vs. Embryo
  misc_feature: MA Experiment ID: 108547 Result: Up-regulated in Transcription
  misc_feature: MA Experiment 108547 PARAMETER Experiment Name: Zm_Imbibed_Seeds_P Parameter: Age (day) Value: 4 vs. 2
  misc_feature: MA Experiment 108547 PARAMETER Experiment Name: Zm_Imbibed_Seeds_P Parameter: Organism Value: Zea mays
  misc_feature: MA Experiment 108547 PARAMETER Experiment Name: Zm_Imbibed_Seeds_P Parameter: Plant Line Value: 35A19
  misc_feature: MA Experiment 108547 PARAMETER Experiment Name: Zm_Imbibed_Seeds_P Parameter: Tissue Value: Aerial vs. Embryo
  misc_feature: MA Experiment ID: 108556 Result: Down-regulated in Transcription
  misc_feature: MA Experiment 108556 PARAMETER Experiment Name: Zm_Drought_P Parameter: Age (day) Value: 9
  misc_feature: MA Experiment 108556 PARAMETER Experiment Name: Zm_Drought_P Parameter: Organism Value: Zea mays
  misc_feature: MA Experiment 108556 PARAMETER Experiment Name: Zm_Drought_P Parameter: Plant Line Value: 35A19
  misc_feature: MA Experiment 108556 PARAMETER Experiment Name: Zm_Drought_P Parameter: Timepoint (hr) Value: 24
  misc_feature: MA Experiment 108556 PARAMETER Experiment Name: Zm_Drought_P Parameter: Tissue Value: Aerial
  misc_feature: MA Experiment 108556 PARAMETER Experiment Name: Zm_Drought_P Parameter: Treatment Value: Drought vs. No Drought
  misc_feature: MA Experiment ID: 108597 Result: Down-regulated in Transcription
  misc_feature: MA Experiment 108597 PARAMETER Experiment Name: Zm_100uM_ABA_P Parameter: Age (day) Value: 9
  misc_feature: MA Experiment 108597 PARAMETER Experiment Name: Zm_100uM_ABA_P Parameter: Organism Value: Zea mays
  misc_feature: MA Experiment 108597 PARAMETER Experiment Name: Zm_100uM_ABA_P Parameter: Plant Line Value: 35A19
  misc_feature: MA Experiment 108597 PARAMETER Experiment Name: Zm_100uM_ABA_P Parameter: Timepoint (hr) Value: 24
  misc_feature: MA Experiment 108597 PARAMETER Experiment Name: Zm_100uM_ABA_P Parameter: Tissue Value: Aerial
  misc_feature: MA Experiment 108597 PARAMETER Experiment Name: Zm_100uM_ABA_P Parameter: Treatment Value: 100uM ABA vs. No Treatment
  misc_feature: MA Experiment ID: 108687 Result: Down-regulated in Transcription
  misc_feature: MA Experiment 108687 PARAMETER Experiment Name: Zm_Embryos-Flowers__P Parameter: Tissue Value: Embryo vs. Aerial+
  misc_feature: MA Experiment ID: 20000477 Result: Down-regulated in Transcription
  misc_feature: MA Experiment 20000477 PARAMETER Experiment Name: Zm_5mM_SA_P Parameter: Age (day) Value: 10
  misc_feature: MA Experiment 20000477 PARAMETER Experiment Name: Zm_5mM_SA_P Parameter: Organism Value: Zea mays
  misc_feature: MA Experiment 20000477 PARAMETER Experiment Name: Zm_5mM_SA_P Parameter: Plant Line Value: 35A19
  misc_feature: MA Experiment 20000477 PARAMETER Experiment Name: Zm_5mM_SA_P Parameter: Timepoint (hr) Value: 48
  misc_feature: MA Experiment 20000477 PARAMETER Experiment Name: Zm_5mM_SA_P Parameter: Tissue Value: Aerial
  misc_feature: MA Experiment 20000477 PARAMETER Experiment Name: Zm_5mM_SA_P Parameter: Treatment Value: 5mM SA vs. No Treatment
  misc_feature: MA Experiment ID: 20000478 Result: Down-regulated in Transcription
  misc_feature: MA Experiment 20000478 PARAMETER Experiment Name: Zm_5mM_SA_P Parameter: Age (day) Value: 11
  misc_feature: MA Experiment 20000478 PARAMETER Experiment Name: Zm_5mM_SA_P Parameter: Organism Value: Zea mays
  misc_feature: MA Experiment 20000478 PARAMETER Experiment Name: Zm_5mM_SA_P Parameter: Plant Line Value: 35A19
  misc_feature: MA Experiment 20000478 PARAMETER Experiment Name: Zm_5mM_SA_P Parameter: Timepoint (hr) Value: 72
  misc_feature: MA Experiment 20000478 PARAMETER Experiment Name: Zm_5mM_SA_P Parameter: Tissue Value: Aerial
  misc_feature: MA Experiment 20000478 PARAMETER Experiment Name: Zm_5mM_SA_P Parameter: Treatment Value: 5mM SA vs. No Treatment
  misc_feature: MA Experiment ID: 20000480 Result: Down-regulated in Transcription
  misc_feature: MA Experiment 20000480 PARAMETER Experiment Name: Zm_Drought_P Parameter: Age (day) Value: 11
  misc_feature: MA Experiment 20000480 PARAMETER Experiment Name: Zm_Drought_P Parameter: Organism Value: Zea mays
  misc_feature: MA Experiment 20000480 PARAMETER Experiment Name: Zm_Drought_P Parameter: Plant Line Value: 35A19
  misc_feature: MA Experiment 20000480 PARAMETER Experiment Name: Zm_Drought_P Parameter: Timepoint (hr) Value: 72
  misc_feature: MA Experiment 20000480 PARAMETER Experiment Name: Zm_Drought_P Parameter: Tissue Value: Aerial
  misc_feature: MA Experiment 20000480 PARAMETER Experiment Name: Zm_Drought_P Parameter: Treatment Value: Drought vs. No Drought
  misc_feature: MA Experiment ID: 20000535 Result: Down-regulated in Transcription
  misc_feature: MA Experiment 20000535 PARAMETER Experiment Name: Zm_Hybrid_Seed_Dev_P Parameter: DAP Value: 30 vs. 12
  misc_feature: MA Experiment 20000535 PARAMETER Experiment Name: Zm_Hybrid_Seed_Dev_P Parameter: Organism Value: Zea mays
  misc_feature: MA Experiment 20000535 PARAMETER Experiment Name: Zm_Hybrid_Seed_Dev_P Parameter: Plant Line Value: 35A19
  misc_feature: MA Experiment 20000535 PARAMETER Experiment Name: Zm_Hybrid_Seed_Dev_P Parameter: Tissue Value: Embryo vs. Unfert Floret
  misc_feature: MA Experiment ID: 20000626 Result: Down-regulated in Transcription
  misc_feature: MA Experiment 20000626 PARAMETER Experiment Name: Zm_Herbicide-Treatments_P Parameter: Timepoint (hr) Value: 12
  misc_feature: MA Experiment 20000626 PARAMETER Experiment Name: Zm_Herbicide-Treatments_P Parameter: Tissue Value: Aerial
  misc_feature: MA Experiment 20000626 PARAMETER Experiment Name: Zm_Herbicide-Treatments_P Parameter: Treatment Value: Roundup vs. No Treatment
acaacagcatcatggcgctcaccacgagcactaacaaccaagccttgcttgacgctcagctagagctctggcacacatcctttgctttcatcaagtccatggctctcaagtctgcagtggaccttggcatagccgacgccatccacagccacggtggcaacgccaccctgccccagatagtttccagggccgcgctccacccgtccaagatcccctgcctgcgtcgcctcatgcgggtgctcacagccgccggcatcttcagcgccgcccaccgctcgccggacgacggcggcggcgagctcgtctatggactcacaccggcgtctcagctcttggttggcggctcttcaagcctggctcccttcatgtccctggtgttacaccaggtctacgtgtcgcctttccttggcctcggcacatggttacagcacgagcgctcagacccgaccctgtttgagatgacgcatgggctcactgcctgggacctgaatgaccacaagccagccttcggcgagctcttcaaccaaggtatggtctgcgacagcagcttcgtcatggacatcgtcgtcaaggagtgcggcgacgtcttccggggtctgagctcccttgtcgacgtcgccggagggcttggcgcggcggccctggctatctcgaccgcgttcccgcatgtccagtgcagtgtgctggatctcccgcatgtcgccgccaatgctcccgctaacaccagtgtcaagtatattgctggcgacatgtttgagagcattccaccggcagacgccgtcttccttaagtgggttttgcatgactggggcgatgctgattgcatcaagatacttaagaactgtaagaaagctataccttctagggatgcaggaggaaaggtgataatcgttgatatggttgttggaggccagtcgtcaaacaataagcacaaagagactcaggtcttgtttgatctcttcatcatgacgatcaatggcgccgagcgagacgaacatgagtggaaaaagataatttctgaagctgggtttagcgactacaaaatcatacctgttctaggtgttcgatccatcattgaggtctacccatgattatttggcgaatacgtgtttcgctttttttctgaataagttgtttgcttaactagcatgggacgagtgtccatgagatcatgtgtgatgaaaactttgtttgtgatgaagtaagcactttgcaatgtc

SEQ ID NO: 11335 - protein, 362 aa, Zea mays subsp. mays
  peptide (1)..(362): Ceres Seq. ID no. 12404053
  misc_feature (95)..(339): Pfam Name: O-methyltransferase Pfam Description: O-methyltransferase
  misc_feature (9)..(362): Homolog of NCBI NO: 1353193 NR Description: O-METHYLTRANSFERASE ZRP4 (OMT)
  misc_feature (15)..(362): Homolog of NCBI NO: 37530606 NR Description: putative o-methyltransferase ZRP4 [Oryza sativa
  misc_feature (8)..(362): Homolog of NCBI NO: 37530600 NR Description: putative o-methyltransferase ZRP4 [Oryza sativa
  misc_feature (11)..(362): Homolog of NCBI NO: 20514369 NR Description: orcinol O-methyltransferase [Rosa hybrid cultivar]
  misc_feature (12)..(362): Homolog of NCBI NO: 22093735 NR Description: putative o-methyltransferase [Oryza sativa
  misc_feature (11)..(362): Homolog of NCBI NO: 20514367 NR Description: orcinol O-methyltransferase [Rosa hybrid cultivar]
  misc_feature (4)..(362): Homolog of NCBI NO: 4098238 NR Description: o-methyltransferase [Triticum aestivum]
  misc_feature (11)..(353): Homolog of NCBI NO: 27527926 NR Description: orcinol O-methyltransferase [Rosa hybrid cultivar]
  misc_feature (11)..(353): Homolog of NCBI NO: 27527928 NR Description: orcinol O-methyltransferase [Rosa hybrid cultivar]
  misc_feature (15)..(362): Homolog of NCBI NO: 2282586 NR Description: methyltransferase [Prunus armeniaca]
NSIMALTTSTNNQALLDAQLELWHTSFAFIKSMALKSAVDLGIADAIHSHGGNATLPQIVSRAALHPSKIPCLRRLMRVLTAAGIFSAAHRSPDDGGGELVYGLTPASQLLVGGSSSLAPFMSLVLHQVYVSPFLGLGTWLQHERSDPTLFEMTHGLTAWDLNDHKPAFGELFNQGMVCDSSFVMDIVVKECGDVFRGLSSLVDVAGGLGAAALAISTAFPHVQCSVLDLPHVAANAPANTSVKYIAGDMFESIPPADAVFLKWVLHDWGDADCIKILKNCKKAIPSRDAGGKVIIVDMVVGGQSSNNKHKETQVLFDLFIMTINGAERDEHEWKKIISEAGFSDYKIIPVLGVRSIIEVYP

SEQ ID NO: 11336 - protein, 359 aa, Zea mays subsp. mays
  peptide (1)..(359): Ceres Seq. ID no. 12404054
  misc_feature (92)..(336): Pfam Name: O-methyltransferase Pfam Description: O-methyltransferase
  misc_feature (6)..(359): Homolog of NCBI NO: 1353193 NR Description: O-METHYLTRANSFERASE ZRP4 (OMT)
  misc_feature (12)..(359): Homolog of NCBI NO: 37530606 NR Description: putative o-methyltransferase ZRP4 [Oryza sativa
  misc_feature (5)..(359): Homolog of NCBI NO: 37530600 NR Description: putative o-methyltransferase ZRP4 [Oryza sativa
  misc_feature (8)..(359): Homolog of NCBI NO: 20514369 NR Description: orcinol O-methyltransferase [Rosa hybrid cultivar]
  misc_feature (9)..(359): Homolog of NCBI NO: 22093735 NR Description: putative o-methyltransferase [Oryza sativa
  misc_feature (8)..(359): Homolog of NCBI NO: 20514367 NR Description: orcinol O-methyltransferase [Rosa hybrid cultivar]
  misc_feature (1)..(359): Homolog of NCBI NO: 4098238 NR Description: o-methyltransferase [Triticum aestivum]
  misc_feature (8)..(350): Homolog of NCBI NO: 27527926 NR Description: orcinol O-methyltransferase [Rosa hybrid cultivar]
  misc_feature (8)..(350): Homolog of NCBI NO: 27527928 NR Description: orcinol O-methyltransferase [Rosa hybrid cultivar]
  misc_feature (12)..(359): Homolog of NCBI NO: 2282586 NR Description: methyltransferase [Prunus armeniaca]
MALTTSTNNQALLDAQLELWHTSFAFIKSMALKSAVDLGIADAIHSHGGNATLPQIVSRAALHPSKIPCLRRLMRVLTAAGIFSAAHRSPDDGGGELVYGLTPASQLLVGGSSSLAPFMSLVLHQVYVSPFLGLGTWLQHERSDPTLFEMTHGLTAWDLNDHKPAFGELFNQGMVCDSSFVMDIVVKECGDVFRGLSSLVDVAGGLGAAALAISTAFPHVQCSVLDLPHVAANAPANTSVKYIAGDMFESIPPADAVFLKWVLHDWGDADCIKILKNCKKAIPSRDAGGKVIIVDMVVGGQSSNNKHKETQVLFDLFIMTINGAERDEHEWKKIISEAGFSDYKIIPVLGVRSIIEVYP

SEQ ID NO: 11337 - protein, 330 aa, Zea mays subsp. mays
  peptide (1)..(330): Ceres Seq. ID no. 12404055
  misc_feature (63)..(307): Pfam Name: O-methyltransferase Pfam Description: O-methyltransferase
  misc_feature (1)..(330): Homolog of NCBI NO: 1353193 NR Description: O-METHYLTRANSFERASE ZRP4 (OMT)
  misc_feature (1)..(330): Homolog of NCBI NO: 37530606 NR Description: putative o-methyltransferase ZRP4 [Oryza sativa
  misc_feature (1)..(330): Homolog of NCBI NO: 37530600 NR Description: putative o-methyltransferase ZRP4 [Oryza sativa
  misc_feature (1)..(330): Homolog of NCBI NO: 20514369 NR Description: orcinol O-methyltransferase [Rosa hybrid cultivar]
  misc_feature (1)..(330): Homolog of NCBI NO: 22093735 NR Description: putative o-methyltransferase [Oryza sativa
  misc_feature (1)..(330): Homolog of NCBI NO: 20514367 NR Description: orcinol O-methyltransferase [Rosa hybrid cultivar]
  misc_feature (1)..(330): Homolog of NCBI NO: 4098238 NR Description: o-methyltransferase [Triticum aestivum]
  misc_feature (1)..(321): Homolog of NCBI NO: 27527926 NR Description: orcinol O-methyltransferase [Rosa hybrid cultivar]
  misc_feature (1)..(321): Homolog of NCBI NO: 27527928 NR Description: orcinol O-methyltransferase [Rosa hybrid cultivar]
  misc_feature (1)..(330): Homolog of NCBI NO: 2282586 NR Description: methyltransferase [Prunus armeniaca]
MALKSAVDLGIADAIHSHGGNATLPQIVSRAALHPSKIPCLRRLMRVLTAAGIFSAAHRSPDDGGGELVYGLTPASQLLVGGSSSLAPFMSLVLHQVYVSPFLGLGTWLQHERSDPTLFEMTHGLTAWDLNDHKPAFGELFNQGMVCDSSFVMDIVVKECGDVFRGLSSLVDVAGGLGAAALAISTAFPHVQCSVLDLPHVAANAPANTSVKYIAGDMFESIPPADAVFLKWVLHDWGDADCIKILKNCKKAIPSRDAGGKVIIVDMVVGGQSSNNKHKETQVLFDLFIMTINGAERDEHEWKKIISEAGFSDYKIIPVLGVRSIIEVYP

SEQ ID NO: 11338 - DNA, 802 bp, Zea mays subsp. mays
  misc_feature (1)..(802): Ceres Seq. ID no. 12345607
  misc_feature: MA Experiment ID: 108504 Result: Up-regulated in Transcription
  misc_feature: MA Experiment 108504 PARAMETER Experiment Name: Zm_Drought_P Parameter: Age (day) Value: 8
  misc_feature: MA Experiment 108504 PARAMETER Experiment Name: Zm_Drought_P Parameter: Organism Value: Zea mays
  misc_feature: MA Experiment 108504 PARAMETER Experiment Name: Zm_Drought_P Parameter: Plant Line Value: 35A19
  misc_feature: MA Experiment 108504 PARAMETER Experiment Name: Zm_Drought_P Parameter: Timepoint (hr) Value: 12
  misc_feature: MA Experiment 108504 PARAMETER Experiment Name: Zm_Drought_P Parameter: Tissue Value: Aerial
  misc_feature: MA Experiment 108504 PARAMETER Experiment Name: Zm_Drought_P Parameter: Treatment Value: Drought vs. No Drought
  misc_feature: MA Experiment ID: 108528 Result: Down-regulated in Transcription
  misc_feature: MA Experiment 108528 PARAMETER Experiment Name: Zm_Imbibed_Seeds_P Parameter: Age (day) Value: 5 vs. 2
  misc_feature: MA Experiment 108528 PARAMETER Experiment Name: Zm_Imbibed_Seeds_P Parameter: Organism Value: Zea mays
  misc_feature: MA Experiment 108528 PARAMETER Experiment Name: Zm_Imbibed_Seeds_P Parameter: Plant Line Value: 35A19
  misc_feature: MA Experiment 108528 PARAMETER Experiment Name: Zm_Imbibed_Seeds_P Parameter: Tissue Value: Aerial vs. Embryo
  misc_feature: MA Experiment ID: 108529 Result: Down-regulated in Transcription
  misc_feature: MA Experiment 108529 PARAMETER Experiment Name: Zm_Imbibed_Seeds_P Parameter: Age (day) Value: 5 vs. 2
  misc_feature: MA Experiment 108529 PARAMETER Experiment Name: Zm_Imbibed_Seeds_P Parameter: Organism Value: Zea mays
  misc_feature: MA Experiment 108529 PARAMETER Experiment Name: Zm_Imbibed_Seeds_P Parameter: Plant Line Value: 35A19
  misc_feature: MA Experiment 108529 PARAMETER Experiment Name: Zm_Imbibed_Seeds_P Parameter: Tissue Value: Roots vs. Embryo
  misc_feature: MA Experiment ID: 108530 Result: Down-regulated in Transcription
  misc_feature: MA Experiment 108530 PARAMETER Experiment Name: Zm_Imbibed_Seeds_P Parameter: Age (day) Value: 6 vs. 2
  misc_feature: MA Experiment 108530 PARAMETER Experiment Name: Zm_Imbibed_Seeds_P Parameter: Organism Value: Zea mays
  misc_feature: MA Experiment 108530 PARAMETER Experiment Name: Zm_Imbibed_Seeds_P Parameter: Plant Line Value: 35A19
  misc_feature: MA Experiment 108530 PARAMETER Experiment Name: Zm_Imbibed_Seeds_P Parameter: Tissue Value: Aerial vs. Embryo
  misc_feature: MA Experiment ID: 108535 Result: Up-regulated in Transcription
  misc_feature: MA Experiment 108535 PARAMETER Experiment Name: Zm_Meristem_P Parameter: Age (day) Value: 8
  misc_feature: MA Experiment 108535 PARAMETER Experiment Name: Zm_Meristem_P Parameter: Organism Value: Zea mays
  misc_feature: MA Experiment 108535 PARAMETER Experiment Name: Zm_Meristem_P Parameter: Plant Line Value: 35A19
  misc_feature: MA Experiment 108535 PARAMETER Experiment Name: Zm_Meristem_P Parameter: Tissue Value: Root Meristem vs. Above Root Meristem
  misc_feature: MA Experiment ID: 108543 Result: Up-regulated in Transcription
  misc_feature: MA Experiment ID: 108547 Result: Down-regulated in Transcription
  misc_feature: MA Experiment 108547 PARAMETER Experiment Name: Zm_Imbibed_Seeds_P Parameter: Age (day) Value: 4 vs. 2
  misc_feature: MA Experiment 108547 PARAMETER Experiment Name: Zm_Imbibed_Seeds_P Parameter: Organism Value: Zea mays
  misc_feature: MA Experiment 108547 PARAMETER Experiment Name: Zm_Imbibed_Seeds_P Parameter: Plant Line Value: 35A19
  misc_feature: MA Experiment 108547 PARAMETER Experiment Name: Zm_Imbibed_Seeds_P Parameter: Tissue Value: Aerial vs. Embryo
  misc_feature: MA Experiment ID: 108556 Result: Up-regulated in Transcription
  misc_feature: MA Experiment 108556 PARAMETER Experiment Name: Zm_Drought_P Parameter: Age (day) Value: 9
  misc_feature: MA Experiment 108556 PARAMETER Experiment Name: Zm_Drought_P Parameter: Organism Value: Zea mays
  misc_feature: MA Experiment 108556 PARAMETER Experiment Name: Zm_Drought_P Parameter: Plant Line Value: 35A19
  misc_feature: MA Experiment 108556 PARAMETER Experiment Name: Zm_Drought_P Parameter: Timepoint (hr) Value: 24
  misc_feature: MA Experiment 108556 PARAMETER Experiment Name: Zm_Drought_P Parameter: Tissue Value: Aerial
  misc_feature: MA Experiment 108556 PARAMETER Experiment Name: Zm_Drought_P Parameter: Treatment Value: Drought vs. No Drought
  misc_feature: MA Experiment ID: 108597 Result: Up-regulated in Transcription
  misc_feature: MA Experiment 108597 PARAMETER Experiment Name: Zm_100uM_ABA_P Parameter: Age (day) Value: 9
  misc_feature: MA Experiment 108597 PARAMETER Experiment Name: Zm_100uM_ABA_P Parameter: Organism Value: Zea mays
  misc_feature: MA Experiment 108597 PARAMETER Experiment Name: Zm_100uM_ABA_P Parameter: Plant Line Value: 35A19
  misc_feature: MA Experiment 108597 PARAMETER Experiment Name: Zm_100uM_ABA_P Parameter: Timepoint (hr) Value: 24
  misc_feature: MA Experiment 108597 PARAMETER Experiment Name: Zm_100uM_ABA_P Parameter: Tissue Value: Aerial
  misc_feature: MA Experiment 108597 PARAMETER Experiment Name: Zm_100uM_ABA_P Parameter: Treatment Value: 100uM ABA vs. No Treatment
  misc_feature: MA Experiment ID: 108689 Result: Up-regulated in Transcription
  misc_feature: MA Experiment 108689 PARAMETER Experiment Name: Zm_Drought_Roots_P Parameter: Age (day) Value: 9
  misc_feature: MA Experiment 108689 PARAMETER Experiment Name: Zm_Drought_Roots_P Parameter: Organism Value: Zea mays
  misc_feature: MA Experiment 108689 PARAMETER Experiment Name: Zm_Drought_Roots_P Parameter: Plant Line Value: 35A19
  misc_feature: MA Experiment 108689 PARAMETER Experiment Name: Zm_Drought_Roots_P Parameter: Timepoint (hr) Value: 24
  misc_feature: MA Experiment 108689 PARAMETER Experiment Name: Zm_Drought_Roots_P Parameter: Tissue Value: Roots
  misc_feature: MA Experiment 108689 PARAMETER Experiment Name: Zm_Drought_Roots_P Parameter: Treatment Value: Drought vs. No Drought
  misc_feature: MA Experiment ID: 20000108 Result: Up-regulated in Transcription
  misc_feature: MA Experiment 20000108 PARAMETER Experiment Name: Zm_Root-Tips_P Parameter: Age (day) Value: 12
  misc_feature: MA Experiment 20000108 PARAMETER Experiment Name: Zm_Root-Tips_P Parameter: Organism Value: Zea mays
  misc_feature: MA Experiment 20000108 PARAMETER Experiment Name: Zm_Root-Tips_P Parameter: Tissue Value: Root tips vs. Root mid region    35
  misc_feature: MA Experiment 20000108 PARAMETER Experiment Name: Zm_Root-Tips_P Parameter: Tissue Value: Root tips vs. Root mid region   Sequence Listing-Misc Features (4)
  misc_feature: MA Experiment ID: 20000477 Result: Up-regulated in Transcription
  misc_feature: MA Experiment 20000477 PARAMETER Experiment Name: Zm_5mM_SA_P Parameter: Age (day) Value: 10
  misc_feature: MA Experiment 20000477 PARAMETER Experiment Name: Zm_5mM_SA_P Parameter: Organism Value: Zea mays
  misc_feature: MA Experiment 20000477 PARAMETER Experiment Name: Zm_5mM_SA_P Parameter: Plant Line Value: 35A19
  misc_feature: MA Experiment 20000477 PARAMETER Experiment Name: Zm_5mM_SA_P Parameter: Timepoint (hr) Value: 48
  misc_feature: MA Experiment 20000477 PARAMETER Experiment Name: Zm_5mM_SA_P Parameter: Tissue Value: Aerial
  misc_feature: MA Experiment 20000477 PARAMETER Experiment Name: Zm_5mM_SA_P Parameter: Treatment Value: 5mM SA vs. No Treatment
  misc_feature: MA Experiment ID: 20000478 Result: Up-regulated in Transcription
  misc_feature: MA Experiment 20000478 PARAMETER Experiment Name: Zm_5mM_SA_P Parameter: Age (day) Value: 11
  misc_feature: MA Experiment 20000478 PARAMETER Experiment Name: Zm_5mM_SA_P Parameter: Organism Value: Zea mays
  misc_feature: MA Experiment 20000478 PARAMETER Experiment Name: Zm_5mM_SA_P Parameter: Plant Line Value: 35A19
  misc_feature: MA Experiment 20000478 PARAMETER Experiment Name: Zm_5mM_SA_P Parameter: Timepoint (hr) Value: 72
  misc_feature: MA Experiment 20000478 PARAMETER Experiment Name: Zm_5mM_SA_P Parameter: Tissue Value: Aerial
  misc_feature: MA Experiment 20000478 PARAMETER Experiment Name: Zm_5mM_SA_P Parameter: Treatment Value: 5mM SA vs. No Treatment
  misc_feature: MA Experiment ID: 20000479 Result: Up-regulated in Transcription
  misc_feature: MA Experiment 20000479 PARAMETER Experiment Name: Zm_Drought_P Parameter: Age (day) Value: 10
  misc_feature: MA Experiment 20000479 PARAMETER Experiment Name: Zm_Drought_P Parameter: Organism Value: Zea mays
  misc_feature: MA Experiment 20000479 PARAMETER Experiment Name: Zm_Drought_P Parameter: Plant Line Value: 35A19
  misc_feature: MA Experiment 20000479 PARAMETER Experiment Name: Zm_Drought_P Parameter: Timepoint (hr) Value: 48
  misc_feature: MA Experiment 20000479 PARAMETER Experiment Name: Zm_Drought_P Parameter: Tissue Value: Aerial
  misc_feature: MA Experiment 20000479 PARAMETER Experiment Name: Zm_Drought_P Parameter: Treatment Value: Drought vs. No Drought
aagatttaacaattggtccagtccttacagttactacagaagccatgatagagcacatgaacaaccttctcaaaataagaggatcaaaggttctgtttggtggtgaaccgttagcgaatcactcaattcccaaaatttatggtgccatgaagcctactgctgtatttgttcctctagaagaaattctaaaaagtgggaacttcgagcttgtgacaaaggagatatttggtccattccaggtagtcacagaatactctgaggatcagcttgagttggtcttagaagcctgcgaaaggatgaatgcgcatctgacagctgcagttgtctcaaacgacccgctattcctgcaggatgtacttgggagatccgttaacgggacaacctacgccggaattcgagcgaggaccacgggcgctccacagaaccactggtttggcccggccggtgatccgcgaggcgcagggatcgggactccggaagccatcaaacttgtctggtcctgccacagggaagtcatatatgacgtcgggcccgtgcccgagagctgggcgcttccttccgcgacctgattagctagacgaggatagactattccatgtcatcacgagaaataaaaggggaagataagcgaagccagcaggactggagcgaccgaccgagagcgagtggctgcatgcctaggcattcattctctgcacgcaactgcactttcaaccctggagaaaacataataaatgctcgttcccctgtacttgagatacatggtacttggaccggaacgtcggacaactcgtctgttcgc

SEQ ID NO: 11339 - protein, 188 aa, Zea mays subsp. mays
  peptide (1)..(188): Ceres Seq. ID no. 12345608
  misc_feature (1)..(188): Homolog of NCBI NO: 18449341 NR Description: putative aldehyde dehydrogenase MIS1 [Zea mays]
  misc_feature (1)..(188): Homolog of NCBI NO: 18449337 NR Description: putative aldehyde dehydrogenase BIS1 [Hordeum
  misc_feature (1)..(188): Homolog of NCBI NO: 18449343 NR Description: putative aldehyde dehydrogenase WIS1 [Triticum
  misc_feature (1)..(188): Homolog of NCBI NO: 10178084 NR Description: dehydrogenase [Arabidopsis thaliana]
  misc_feature (1)..(188): Homolog of NCBI NO: 18424599 NR Description: dehydrogenase; protein id: At5g62530.1, supported cDNA: gi_15383743, supported by cDNA: gi_17473532 [Arabidopsis >gi|17473533|gb|AAL38248.1| dehydrogenase [Arabidopsis thaliana]
  misc_feature (1)..(188): Homolog of NCBI NO: 15383744 NR Description: delta-1-pyrroline-5-carboxylate dehydrogenase
  misc_feature (1)..(188): Homolog of NCBI NO: 34921534 NR Description: Probable aldehyde dehydrogenase (Flax inducible
DLTIGPVLTVTTEAMIEHMNNLLKIRGSKVLFGGEPLANHSIPKIYGAMKPTAVFVPLEEILKSGNFELVTKEIFGPFQVVTEYSEDQLELVLEACERMNAHLTAAVVSNDPLFLQDVLGRSVNGTTYAGIRARTTGAPQNHWFGPAGDPRGAGIGTPEAIKLVWSCHREVIYDVGPVPESWALPSAT

SEQ ID NO: 11340 - protein, 174 aa, Zea mays subsp. mays; identical to SEQ ID NO: 1028
  peptide (1)..(174): Ceres Seq. ID no. 12345609
  misc_feature (1)..(174): Homolog of NCBI NO: 18449341 NR Description: putative aldehyde dehydrogenase MIS1 [Zea mays]
  misc_feature (1)..(174): Homolog of NCBI NO: 18449337 NR Description: putative aldehyde dehydrogenase BIS1 [Hordeum
  misc_feature (1)..(174): Homolog of NCBI NO: 18449343 NR Description: putative aldehyde dehydrogenase WIS1 [Triticum
  misc_feature (1)..(174): Homolog of NCBI NO: 10178084 NR Description: dehydrogenase [Arabidopsis thaliana]
  misc_feature (1)..(174): Homolog of NCBI NO: 18424599 NR Description: dehydrogenase; protein id: At5g62530.1, supported cDNA: gi_15383743, supported by cDNA: gi_17473532 [Arabidopsis >gi|17473533|gb|AAL38248.1| dehydrogenase [Arabidopsis thaliana]
  misc_feature (1)..(174): Homolog of NCBI NO: 15383744 NR Description: delta-1-pyrroline-5-carboxylate dehydrogenase
  misc_feature (1)..(174): Homolog of NCBI NO: 34921534 NR Description: Probable aldehyde dehydrogenase (Flax inducible

SEQ ID NO: 11341 - protein, 170 aa, Zea mays subsp. mays; identical to SEQ ID NO: 1029
  peptide (1)..(170): Ceres Seq. ID no. 12345610
  misc_feature (1)..(170): Homolog of NCBI NO: 18449341 NR Description: putative aldehyde dehydrogenase MIS1 [Zea mays]
  misc_feature (1)..(170): Homolog of NCBI NO: 18449337 NR Description: putative aldehyde dehydrogenase BIS1 [Hordeum
  misc_feature (1)..(170): Homolog of NCBI NO: 18449343 NR Description: putative aldehyde dehydrogenase WIS1 [Triticum
  misc_feature (1)..(170): Homolog of NCBI NO: 10178084 NR Description: dehydrogenase [Arabidopsis thaliana]
  misc_feature (1)..(170): Homolog of NCBI NO: 18424599 NR Description: dehydrogenase; protein id: At5g62530.1, supported cDNA: gi_15383743, supported by cDNA: gi_17473532 [Arabidopsis >gi|17473533|gb|AAL38248.1| dehydrogenase [Arabidopsis thaliana]
  misc_feature (1)..(170): Homolog of NCBI NO: 15383744 NR Description: delta-1-pyrroline-5-carboxylate dehydrogenase
  misc_feature (1)..(170): Homolog of NCBI NO: 34921534 NR Description: Probable aldehyde dehydrogenase (Flax inducible

SEQ ID NO: 11342 - DNA, 844 bp, Zea mays subsp. mays
  misc_feature (1)..(844): Ceres Seq. ID no. 12341621
  misc_feature: MA Experiment ID: 20000480 Result: Up-regulated in Transcription
  misc_feature: MA Experiment 20000480 PARAMETER Experiment Name: Zm_Drought_P Parameter: Age (day) Value: 11
  misc_feature: MA Experiment 20000480 PARAMETER Experiment Name: Zm_Drought_P Parameter: Organism Value: Zea mays
  misc_feature: MA Experiment 20000480 PARAMETER Experiment Name: Zm_Drought_P Parameter: Plant Line Value: 35A19
  misc_feature: MA Experiment 20000480 PARAMETER Experiment Name: Zm_Drought_P Parameter: Timepoint (hr) Value: 72
  misc_feature: MA Experiment 20000480 PARAMETER Experiment Name: Zm_Drought_P Parameter: Tissue Value: Aerial
  misc_feature: MA Experiment 20000480 PARAMETER Experiment Name: Zm_Drought_P Parameter: Treatment Value: Drought vs. No Drought
  misc_feature: MA Experiment ID: 20000533 Result: Up-regulated in Transcription
  misc_feature: MA Experiment 20000533 PARAMETER Experiment Name: Zm_0.001percent_MeJA_P Parameter: Age (day) Value: 11
  misc_feature: MA Experiment 20000533 PARAMETER Experiment Name: Zm_0.001percent_MeJA_P Parameter: Organism Value: Zea mays
  misc_feature: MA Experiment 20000533 PARAMETER Experiment Name: Zm_0.001percent_MeJA_P Parameter: Plant Line Value: 35A19
  misc_feature: MA Experiment 20000533 PARAMETER Experiment Name: Zm_0.001percent_MeJA_P Parameter: Timepoint (hr) Value: 72
  misc_feature: MA Experiment 20000533 PARAMETER Experiment Name: Zm_0.001percent_MeJA_P Parameter: Tissue Value: Aerial
  misc_feature: MA Experiment 20000533 PARAMETER Experiment Name: Zm_0.001percent_MeJA_P Parameter: Treatment Value: 0.001percent MeJA vs. No Treatment
  misc_feature: MA Experiment ID: 20000534 Result: Down-regulated in Transcription
  misc_feature: MA Experiment 20000534 PARAMETER Experiment Name: Zm_Hybrid_Pollen_P Parameter: Age (day) Value: 8
  misc_feature: MA Experiment 20000534 PARAMETER Experiment Name: Zm_Hybrid_Pollen_P Parameter: Organism Value: Zea mays
  misc_feature: MA Experiment 20000534 PARAMETER Experiment Name: Zm_Hybrid_Pollen_P Parameter: Plant Line Value: 35A19
  misc_feature: MA Experiment 20000534 PARAMETER Experiment Name: Zm_Hybrid_Pollen_P Parameter: Tissue Value: Pollen vs. Aerial
  misc_feature: MA Experiment ID: 20001612 Result: Up-regulated in Transcription
  misc_feature: MA Experiment 20001612 PARAMETER Experiment Name: Zm_50ppm_KNO3_L-to-H_P Parameter: Age (day) Value: 19
  misc_feature: MA Experiment 20001612 PARAMETER Experiment Name: Zm_50ppm_KNO3_L-to-H_P Parameter: Organism Value: Zea mays
  misc_feature: MA Experiment 20001612 PARAMETER Experiment Name: Zm_50ppm_KNO3_L-to-H_P Parameter: Plant Line Value: 35A19
  misc_feature: MA Experiment 20001612 PARAMETER Experiment Name: Zm_50ppm_KNO3_L-to-H_P Parameter: Timepoint (hr) Value: 8
  misc_feature: MA Experiment 20001612 PARAMETER Experiment Name: Zm_50ppm_KNO3_L-to-H_P Parameter: Tissue Value: Roots
  misc_feature: MA Experiment 20001612 PARAMETER Experiment Name: Zm_50ppm_KNO3_L-to-H_P Parameter: Treatment Value: 50ppm KNO3 vs. 50ppm KCl
  misc_feature: MA Experiment ID: 20001613 Result: Up-regulated in Transcription
  misc_feature: MA Experiment 20001613 PARAMETER Experiment Name: Zm_50ppm_KNO3_L-to-H_P Parameter: Age (day) Value: 20
  misc_feature: MA Experiment 20001613 PARAMETER Experiment Name: Zm_50ppm_KNO3_L-to-H_P Parameter: Organism Value: Zea mays
  misc_feature: MA Experiment 20001613 PARAMETER Experiment Name: Zm_50ppm_KNO3_L-to-H_P Parameter: Plant Line Value: 35A19
  misc_feature: MA Experiment 20001613 PARAMETER Experiment Name: Zm_50ppm_KNO3_L-to-H_P Parameter: Timepoint (hr) Value: 24
  misc_feature: MA Experiment 20001613 PARAMETER Experiment Name: Zm_50ppm_KNO3_L-to-H_P Parameter: Tissue Value: Roots
  misc_feature: MA Experiment 20001613 PARAMETER Experiment Name: Zm_50ppm_KNO3_L-to-H_P Parameter: Treatment Value: 50ppm KNO3 vs. 50ppm KCl
gcatgctaggtaaggttgagcgtgtcacagatgttgtattcactcttgatgatggtactggcaagatagatgtgaatcgctgggaaaatgaggcttccgatgctaaggagatggctgatgctaataacgagaactatgtcatagtcattggcggtttgaaaggttttcaaggaaagcgccatgtagttgcctatgctgtgcggcgtgtgacaaacttcaatgaaataacctgtcactttctgcactgcattcaggtgcatatggagctcacagggttaaagatctattcttcagctgcaacatatggaggagtagcccatgccccatcacagccaaatccggttgatggaaactacatatccaacttggtcttgagtgtttttcatgacccatctgtcatggaccaggagcatggactgcacatcaaagatgtcatagatcgtctcaaactaccagatgatgtagtcagtgcggccatccaaggtcatgttgatgtgggcaacatttacaacacaattgatgacttccactacaaatctgtccggaatggatgaccacgttgcaagtccagcgttcaggctccgtgtaggtatggagccgtttcaaggaagaagaaatgtaaaccctcttcaggatcgcctatattttgcagataggcttcatggtcaacagcttagcatatcggtttaggtgtgtattgctctcatatgtaatgatacataagatgtgagtagactaggtctacctgcaggacatcagtccgttcctacggaaatttgttatgaacgttttacattctaagacctatataaccgtgaagcacgcaaatcaagaatagaaccgc

SEQ ID NO: 11343 - protein, 183 aa, Zea mays subsp. mays
  peptide (1)..(183): Ceres Seq. ID no. 12341622
  misc_feature (7)..(69): Pfam Name: OB-fold nucleic acid binding domain Pfam Description: OB-fold nucleic acid binding domain
  misc_feature (3)..(109): Homolog of NCBI NO: 9801268 NR Description: replication protein A2 [Oryza sativa]
  misc_feature (123)..(182): Homolog of NCBI NO: 9801268 NR Description: replication protein A2 [Oryza sativa]
  misc_feature (3)..(109): Homolog of NCBI NO: 13516746 NR Description: replication protein A 30kDa [Oryza sativa
  misc_feature (123)..(182): Homolog of NCBI NO: 13516746 NR Description: replication protein A 30kDa [Oryza sativa
  misc_feature (4)..(101): Homolog of NCBI NO: 31790111 NR Description: RPA 32kDa [Pisum sativum]
  misc_feature (105)..(178): Homolog of NCBI NO: 31790111 NR Description: RPA 32kDa [Pisum sativum]
  misc_feature (7)..(180): Homolog of NCBI NO: 25347925 NR Description: probable replication protein A1 [imported] -
  misc_feature (7)..(164): Homolog of NCBI NO: 18400560 NR Description: putative replication protein A1; protein id: supported by cDNA: 7536. [Arabidopsis thaliana] putative replication protein A1 [Arabidopsis thaliana]
  misc_feature (2)..(165): Homolog of NCBI NO: 6728969 NR Description: putative replication factor A [Arabidopsis
  misc_feature (2)..(165): Homolog of NCBI NO: 18396383 NR Description: putative replication factor A; protein id: supported by cDNA: 118359. [Arabidopsis thaliana] putative replication factor A [Arabidopsis thaliana]
MLGKVERVTDVVFTLDDGTGKIDVNRWENEASDAKEMADANNENYVIVIGGLKGFQGKRHVVAYAVRRVTNFNEITCHFLHCIQVHMELTGLKIYSSAATYGGVAHAPSQPNPVDGNYISNLVLSVFHDPSVMDQEHGLHIKDVIDRLKLPDDVVSAAIQGHVDVGNIYNTIDDFHYKSVRNG

SEQ ID NO: 11344 - protein, 147 aa, Zea mays subsp. mays
  peptide (1)..(147): Ceres Seq. ID no. 12341623
  misc_feature (1)..(73): Homolog of NCBI NO: 9801268 NR Description: replication protein A2 [Oryza sativa]
  misc_feature (87)..(146): Homolog of NCBI NO: 9801268 NR Description: replication protein A2 [Oryza sativa]
  misc_feature (1)..(73): Homolog of NCBI NO: 13516746 NR Description: replication protein A 30kDa [Oryza sativa
  misc_feature (87)..(146): Homolog of NCBI NO: 13516746 NR Description: replication protein A 30kDa [Oryza sativa
  misc_feature (1)..(65): Homolog of NCBI NO: 31790111 NR Description: RPA 32kDa [Pisum sativum]
  misc_feature (69)..(142): Homolog of NCBI NO: 31790111 NR Description: RPA 32kDa [Pisum sativum]
  misc_feature (1)..(144): Homolog of NCBI NO: 25347925 NR Description: probable replication protein A1 [imported] -
  misc_feature (1)..(128): Homolog of NCBI NO: 18400560 NR Description: putative replication protein A1; protein id: supported by cDNA: 7536. [Arabidopsis thaliana] putative replication protein A1 [Arabidopsis thaliana]
  misc_feature (1)..(129): Homolog of NCBI NO: 6728969 NR Description: putative replication factor A [Arabidopsis
  misc_feature (1)..(129): Homolog of NCBI NO: 18396383 NR Description: putative replication factor A; protein id: supported by cDNA: 118359. [Arabidopsis thaliana] putative replication factor A [Arabidopsis thaliana]
MADANNENYVIVIGGLKGFQGKRHVVAYAVRRVTNFNEITCHFLHCIQVHMELTGLKIYSSAATYGGVAHAPSQPNPVDGNYISNLVLSVFHDPSVMDQEHGLHIKDVIDRLKLPDDVVSAAIQGHVDVGNIYNTIDDFHYKSVRNG

SEQ ID NO: 11345 - protein, 97 aa, Zea mays subsp. mays
  peptide (1)..(97): Ceres Seq. ID no. 12341624
  misc_feature (1)..(23): Homolog of NCBI NO: 9801268 NR Description: replication protein A2 [Oryza sativa]
  misc_feature (37)..(96): Homolog of NCBI NO: 9801268 NR Description: replication protein A2 [Oryza sativa]
  misc_feature (1)..(23): Homolog of NCBI NO: 13516746 NR Description: replication protein A 30kDa [Oryza sativa
  misc_feature (37)..(96): Homolog of NCBI NO: 13516746 NR Description: replication protein A 30kDa [Oryza sativa
  misc_feature (1)..(15): Homolog of NCBI NO: 31790111 NR Description: RPA 32kDa [Pisum sativum]
  misc_feature (19)..(92): Homolog of NCBI NO: 31790111 NR Description: RPA 32kDa [Pisum sativum]
  misc_feature (1)..(94): Homolog of NCBI NO: 25347925 NR Description: probable replication protein A1 [imported] -
  misc_feature (1)..(78): Homolog of NCBI NO: 18400560 NR Description: putative replication protein A1; protein id: supported by cDNA: 7536. [Arabidopsis thaliana] putative replication protein A1 [Arabidopsis thaliana]
  misc_feature (1)..(79): Homolog of NCBI NO: 6728969 NR Description: putative replication factor A [Arabidopsis
  misc_feature (1)..(79): Homolog of NCBI NO: 18396383 NR Description: putative replication factor A; protein id: supported by cDNA: 118359. [Arabidopsis thaliana] putative replication factor A [Arabidopsis thaliana]
MELTGLKIYSSAATYGGVAHAPSQPNPVDGNYISNLVLSVFHDPSVMDQEHGLHIKDVIDRLKLPDDVVSAAIQGHVDVGNIYNTIDDFHYKSVRNG

SEQ ID NO: 11346 - DNA, 1161 bp, Zea mays subsp. mays
  misc_feature (1)..(1161): Ceres Seq. ID no. 12404709
  misc_feature: MA Experiment ID: 108528 Result: Up-regulated in Transcription
  misc_feature: MA Experiment 108528 PARAMETER Experiment Name: Zm_Imbibed_Seeds_P Parameter: Age (day) Value: 5 vs. 2
  misc_feature: MA Experiment 108528 PARAMETER Experiment Name: Zm_Imbibed_Seeds_P Parameter: Organism Value: Zea mays
  misc_feature: MA Experiment 108528 PARAMETER Experiment Name: Zm_Imbibed_Seeds_P Parameter: Plant Line Value: 35A19
  misc_feature: MA Experiment 108528 PARAMETER Experiment Name: Zm_Imbibed_Seeds_P Parameter: Tissue Value: Aerial vs. Embryo
  misc_feature: MA Experiment ID: 108529 Result: Down-regulated in Transcription
  misc_feature: MA Experiment 108529 PARAMETER Experiment Name: Zm_Imbibed_Seeds_P Parameter: Age (day) Value: 5 vs. 2
  misc_feature: MA Experiment 108529 PARAMETER Experiment Name: Zm_Imbibed_Seeds_P Parameter: Organism Value: Zea mays
  misc_feature: MA Experiment 108529 PARAMETER Experiment Name: Zm_Imbibed_Seeds_P Parameter: Plant Line Value: 35A19
  misc_feature: MA Experiment 108529 PARAMETER Experiment Name: Zm_Imbibed_Seeds_P Parameter: Tissue Value: Roots vs. Embryo
  misc_feature: MA Experiment ID: 108530 Result: Up-regulated in Transcription
  misc_feature: MA Experiment 108530 PARAMETER Experiment Name: Zm_Imbibed_Seeds_P Parameter: Age (day) Value: 6 vs. 2
  misc_feature: MA Experiment 108530 PARAMETER Experiment Name: Zm_Imbibed_Seeds_P Parameter: Organism Value: Zea mays
  misc_feature: MA Experiment 108530 PARAMETER Experiment Name: Zm_Imbibed_Seeds_P Parameter: Plant Line Value: 35A19
  misc_feature: MA Experiment 108530 PARAMETER Experiment Name: Zm_Imbibed_Seeds_P Parameter: Tissue Value: Aerial vs. Embryo
  misc_feature: MA Experiment ID: 108536 Result: Down-regulated in Transcription
  misc_feature: MA Experiment 108536 PARAMETER Experiment Name: Zm_Meristem_P Parameter: Age (day) Value: 8
  misc_feature: MA Experiment 108536 PARAMETER Experiment Name: Zm_Meristem_P Parameter: Organism Value: Zea mays
  misc_feature: MA Experiment 108536 PARAMETER Experiment Name: Zm_Meristem_P Parameter: Plant Line Value: 35A19
  misc_feature: MA Experiment 108536 PARAMETER Experiment Name: Zm_Meristem_P Parameter: Tissue Value: Shoot Meristem vs. Above Shoot Meristem
  misc_feature: MA Experiment ID: 108543 Result: Up-regulated in Transcription
  misc_feature: MA Experiment ID: 108545 Result: Up-regulated in Transcription
  misc_feature: MA Experiment 108545 PARAMETER Experiment Name: Zm_Imbibed_Seeds_P Parameter: Age (day) Value: 3 vs. 2
  misc_feature: MA Experiment 108545 PARAMETER Experiment Name: Zm_Imbibed_Seeds_P Parameter: Organism Value: Zea mays
  misc_feature: MA Experiment 108545 PARAMETER Experiment Name: Zm_Imbibed_Seeds_P Parameter: Plant Line Value: 35A19
  misc_feature: MA Experiment 108545 PARAMETER Experiment Name: Zm_Imbibed_Seeds_P Parameter: Tissue Value: Aerial vs. Embryo
  misc_feature: MA Experiment ID: 108546 Result: Down-regulated in Transcription
  misc_feature: MA Experiment 108546 PARAMETER Experiment Name: Zm_Imbibed_Seeds_P Parameter: Age (day) Value: 3 vs. 2
  misc_feature: MA Experiment 108546 PARAMETER Experiment Name: Zm_Imbibed_Seeds_P Parameter: Organism Value: Zea mays
  misc_feature: MA Experiment 108546 PARAMETER Experiment Name: Zm_Imbibed_Seeds_P Parameter: Plant Line Value: 35A19
  misc_feature: MA Experiment 108546 PARAMETER Experiment Name: Zm_Imbibed_Seeds_P Parameter: Tissue Value: Roots vs. Embryo
  misc_feature: MA Experiment ID: 108547 Result: Up-regulated in Transcription
  misc_feature: MA Experiment 108547 PARAMETER Experiment Name: Zm_Imbibed_Seeds_P Parameter: Age (day) Value: 4 vs. 2
  misc_feature: MA Experiment 108547 PARAMETER Experiment Name: Zm_Imbibed_Seeds_P Parameter: Organism Value: Zea mays
  misc_feature: MA Experiment 108547 PARAMETER Experiment Name: Zm_Imbibed_Seeds_P Parameter: Plant Line Value: 35A19
  misc_feature: MA Experiment 108547 PARAMETER Experiment Name: Zm_Imbibed_Seeds_P Parameter: Tissue Value: Aerial vs. Embryo
  misc_feature: MA Experiment ID: 108559 Result: Down-regulated in Transcription
  misc_feature: MA Experiment 108559 PARAMETER Experiment Name: Zm_5mM_NO_P Parameter: Age (day) Value: 8
  misc_feature: MA Experiment 108559 PARAMETER Experiment Name: Zm_5mM_NO_P Parameter: Organism Value: Zea mays
  misc_feature: MA Experiment 108559 PARAMETER Experiment Name: Zm_5mM_NO_P Parameter: Plant Line Value: 35A19
  misc_feature: MA Experiment 108559 PARAMETER Experiment Name: Zm_5mM_NO_P Parameter: Timepoint (hr) Value: 12
  misc_feature: MA Experiment 108559 PARAMETER Experiment Name: Zm_5mM_NO_P Parameter: Tissue Value: Aerial
  misc_feature: MA Experiment 108559 PARAMETER Experiment Name: Zm_5mM_NO_P Parameter: Treatment Value: 5mM NO vs. No Treatment
  misc_feature: MA Experiment ID: 20000492 Result: Down-regulated in Transcription
  misc_feature: MA Experiment 20000492 PARAMETER Experiment Name: Zm_Hybrid_Seed_Dev_P Parameter: DAP Value: 12
  misc_feature: MA Experiment 20000492 PARAMETER Experiment Name: Zm_Hybrid_Seed_Dev_P Parameter: Organism Value: Zea mays
  misc_feature: MA Experiment 20000492 PARAMETER Experiment Name: Zm_Hybrid_Seed_Dev_P Parameter: Plant Line Value: 35A19
  misc_feature: MA Experiment 20000492 PARAMETER Experiment Name: Zm_Hybrid_Seed_Dev_P Parameter: Tissue Value: Fert Kernel vs. Unfert Floret
  misc_feature: MA Experiment ID: 20000535 Result: Down-regulated in Transcription
  misc_feature: MA Experiment 20000535 PARAMETER Experiment Name: Zm_Hybrid_Seed_Dev_P Parameter: DAP Value: 30 vs. 12
  misc_feature: MA Experiment 20000535 PARAMETER Experiment Name: Zm_Hybrid_Seed_Dev_P Parameter: Organism Value: Zea mays
  misc_feature: MA Experiment 20000535 PARAMETER Experiment Name: Zm_Hybrid_Seed_Dev_P Parameter: Plant Line Value: 35A19
  misc_feature: MA Experiment 20000535 PARAMETER Experiment Name: Zm_Hybrid_Seed_Dev_P Parameter: Tissue Value: Embryo vs. Unfert Floret
acagtcacatactttccgcgcctcttcttctgcgcccctctcctcccaaactgcggatagagcagcgagccatcgacacgatcgcgagcgcaagcacgtacgttgtcggaagctcaagttagaagaagcaccagtgcctgatcgatggcggcccaggctctcctctccggccggcagctgctgggccgccccgtgcagtcggccgtctctaggtcgtcggcgaggaaggcgcccttcgtcgtcagggccagctccagccctccagccaagcaaggtgccgacaggcagctgtggttcgcgtccaagcagtccctctcctacctcgatggcacgctgcccggcgactatggcttcgacccgctgggcctctcggacccggagggcaccgggggcttcatcgagcccaagtggctggcctatggcgaggtgatcaacggccgctacgccatgctgggcgcggtgggcgccatcccccggagatcttcggcaagatgggcatcatccccccggagaccgcgctgccgtggttcaagacgggcgtcatcccgcccgcgggcacctacaactactgggccgactcctacacgctcttcgtcttcaacatggcgctcatgggcttcgccgagcaccgccgcctccaggactggtacaacccgggctccatgggcaagcagtacttcctcggcctcgagaagttcctcgccggctccggcgacccgtcctaccccggcgggcccctcttcaacccgctcggcttcggcaagaccgagaaggagatgaatgagctcaagctcaaggagatcaagaacggcaggctcgccatgctcgccatcctcggttacttcatccaggggctcgtcaccggcgtcggcccgttccagaacctgctcgaccacctcgccgaccccgtcaacaacaacgtgctcaccagcctcaagttccactagaacgtggtgcatcagcatacctgctgctgccgccgccgccgccagttgtttgctgtggaaagctagatgcatgcgtgttgtaaaggaacctgaagcgttgcatcggtcatgattcatgcatggccagcctgctgcctgtaacaacaaactagtattgatcttattgagaccggaaactgtattgcacatggtaaatcaatgtacaattcctccc

SEQ ID NO: 11347 - protein, 211 aa, Zea mays subsp. mays
  peptide (1)..(211): Ceres Seq. ID no. 12404710
  misc_feature (55)..(109): Pfam Name: Chlorophyll A-B binding protein Pfam Description: Chlorophyll A-B binding protein
  misc_feature (46)..(109): Homolog of NCBI NO: 21593722 NR Description: light-harvesting complex protein [Arabidopsis
  misc_feature (1)..(109): Homolog of NCBI NO: 82080 NR Description: chlorophyll a/b-binding protein type III
  misc_feature (1)..(109): Homolog of NCBI NO: 15219941 NR Description: light-harvesting chlorophyll a/b binding protein; id: At1g61520.1, supported by cDNA: 25124., supported by cDNA:
  misc_feature (1)..(109): Homolog of NCBI NO: 21554335 NR Description: PSI type III chlorophyll a/b-binding protein,
  misc_feature (66)..(109): Homolog of NCBI NO: 7271947 NR Description: chlorophyll a/b-binding protein type III [Alonsoa
  misc_feature (2)..(109): Homolog of NCBI NO: 40714511 NR Description: light-harvesting chlorophyll-a/b protein of
  misc_feature (1)..(109): Homolog of NCBI NO: 7443229 NR Description: probable chlorophyll a/b-binding protein type III
  misc_feature (1)..(109): Homolog of NCBI NO: 430947 NR Description: PSI type III chlorophyll a/b-binding protein
  misc_feature (1)..(109): Homolog of NCBI NO: 115813 NR Description: Chlorophyll A-B binding protein 8, chloroplast
  misc_feature (46)..(109): Homolog of NCBI NO: 15220077 NR Description: light-harvesting chlorophyll a/b binding protein; id: At1g45474.2, supported by cDNA: 41745., supported by cDNA: supported by cDNA: gi_19699115, supported by cDNA: gi_4741941
MAAQALLSGRQLLGRPVQSAVSRSSARKAPFVVRASSSPPAKQGADRQLWFASKQSLSYLDGTLPGDYGFDPLGLSDPEGTGGFIEPKWLAYGEVINGRYAMLGAVGAIPRRSSARWASSPRRPRCRGSRRASSRPRAPTTTGPTPTRSSSSTWRSWASPSTAASRTGTTRAPWASSTSSASRSSSPAPATRPTPAGPSSTRSASARPRRR

SEQ ID NO: 11348 - protein, 151 aa, Zea mays subsp. mays
  peptide (1)..(151): Ceres Seq. ID no. 12404711
  misc_feature (1)..(122): Pfam Name: Chlorophyll A-B binding protein Pfam Description: Chlorophyll A-B binding protein
  misc_feature (1)..(151): Homolog of NCBI NO: 82080 NR Description: chlorophyll a/b-binding protein type III
  misc_feature (1)..(151): Homolog of NCBI NO: 115813 NR Description: Chlorophyll A-B binding protein 8, chloroplast
  misc_feature (1)..(151): Homolog of NCBI NO: 15219941 NR Description: light-harvesting chlorophyll a/b binding protein; id: At1g61520.1, supported by cDNA: 25124., supported by cDNA:
  misc_feature (1)..(151): Homolog of NCBI NO: 430947 NR Description: PSI type III chlorophyll a/b-binding protein
  misc_feature (1)..(151): Homolog of NCBI NO: 21554335 NR Description: PSI type III chlorophyll a/b-binding protein,
  misc_feature (1)..(151): Homolog of NCBI NO: 7443229 NR Description: probable chlorophyll a/b-binding protein type III
  misc_feature (1)..(142): Homolog of NCBI NO: 7271947 NR Description: chlorophyll a/b-binding protein type III [Alonsoa
  misc_feature (1)..(147): Homolog of NCBI NO: 40714511 NR Description: light-harvesting chlorophyll-a/b protein of
  misc_feature (1)..(151): Homolog of NCBI NO: 37780998 NR Description: chlorophyll a/b binding protein [Vitis vinifera]
  misc_feature (1)..(151): Homolog of NCBI NO: 99487 NR Description: chlorophyll a/b-binding protein (clone pINEab 43)
MGIIPPETALPWFKTGVIPPAGTYNYWADSYTLFVFNMALMGFAEHRRLQDWYNPGSMGKQYFLGLEKFLAGSGDPSYPGGPLFNPLGFGKTEKEMNELKLKEIKNGRLAMLAILGYFIQGLVTGVGPFQNLLDHLADPVNNNVLTSLKFH

SEQ ID NO: 11349 - protein, 142 aa, Zea mays subsp. mays
  peptide (1)..(142): Ceres Seq. ID no. 12404712
  misc_feature (79)..(142): Homolog of NCBI NO: 5420387 NR Description: proteophosphoglycan [Leishmania major]
QSHTFRASSSAPLSSQTADRAASHRHDRERKHVRCRKLKLEEAPVPDRWRPRLSSPAGSCWAAPCSRPSLGRRRGRRPSSSGPAPALQPSKVPTGSCGSRPSSPSPTSMARCPATMASTRWASRTRRAPGASSSPSGWPMAR

SEQ ID NO: 11350 - DNA, 972 bp, Zea mays subsp. mays
  misc_feature (1)..(972): Ceres Seq. ID no. 12341008
  misc_feature: MA Experiment ID: 108504 Result: Up-regulated in Transcription
  misc_feature: MA Experiment 108504 PARAMETER Experiment Name: Zm_Drought_P Parameter: Age (day) Value: 8
  misc_feature: MA Experiment 108504 PARAMETER Experiment Name: Zm_Drought_P Parameter: Organism Value: Zea mays
  misc_feature: MA Experiment 108504 PARAMETER Experiment Name: Zm_Drought_P Parameter: Plant Line Value: 35A19
  misc_feature: MA Experiment 108504 PARAMETER Experiment Name: Zm_Drought_P Parameter: Timepoint (hr) Value: 12
  misc_feature: MA Experiment 108504 PARAMETER Experiment Name: Zm_Drought_P Parameter: Tissue Value: Aerial
  misc_feature: MA Experiment 108504 PARAMETER Experiment Name: Zm_Drought_P Parameter: Treatment Value: Drought vs. No Drought
  misc_feature: MA Experiment ID: 108522 Result: Up-regulated in Transcription
  misc_feature: MA Experiment 108522 PARAMETER Experiment Name: Zm_42deg_Heat_P Parameter: Age (day) Value: 8
  misc_feature: MA Experiment 108522 PARAMETER Experiment Name: Zm_42deg_Heat_P Parameter: Organism Value: Zea mays
  misc_feature: MA Experiment 108522 PARAMETER Experiment Name: Zm_42deg_Heat_P Parameter: Plant Line Value: 35A19
  misc_feature: MA Experiment 108522 PARAMETER Experiment Name: Zm_42deg_Heat_P Parameter: Temperature (deg C) Value: 42 vs. 22
  misc_feature: MA Experiment 108522 PARAMETER Experiment Name: Zm_42deg_Heat_P Parameter: Timepoint (hr) Value: 1
  misc_feature: MA Experiment 108522 PARAMETER Experiment Name: Zm_42deg_Heat_P Parameter: Tissue Value: Aerial
  misc_feature: MA Experiment ID: 108523 Result: Up-regulated in Transcription
  misc_feature: MA Experiment 108523 PARAMETER Experiment Name: Zm_42deg_Heat_P Parameter: Age (day) Value: 8
  misc_feature: MA Experiment 108523 PARAMETER Experiment Name: Zm_42deg_Heat_P Parameter: Organism Value: Zea mays
  misc_feature: MA Experiment 108523 PARAMETER Experiment Name: Zm_42deg_Heat_P Parameter: Plant Line Value: 35A19
  misc_feature: MA Experiment 108523 PARAMETER Experiment Name: Zm_42deg_Heat_P Parameter: Temperature (deg C) Value: 42 vs. 22
  misc_feature: MA Experiment 108523 PARAMETER Experiment Name: Zm_42deg_Heat_P Parameter: Timepoint (hr) Value: 6
  misc_feature: MA Experiment 108523 PARAMETER Experiment Name: Zm_42deg_Heat_P Parameter: Tissue Value: Aerial
  misc_feature: MA Experiment ID: 108527 Result: Up-regulated in Transcription
  misc_feature: MA Experiment 108527 PARAMETER Experiment Name: Zm_5mM_NO_P Parameter: Age (day) Value: 8
  misc_feature: MA Experiment 108527 PARAMETER Experiment Name: Zm_5mM_NO_P Parameter: Organism Value: Zea mays
  misc_feature: MA Experiment 108527 PARAMETER Experiment Name: Zm_5mM_NO_P Parameter: Plant Line Value: 35A19
  misc_feature: MA Experiment 108527 PARAMETER Experiment Name: Zm_5mM_NO_P Parameter: Timepoint (hr) Value: 6
  misc_feature: MA Experiment 108527 PARAMETER Experiment Name: Zm_5mM_NO_P Parameter: Tissue Value: Aerial
  misc_feature: MA Experiment 108527 PARAMETER Experiment Name: Zm_5mM_NO_P Parameter: Treatment Value: 5mM NO vs. No Treatment
  misc_feature: MA Experiment ID: 108528 Result: Down-regulated in Transcription
  misc_feature: MA Experiment 108528 PARAMETER Experiment Name: Zm_Imbibed_Seeds_P Parameter: Age (day) Value: 5 vs. 2
  misc_feature: MA Experiment 108528 PARAMETER Experiment Name: Zm_Imbibed_Seeds_P Parameter: Organism Value: Zea mays
  misc_feature: MA Experiment 108528 PARAMETER Experiment Name: Zm_Imbibed_Seeds_P Parameter: Plant Line Value: 35A19
  misc_feature: MA Experiment 108528 PARAMETER Experiment Name: Zm_Imbibed_Seeds_P Parameter: Tissue Value: Aerial vs. Embryo
  misc_feature: MA Experiment ID: 108530 Result: Down-regulated in Transcription
  misc_feature: MA Experiment 108530 PARAMETER Experiment Name: Zm_Imbibed_Seeds_P Parameter: Age (day) Value: 6 vs. 2
  misc_feature: MA Experiment 108530 PARAMETER Experiment Name: Zm_Imbibed_Seeds_P Parameter: Organism Value: Zea mays
  misc_feature: MA Experiment 108530 PARAMETER Experiment Name: Zm_Imbibed_Seeds_P Parameter: Plant Line Value: 35A19
  misc_feature: MA Experiment 108530 PARAMETER Experiment Name: Zm_Imbibed_Seeds_P Parameter: Tissue Value: Aerial vs. Embryo
  misc_feature: MA Experiment ID: 108534 Result: Up-regulated in Transcription
  misc_feature: MA Experiment 108534 PARAMETER Experiment Name: Zm_4deg_Cold_P Parameter: Age (hr) Value: 8
  misc_feature: MA Experiment 108534 PARAMETER Experiment Name: Zm_4deg_Cold_P Parameter: Organism Value: Zea mays
  misc_feature: MA Experiment 108534 PARAMETER Experiment Name: Zm_4deg_Cold_P Parameter: Plant Line Value: 35A19
  misc_feature: MA Experiment 108534 PARAMETER Experiment Name: Zm_4deg_Cold_P Parameter: Temperature (deg C) Value: 4 vs. 22
  misc_feature: MA Experiment 108534 PARAMETER Experiment Name: Zm_4deg_Cold_P Parameter: Timepoint (hr) Value: 6
  misc_feature: MA Experiment 108534 PARAMETER Experiment Name: Zm_4deg_Cold_P Parameter: Tissue Value: Aerial
  misc_feature: MA Experiment ID: 108547 Result: Down-regulated in Transcription
  misc_feature: MA Experiment 108547 PARAMETER Experiment Name: Zm_Imbibed_Seeds_P Parameter: Age (day) Value: 4 vs. 2
  misc_feature: MA Experiment 108547 PARAMETER Experiment Name: Zm_Imbibed_Seeds_P Parameter: Organism Value: Zea mays
  misc_feature: MA Experiment 108547 PARAMETER Experiment Name: Zm_Imbibed_Seeds_P Parameter: Plant Line Value: 35A19
  misc_feature: MA Experiment 108547 PARAMETER Experiment Name: Zm_Imbibed_Seeds_P Parameter: Tissue Value: Aerial vs. Embryo
  misc_feature: MA Experiment ID: 108556 Result: Up-regulated in Transcription
  misc_feature: MA Experiment 108556 PARAMETER Experiment Name: Zm_Drought_P Parameter: Age (day) Value: 9
  misc_feature: MA Experiment 108556 PARAMETER Experiment Name: Zm_Drought_P Parameter: Organism Value: Zea mays
  misc_feature: MA Experiment 108556 PARAMETER Experiment Name: Zm_Drought_P Parameter: Plant Line Value: 35A19
  misc_feature: MA Experiment 108556 PARAMETER Experiment Name: Zm_Drought_P Parameter: Timepoint (hr) Value: 24
  misc_feature: MA Experiment 108556 PARAMETER Experiment Name: Zm_Drought_P Parameter: Tissue Value: Aerial
  misc_feature: MA Experiment 108556 PARAMETER Experiment Name: Zm_Drought_P Parameter: Treatment Value: Drought vs. No Drought
  misc_feature: MA Experiment ID: 20000479 Result: Up-regulated in Transcription
  misc_feature: MA Experiment 20000479 PARAMETER Experiment Name: Zm_Drought_P Parameter: Age (day) Value: 10
  misc_feature: MA Experiment 20000479 PARAMETER Experiment Name: Zm_Drought_P Parameter: Organism Value: Zea mays
  misc_feature: MA Experiment 20000479 PARAMETER Experiment Name: Zm_Drought_P Parameter: Plant Line Value: 35A19
  misc_feature: MA Experiment 20000479 PARAMETER Experiment Name: Zm_Drought_P Parameter: Timepoint (hr) Value: 48
  misc_feature: MA Experiment 20000479 PARAMETER Experiment Name: Zm_Drought_P Parameter: Tissue Value: Aerial
  misc_feature: MA Experiment 20000479 PARAMETER Experiment Name: Zm_Drought_P Parameter: Treatment Value: Drought vs. No Drought
  misc_feature: MA Experiment ID: 20000480 Result: Up-regulated in Transcription
  misc_feature: MA Experiment 20000480 PARAMETER Experiment Name: Zm_Drought_P Parameter: Age (day) Value: 11
  misc_feature: MA Experiment 20000480 PARAMETER Experiment Name: Zm_Drought_P Parameter: Organism Value: Zea mays
  misc_feature: MA Experiment 20000480 PARAMETER Experiment Name: Zm_Drought_P Parameter: Plant Line Value: 35A19
  misc_feature: MA Experiment 20000480 PARAMETER Experiment Name: Zm_Drought_P Parameter: Timepoint (hr) Value: 72
  misc_feature: MA Experiment 20000480 PARAMETER Experiment Name: Zm_Drought_P Parameter: Tissue Value: Aerial
  misc_feature: MA Experiment 20000480 PARAMETER Experiment Name: Zm_Drought_P Parameter: Treatment Value: Drought vs. No Drought
  misc_feature: MA Experiment ID: 20000626 Result: Up-regulated in Transcription
  misc_feature: MA Experiment 20000626 PARAMETER Experiment Name: Zm_Herbicide-Treatments_P Parameter: Timepoint (hr) Value: 12
  misc_feature: MA Experiment 20000626 PARAMETER Experiment Name: Zm_Herbicide-Treatments_P Parameter: Tissue Value: Aerial
  misc_feature: MA Experiment 20000626 PARAMETER Experiment Name: Zm_Herbicide-Treatments_P Parameter: Treatment Value: Roundup vs. No Treatment
accagcagcactcgcgcaatcccgcagtttgacgagtttgcccccgtcgccctccattctctcccgctccgccgcttcgtctttttatacctcctgctgacgggactgctgacttcgcacccaggccgcggccgcatcctctccccatcggcagtcttcccccaagacgtctaaaccccaatccctaaatccccgacgcagaccacacgacgcgcacctccgttcacgaggcggaagcatgagtcgccacccgatcactaagtgggcacagaggtccgacagggtgttcttgacgatagagctgcccgacgcccaggatgtgaagctgaacttgaagcctgaaggccatttcaacttctcagctaagggctcagatgacttgcgctatgagtttgacattgagctgtttgatgctgtgaatgtggaggagagcaaagcagctattgccccaaggaccatatgctacctgataaagaaagctaagagcgggtggtggccaaggctgctgaagcaggagggcaaaccacctgtgttcttgaaggttgattgggacaaatggcaggacgaggatgatgaagacgctggatttaatgactttggtggtatggacttctcgaaactggacataggaggtgctgatgacgacgatattggggatgatgaagatgatgtggttgaaagtgctaacaaagatgaagaaggaggtaagacagaagagagcaaggaggaggaagcagctcctgcggctgcagaggaagtgaagccatgaagaatcatttgactttgctccgcgccatgggtgtccacggtatctagctaggctagacgttcccttggatttttggtgtaaaatctggaggtcgaaccactcactgcctattgaagtaaaggatacaaaaacagttgtgctgtcttagtttttggctgaaccctgtgaactgctgctacaatatttggtcagagtttatatgc

SEQ ID NO: 11351 - protein, 176 aa, Zea mays subsp. mays
  peptide (1)..(176): Ceres Seq. ID no. 12341009
  misc_feature (1)..(170): Homolog of NCBI NO: 40882701 NR Description: putative ripening regulated protein [Oryza sativa
  misc_feature (1)..(172): Homolog of NCBI NO: 12231292 NR Description: ripening regulated protein DDTFR8 [Lycopersicon
  misc_feature (1)..(173): Homolog of NCBI NO: 11934654 NR Description: p23 [Brassica napus]
  misc_feature (1)..(132): Homolog of NCBI NO: 38637531 NR Description: putative p23 co-chaperone [Oryza sativa (japonica
  misc_feature (1)..(132): Homolog of NCBI NO: 11229591 NR Description: p23 co-chaperone [Arabidopsis thaliana]
  misc_feature (1)..(132): Homolog of NCBI NO: 30679149 NR Description: glycine-rich protein [Arabidopsis thaliana] AT4g02450/T14P8_5 [Arabidopsis thaliana]
  misc_feature (3)..(132): Homolog of NCBI NO: 7487014 NR Description: hypothetical protein T14P8.5 - Arabidopsis >gi|3193303|gb|AAC19287.1| similar to several proteins containing
  misc_feature (1)..(138): Homolog of NCBI NO: 22330824 NR Description: similar to p23 {Brassica napus}; protein id:
  misc_feature (1)..(162): Homolog of NCBI NO: 17556837 NR Description: Telomerase-binding protein p23 like (19.4 kD) elegans] >gi|8928507|sp|Q23280|YOCA_CAEEL Hypothetical 19.4 kDa ZC395.10 in chromosome III >gi|7510717|pir||T27543 hypothetical
  misc_feature (5)..(163): Homolog of NCBI NO: 32398747 NR Description: p23 co-chaperone, probable [Cryptosporidium
MSRHPITKWAQRSDRVFLTIELPDAQDVKLNLKPEGHFNFSAKGSDDLRYEFDIELFDAVNVEESKAAIAPRTICYLIKKAKSGWWPRLLKQEGKPPVFLKVDWDKWQDEDDEDAGFNDFGGMDFSKLDIGGADDDDIGDDEDDVVESANKDEEGGKTEESKEEEAAPAAAEEVKP

SEQ ID NO: 11352 - DNA, 1087 bp, Zea mays subsp. mays
  misc_feature (1)..(1087): Ceres Seq. ID no. 12565899
  misc_feature: MA Experiment ID: 108522 Result: Up-regulated in Transcription
  misc_feature: MA Experiment 108522 PARAMETER Experiment Name: Zm_42deg_Heat_P Parameter: Age (day) Value: 8
  misc_feature: MA Experiment 108522 PARAMETER Experiment Name: Zm_42deg_Heat_P Parameter: Organism Value: Zea mays
  misc_feature: MA Experiment 108522 PARAMETER Experiment Name: Zm_42deg_Heat_P Parameter: Plant Line Value: 35A19
  misc_feature: MA Experiment 108522 PARAMETER Experiment Name: Zm_42deg_Heat_P Parameter: Temperature (deg C) Value: 42 vs. 22
  misc_feature: MA Experiment 108522 PARAMETER Experiment Name: Zm_42deg_Heat_P Parameter: Timepoint (hr) Value: 1
  misc_feature: MA Experiment 108522 PARAMETER Experiment Name: Zm_42deg_Heat_P Parameter: Tissue Value: Aerial
  misc_feature: MA Experiment ID: 108523 Result: Up-regulated in Transcription
  misc_feature: MA Experiment 108523 PARAMETER Experiment Name: Zm_42deg_Heat_P Parameter: Age (day) Value: 8
  misc_feature: MA Experiment 108523 PARAMETER Experiment Name: Zm_42deg_Heat_P Parameter: Organism Value: Zea mays
  misc_feature: MA Experiment 108523 PARAMETER Experiment Name: Zm_42deg_Heat_P Parameter: Plant Line Value: 35A19
  misc_feature: MA Experiment 108523 PARAMETER Experiment Name: Zm_42deg_Heat_P Parameter: Temperature (deg C) Value: 42 vs. 22
  misc_feature: MA Experiment 108523 PARAMETER Experiment Name: Zm_42deg_Heat_P Parameter: Timepoint (hr) Value: 6
  misc_feature: MA Experiment 108523 PARAMETER Experiment Name: Zm_42deg_Heat_P Parameter: Tissue Value: Aerial
  misc_feature: MA Experiment ID: 108535 Result: Up-regulated in Transcription
  misc_feature: MA Experiment 108535 PARAMETER Experiment Name: Zm_Meristem_P Parameter: Age (day) Value: 8
  misc_feature: MA Experiment 108535 PARAMETER Experiment Name: Zm_Meristem_P Parameter: Organism Value: Zea mays
  misc_feature: MA Experiment 108535 PARAMETER Experiment Name: Zm_Meristem_P Parameter: Plant Line Value: 35A19
  misc_feature: MA Experiment 108535 PARAMETER Experiment Name: Zm_Meristem_P Parameter: Tissue Value: Root Meristem vs. Above Root Meristem
  misc_feature: MA Experiment ID: 108544 Result: Down-regulated in Transcription
gcacgagaccattacctagaacatcctaatcgaaaaaccgcctcttctcctcttctcgattcgaaatcgagtacgtccgaatgctctagaaccttccgggcctagggatctcgatggggcccgagcaggaggaggccgtgctggagaccatctgggacctccacgacaaggtcagcgacgcgatccacgccctctcccgcgcccacttcctgcgcgccgttcgccgccgctcctcggcctccgcccccggcctcgtggacgtcaagggcgggggtctgggtctcggcgcgcgcggcggagacgaggtcgtcgccctggcggccctggctgaggaggccaggagcctgcacgccatccgcgccgcgctggaggacctcgaggaccagttcgagtgttttctcgccgtgcagacacagcaacaggccgaacgagatttcgcgatggcgaggctggagcaaagccgcatcatgctcgcgataaggctcaaagagcatcacgggagaaaccacaaggtcatagacgaggcgtctgccttcgtccgcgatgtctaccaggacgtctggccttccctgtcagctaccaaggccgagagacgcgccgacagttcaggtaacccggcgaagggtccgagcttcctcgcgcggatggtgtcctctagccttactgtagctgggagcggtttcagtctcaaaagtctggctttagctctcggcctagtcgcggtgctgcagtcttcaggggtcggtgaccgcaggtacaggaggaccaccagcgagaggagctcgtcgtggctgggatcatcatctccgagaggcggtagaacgggtcgtcttgacgtgtctctagccaggggttgaaaggggggctgcggtttgtggccttgcactgtatgcccctgtggcaagggccaagctcaggcccgctgcggtgttttttttgttgctttctcggtccagcagcaccaggcttcatcgctgaggctgctctctgcccatcatgccgggcgcagccggtgggcatgtttgatttgtgctaaatgtgacacattttatctaaggttagtcttttgaatggaagaattaaactt

SEQ ID NO: 11353 - protein, 247 aa, Zea mays subsp. mays
  peptide (1)..(247): Ceres Seq. ID no. 12565900
  misc_feature (1)..(247): Homolog of NCBI NO: 34904152 NR Description: P0417G05.19 [Oryza sativa (japonica
  misc_feature (4)..(210): Homolog of NCBI NO: 15238704 NR Description: putative protein; protein id: At5g53280.1, by cDNA: 33791. [Arabidopsis thaliana] gb|AAD26950.1~gene_id:K19E1.8~similar to unknown protein
  misc_feature (4)..(210): Homolog of NCBI NO: 21592900 NR Description: unknown [Arabidopsis thaliana]
MGPEQEEAVLETIWDLHDKVSDAIHALSRAHFLRAVRRRSSASAPGLVDVKGGGLGLGARGGDEVVALAALAEEARSLHAIRAALEDLEDQFECFLAVQTQQQAERDFAMARLEQSRIMLAIRLKEHHGRNHKVIDEASAFVRDVYQDVWPSLSATKAERRADSSGNPAKGPSFLARMVSSSLTVAGSGFSLKSLALALGLVAVLQSSGVGDRRYRRTTSERSSSWLGSSSPRGGRTGRLDVSLARG

SEQ ID NO: 11354 - protein, 138 aa, Zea mays subsp. mays
  peptide (1)..(138): Ceres Seq. ID no. 12565901
  misc_feature (1)..(138): Homolog of NCBI NO: 34904152 NR Description: P0417G05.19 [Oryza sativa (japonica
  misc_feature (1)..(101): Homolog of NCBI NO: 15238704 NR Description: putative protein; protein id: At5g53280.1, by cDNA: 33791. [Arabidopsis thaliana] gb|AAD26950.1~gene_id:K19E1.8~similar to unknown protein
  misc_feature (1)..(101): Homolog of NCBI NO: 21592900 NR Description: unknown [Arabidopsis thaliana]
MARLEQSRIMLAIRLKEHHGRNHKVIDEASAFVRDVYQDVWPSLSATKAERRADSSGNPAKGPSFLARMVSSSLTVAGSGFSLKSLALALGLVAVLQSSGVGDRRYRRTTSERSSSWLGSSSPRGGRTGRLDVSLARG

SEQ ID NO: 11355 - protein, 129 aa, Zea mays subsp. mays
  peptide (1)..(129): Ceres Seq. ID no. 12565902
  misc_feature (1)..(129): Homolog of NCBI NO: 34904152 NR Description: P0417G05.19 [Oryza sativa (japonica
  misc_feature (1)..(92): Homolog of NCBI NO: 15238704 NR Description: putative protein; protein id: At5g53280.1, by cDNA: 33791. [Arabidopsis thaliana] gb|AAD26950.1~gene_id:K19E1.8~similar to unknown protein
  misc_feature (1)..(92): Homolog of NCBI NO: 21592900 NR Description: unknown [Arabidopsis thaliana]
MLAIRLKEHHGRNHKVIDEASAFVRDVYQDVWPSLSATKAERRADSSGNPAKGPSFLARMVSSSLTVAGSGFSLKSLALALGLVAVLQSSGVGDRRYRRTTSERSSSWLGSSSPRGGRTGRLDVSLARG

SEQ ID NO: 11356 - DNA, 1771 bp, Zea mays subsp. mays
  misc_feature (1)..(1771): Ceres Seq. ID no. 12359628
  misc_feature: MA Experiment ID: 108544 Result: Down-regulated in Transcription
  misc_feature: MA Experiment ID: 108556 Result: Down-regulated in Transcription
  misc_feature: MA Experiment 108556 PARAMETER Experiment Name: Zm_Drought_P Parameter: Age (day) Value: 9
  misc_feature: MA Experiment 108556 PARAMETER Experiment Name: Zm_Drought_P Parameter: Organism Value: Zea mays
  misc_feature: MA Experiment 108556 PARAMETER Experiment Name: Zm_Drought_P Parameter: Plant Line Value: 35A19
  misc_feature: MA Experiment 108556 PARAMETER Experiment Name: Zm_Drought_P Parameter: Timepoint (hr) Value: 24
  misc_feature: MA Experiment 108556 PARAMETER Experiment Name: Zm_Drought_P Parameter: Tissue Value: Aerial
  misc_feature: MA Experiment 108556 PARAMETER Experiment Name: Zm_Drought_P Parameter: Treatment Value: Drought vs. No Drought
  misc_feature: MA Experiment ID: 108597 Result: Down-regulated in Transcription
  misc_feature: MA Experiment 108597 PARAMETER Experiment Name: Zm_100uM_ABA_P Parameter: Age (day) Value: 9
  misc_feature: MA Experiment 108597 PARAMETER Experiment Name: Zm_100uM_ABA_P Parameter: Organism Value: Zea mays
  misc_feature: MA Experiment 108597 PARAMETER Experiment Name: Zm_100uM_ABA_P Parameter: Plant Line Value: 35A19
  misc_feature: MA Experiment 108597 PARAMETER Experiment Name: Zm_100uM_ABA_P Parameter: Timepoint (hr) Value: 24
  misc_feature: MA Experiment 108597 PARAMETER Experiment Name: Zm_100uM_ABA_P Parameter: Tissue Value: Aerial
  misc_feature: MA Experiment 108597 PARAMETER Experiment Name: Zm_100uM_ABA_P Parameter: Treatment Value: 100uM ABA vs. No Treatment
  misc_feature: MA Experiment ID: 20000477 Result: Down-regulated in Transcription
  misc_feature: MA Experiment 20000477 PARAMETER Experiment Name: Zm_5mM_SA_P Parameter: Age (day) Value: 10
  misc_feature: MA Experiment 20000477 PARAMETER Experiment Name: Zm_5mM_SA_P Parameter: Organism Value: Zea mays
  misc_feature: MA Experiment 20000477 PARAMETER Experiment Name: Zm_5mM_SA_P Parameter: Plant Line Value: 35A19
  misc_feature: MA Experiment 20000477 PARAMETER Experiment Name: Zm_5mM_SA_P Parameter: Timepoint (hr) Value: 48
  misc_feature: MA Experiment 20000477 PARAMETER Experiment Name: Zm_5mM_SA_P Parameter: Tissue Value: Aerial
  misc_feature: MA Experiment 20000477 PARAMETER Experiment Name: Zm_5mM_SA_P Parameter: Treatment Value: 5mM SA vs. No Treatment
  misc_feature: MA Experiment ID: 20000478 Result: Down-regulated in Transcription
  misc_feature: MA Experiment 20000478 PARAMETER Experiment Name: Zm_5mM_SA_P Parameter: Age (day) Value: 11
  misc_feature: MA Experiment 20000478 PARAMETER Experiment Name: Zm_5mM_SA_P Parameter: Organism Value: Zea mays
  misc_feature: MA Experiment 20000478 PARAMETER Experiment Name: Zm_5mM_SA_P Parameter: Plant Line Value: 35A19
  misc_feature: MA Experiment 20000478 PARAMETER Experiment Name: Zm_5mM_SA_P Parameter: Timepoint (hr) Value: 72
  misc_feature: MA Experiment 20000478 PARAMETER Experiment Name: Zm_5mM_SA_P Parameter: Tissue Value: Aerial
  misc_feature: MA Experiment 20000478 PARAMETER Experiment Name: Zm_5mM_SA_P Parameter: Treatment Value: 5mM SA vs. No Treatment
  misc_feature: MA Experiment ID: 20000479 Result: Down-regulated in Transcription
  misc_feature: MA Experiment 20000479 PARAMETER Experiment Name: Zm_Drought_P Parameter: Age (day) Value: 10
  misc_feature: MA Experiment 20000479 PARAMETER Experiment Name: Zm_Drought_P Parameter: Organism Value: Zea mays
  misc_feature: MA Experiment 20000479 PARAMETER Experiment Name: Zm_Drought_P Parameter: Plant Line Value: 35A19
  misc_feature: MA Experiment 20000479 PARAMETER Experiment Name: Zm_Drought_P Parameter: Timepoint (hr) Value: 48
  misc_feature: MA Experiment 20000479 PARAMETER Experiment Name: Zm_Drought_P Parameter: Tissue Value: Aerial
  misc_feature: MA Experiment 20000479 PARAMETER Experiment Name: Zm_Drought_P Parameter: Treatment Value: Drought vs. No Drought
gatcttggccgagcgccgcgaggagggctcggagcgggagggtacgggccgtcggatgctcgcagctgccaccgccgcctacggctattttaaccccgcgctcctgccgacgccgcactcgcccccggcctcctcccgcctcccagatctcgctcgctcggcgccagttgcctcgcagtttggatcatctcatacctcggcgaagatgagggagatcctgcacatccagggagggcaatgtggcaaccagattggcgccaagttctgggaggtggtgtgcgatgaacatggcattgaccctaccgggcggtacactggcaattccgaccttcagttggagcgtgttaatgtctactacaatgaagcctcctgcggacgctttgttccccgcgctgttctcatggatcttgagcctgggacaatggacagtgtccggaccggaccctatgggcagatcttccgccctgacaactttgtgtttgggcaatctggtgctggtaacaattgggctaagggccactacaccgagggtgctgagctcattgactctgttctggatgttgtgatgaaggaagctgagaactgtgactgcttgcaaggattccaagtatgccactcccttggtggtggtactggatctggtatgggtacgctgttgatctcaaagatcagggaagagtaccctgaccgcatgatgcttacattctcagttttcccctcaccgaaagtatctgataccgtggttgagccatacaatgccactctttctgtccaccagttggtcgagaatgctgatgagtgcatggttctcgataacgaagccctctatgacatctgcttcaggactcttaagctgaccacccctagctttggtgatctgaaccatttgatctctgcaaccatgagtggagtcacctgctgcctaaggttccctggtcagctgaactccgacctcaggaagctggcagtgaacctgatccccttcccccgtctccacttcttcatggtcggcttcgcgccgctgacgtcccgtggctcccagcagtaccgggccctcacagtccccgagctcacgcagcagatgtgggatgccaagaacatgatgtgtgccgctgaccctcgccatgggcgttacctcaccgcctcggccatgttccgcgggaagatgagcaccaaggaggttgacgagcagatgatcaacgtccagaacaagaactcgtcctacttcgtggagtggatccccaacaacgtcaagtccagcgtgtgcgacatcccgcccaggggcctgtccatggcgtccaccttcatcggcaactcgacctccatccaggagatgttccggagggtgagcgagcagttcactgccatgttcaggaggaaggctttcttgcactggtacacgggcgagggcatggacgagatggagttcaccgaggccgagagcaacatgaacgacctcgtgtcggagtaccagcagtaccaggacgcgactgccgacgaggaggagtacgaggacgaggaggaggtgcaggccgatgacatgtgaggggagggctgttatcgtgtgaagccttgtggtccctagggcaagcggacctcgatgagttcggtgttccctttcgtgttgttgccatctttctactgctagcgtacccaccctcgtggcccattccgtcgctgttgacgtatgtatttttcttgtgctatggaaccttgcttttggtacggtactatcctgctagtatgcttggcgtttgaggttcctggcgtg

SEQ ID NO: 11357 - protein, 514 aa, Zea mays subsp. mays
  peptide (1)..(514): Ceres Seq. ID no. 12359629
  misc_feature (113)..(312): Pfam Name: Tubulin/FtsZ family, GTPase domain Pfam Description: Tubulin/FtsZ family, GTPase domain
  misc_feature (69)..(514): Homolog of NCBI NO: 8928414 NR Description: Tubulin beta-6 chain (Beta-6 tubulin)
  misc_feature (69)..(514): Homolog of NCBI NO: 34909054 NR Description: tubulin beta chain [Oryza sativa (japonica >gi|1174598|sp|P45960|TBB2_ORYSA TUBULIN BETA CHAIN
  misc_feature (69)..(514): Homolog of NCBI NO: 629791 NR Description: tubulin beta chain - rice
  misc_feature (69)..(513): Homolog of NCBI NO: 1076737 NR Description: beta-tubulin R1623 - rice
  misc_feature (69)..(514): Homolog of NCBI NO: 310317 NR Description: beta-tubulin
  misc_feature (69)..(514): Homolog of NCBI NO: 2119278 NR Description: tubulin beta-1 chain - rice
  misc_feature (69)..(514): Homolog of NCBI NO: 8928403 NR Description: Tubulin beta chain (Beta tubulin)
  misc_feature (69)..(510): Homolog of NCBI NO: 8928421 NR Description: Tubulin beta-5 chain (Beta-5 tubulin)
  misc_feature (69)..(513): Homolog of NCBI NO: 8928425 NR Description: Tubulin beta-2 chain (Beta-2 tubulin)
  misc_feature (69)..(514): Homolog of NCBI NO: 267078 NR Description: TUBULIN BETA-5 CHAIN >gi|99334|pir||S17729
ILAERREEGSEREGTGRRMLAAATAAYGYFNPALLPTPHSPPASSRLPDLARSAPVASQFGSSHTSAKMREILHIQGGQCGNQIGAKFWEVVCDEHGIDPTGRYTGNSDLQLERVNVYYNEASCGRFVPRAVLMDLEPGTMDSVRTGPYGQIFRPDNFVFGQSGAGNNWAKGHYTEGAELIDSVLDVVMKEAENCDCLQGFQVCHSLGGGTGSGMGTLLISKIREEYPDRMMLTFSVFPSPKVSDTVVEPYNATLSVHQLVENADECMVLDNEALYDICFRTLKLTTPSFGDLNHLISATMSGVTCCLRFPGQLNSDLRKLAVNLIPFPRLHFFMVGFAPLTSRGSQQYRALTVPELTQQMWDAKNMMCAADPRHGRYLTASAMFRGKMSTKEVDEQMINVQNKNSSYFVEWIPNNVKSSVCDIPPRGLSMASTFIGNSTSIQEMFRRVSEQFTAMFRRKAFLHWYTGEGMDEMEFTEAESNMNDLVSEYQQYQDATADEEEYEDEEEVQADDM

SEQ ID NO: 11358 - protein, 496 aa, Zea mays subsp. mays
  peptide (1)..(496): Ceres Seq. ID no. 12359630
  misc_feature (95)..(294): Pfam Name: Tubulin/FtsZ family, GTPase domain Pfam Description: Tubulin/FtsZ family, GTPase domain
  misc_feature (51)..(496): Homolog of NCBI NO: 8928414 NR Description: Tubulin beta-6 chain (Beta-6 tubulin)
  misc_feature (51)..(496): Homolog of NCBI NO: 34909054 NR Description: tubulin beta chain [Oryza sativa (japonica >gi|1174598|sp|P45960|TBB2_ORYSA TUBULIN BETA CHAIN
  misc_feature (51)..(496): Homolog of NCBI NO: 629791 NR Description: tubulin beta chain - rice
  misc_feature (51)..(495): Homolog of NCBI NO: 1076737 NR Description: beta-tubulin R1623 - rice
  misc_feature (51)..(496): Homolog of NCBI NO: 310317 NR Description: beta-tubulin
  misc_feature (51)..(496): Homolog of NCBI NO: 2119278 NR Description: tubulin beta-1 chain - rice
  misc_feature (51)..(496): Homolog of NCBI NO: 8928403 NR Description: Tubulin beta chain (Beta tubulin)
  misc_feature (51)..(492): Homolog of NCBI NO: 8928421 NR Description: Tubulin beta-5 chain (Beta-5 tubulin)
  misc_feature (51)..(495): Homolog of NCBI NO: 8928425 NR Description: Tubulin beta-2 chain (Beta-2 tubulin)
  misc_feature (51)..(496): Homolog of NCBI NO: 267078 NR Description: TUBULIN BETA-5 CHAIN >gi|99334|pir||S17729
MLAAATAAYGYFNPALLPTPHSPPASSRLPDLARSAPVASQFGSSHTSAKMREILHIQGGQCGNQIGAKFWEVVCDEHGIDPTGRYTGNSDLQLERVNVYYNEASCGRFVPRAVLMDLEPGTMDSVRTGPYGQIFRPDNFVFGQSGAGNNWAKGHYTEGAELIDSVLDVVMKEAENCDCLQGFQVCHSLGGGTGSGMGTLLISKIREEYPDRMMLTFSVFPSPKVSDTVVEPYNATLSVHQLVENADECMVLDNEALYDICFRTLKLTTPSFGDLNHLISATMSGVTCCLRFPGQLNSDLRKLAVNLIPFPRLHFFMVGFAPLTSRGSQQYRALTVPELTQQMWDAKNMMCAADPRHGRYLTASAMFRGKMSTKEVDEQMINVQNKNSSYFVEWIPNNVKSSVCDIPPRGLSMASTFIGNSTSIQEMFRRVSEQFTAMFRRKAFLHWYTGEGMDEMEFTEAESNMNDLVSEYQQYQDATADEEEYEDEEEVQADDM

SEQ ID NO: 11359 - protein, 446 aa, Zea mays subsp. mays
  peptide (1)..(446): Ceres Seq. ID no. 12359631
  misc_feature (45)..(244): Pfam Name: Tubulin/FtsZ family, GTPase domain Pfam Description: Tubulin/FtsZ family, GTPase domain
  misc_feature (1)..(446): Homolog of NCBI NO: 8928414 NR Description: Tubulin beta-6 chain (Beta-6 tubulin)
  misc_feature (1)..(446): Homolog of NCBI NO: 34909054 NR Description: tubulin beta chain [Oryza sativa (japonica >gi|1174598|sp|P45960|TBB2_ORYSA TUBULIN BETA CHAIN
  misc_feature (1)..(446): Homolog of NCBI NO: 629791 NR Description: tubulin beta chain - rice
  misc_feature (1)..(445): Homolog of NCBI NO: 1076737 NR Description: beta-tubulin R1623 - rice
  misc_feature (1)..(446): Homolog of NCBI NO: 310317 NR Description: beta-tubulin
  misc_feature (1)..(446): Homolog of NCBI NO: 2119278 NR Description: tubulin beta-1 chain - rice
  misc_feature (1)..(446): Homolog of NCBI NO: 8928403 NR Description: Tubulin beta chain (Beta tubulin)
  misc_feature (1)..(442): Homolog of NCBI NO: 8928421 NR Description: Tubulin beta-5 chain (Beta-5 tubulin)
  misc_feature (1)..(445): Homolog of NCBI NO: 8928425 NR Description: Tubulin beta-2 chain (Beta-2 tubulin)
  misc_feature (1)..(446): Homolog of NCBI NO: 267078 NR Description: TUBULIN BETA-5 CHAIN >gi|99334|pir||S17729
MREILHIQGGQCGNQIGAKFWEVVCDEHGIDPTGRYTGNSDLQLERVNVYYNEASCGRFVPRAVLMDLEPGTMDSVRTGPYGQIFRPDNFVFGQSGAGNNWAKGHYTEGAELIDSVLDVVMKEAENCDCLQGFQVCHSLGGGTGSGMGTLLISKIREEYPDRMMLTFSVFPSPKVSDTVVEPYNATLSVHQLVENADECMVLDNEALYDICFRTLKLTTPSFGDLNHLISATMSGVTCCLRFPGQLNSDLRKLAVNLIPFPRLHFFMVGFAPLTSRGSQQYRALTVPELTQQMWDAKNMMCAADPRHGRYLTASAMFRGKMSTKEVDEQMINVQNKNSSYFVEWIPNNVKSSVCDIPPRGLSMASTFIGNSTSIQEMFRRVSEQFTAMFRRKAFLHWYTGEGMDEMEFTEAESNMNDLVSEYQQYQDATADEEEYEDEEEVQADDM

SEQ ID NO: 11360 - DNA, 1857 bp, Zea mays subsp. mays
  misc_feature (1)..(1857): Ceres Seq. ID no. 12373415
  misc_feature: MA Experiment ID: 108522 Result: Up-regulated in Transcription
  misc_feature: MA Experiment 108522 PARAMETER Experiment Name: Zm_42deg_Heat_P Parameter: Age (day) Value: 8
  misc_feature: MA Experiment 108522 PARAMETER Experiment Name: Zm_42deg_Heat_P Parameter: Organism Value: Zea mays
  misc_feature: MA Experiment 108522 PARAMETER Experiment Name: Zm_42deg_Heat_P Parameter: Plant Line Value: 35A19
  misc_feature: MA Experiment 108522 PARAMETER Experiment Name: Zm_42deg_Heat_P Parameter: Temperature (deg C) Value: 42 vs. 22
  misc_feature: MA Experiment 108522 PARAMETER Experiment Name: Zm_42deg_Heat_P Parameter: Timepoint (hr) Value: 1
  misc_feature: MA Experiment 108522 PARAMETER Experiment Name: Zm_42deg_Heat_P Parameter: Tissue Value: Aerial
  misc_feature: MA Experiment ID: 108526 Result: Up-regulated in Transcription
  misc_feature: MA Experiment 108526 PARAMETER Experiment Name: Zm_5mM_NO_P Parameter: Age (day) Value: 8
  misc_feature: MA Experiment 108526 PARAMETER Experiment Name: Zm_5mM_NO_P Parameter: Organism Value: Zea mays
  misc_feature: MA Experiment 108526 PARAMETER Experiment Name: Zm_5mM_NO_P Parameter: Plant Line Value: 35A19
  misc_feature: MA Experiment 108526 PARAMETER Experiment Name: Zm_5mM_NO_P Parameter: Timepoint (hr) Value: 1
  misc_feature: MA Experiment 108526 PARAMETER Experiment Name: Zm_5mM_NO_P Parameter: Tissue Value: Aerial
  misc_feature: MA Experiment 108526 PARAMETER Experiment Name: Zm_5mM_NO_P Parameter: Treatment Value: 5mM NO vs. No Treatment
  misc_feature: MA Experiment ID: 108527 Result: Up-regulated in Transcription
  misc_feature: MA Experiment 108527 PARAMETER Experiment Name: Zm_5mM_NO_P Parameter: Age (day) Value: 8
  misc_feature: MA Experiment 108527 PARAMETER Experiment Name: Zm_5mM_NO_P Parameter: Organism Value: Zea mays
  misc_feature: MA Experiment 108527 PARAMETER Experiment Name: Zm_5mM_NO_P Parameter: Plant Line Value: 35A19
  misc_feature: MA Experiment 108527 PARAMETER Experiment Name: Zm_5mM_NO_P Parameter: Timepoint (hr) Value: 6
  misc_feature: MA Experiment 108527 PARAMETER Experiment Name: Zm_5mM_NO_P Parameter: Tissue Value: Aerial
  misc_feature: MA Experiment 108527 PARAMETER Experiment Name: Zm_5mM_NO_P Parameter: Treatment Value: 5mM NO vs. No Treatment
  misc_feature: MA Experiment ID: 108542 Result: Up-regulated in Transcription
  misc_feature: MA Experiment 108542 PARAMETER Experiment Name: Zm_150mM_NaCl_P Parameter: Age (day) Value: 8
  misc_feature: MA Experiment 108542 PARAMETER Experiment Name: Zm_150mM_NaCl_P Parameter: Organism Value: Zea mays
  misc_feature: MA Experiment 108542 PARAMETER Experiment Name: Zm_150mM_NaCl_P Parameter: Plant Line Value: 35A19
  misc_feature: MA Experiment 108542 PARAMETER Experiment Name: Zm_150mM_NaCl_P Parameter: Timepoint (hr) Value: 6
  misc_feature: MA Experiment 108542 PARAMETER Experiment Name: Zm_150mM_NaCl_P Parameter: Tissue Value: Aerial
  misc_feature: MA Experiment 108542 PARAMETER Experiment Name: Zm_150mM_NaCl_P Parameter: Treatment Value: 150mM NaCl vs. No Treatment
  misc_feature: MA Experiment ID: 108559 Result: Up-regulated in Transcription
  misc_feature: MA Experiment 108559 PARAMETER Experiment Name: Zm_5mM_NO_P Parameter: Age (day) Value: 8
  misc_feature: MA Experiment 108559 PARAMETER Experiment Name: Zm_5mM_NO_P Parameter: Organism Value: Zea mays
  misc_feature: MA Experiment 108559 PARAMETER Experiment Name: Zm_5mM_NO_P Parameter: Plant Line Value: 35A19
  misc_feature: MA Experiment 108559 PARAMETER Experiment Name: Zm_5mM_NO_P Parameter: Timepoint (hr) Value: 12
  misc_feature: MA Experiment 108559 PARAMETER Experiment Name: Zm_5mM_NO_P Parameter: Tissue Value: Aerial
  misc_feature: MA Experiment 108559 PARAMETER Experiment Name: Zm_5mM_NO_P Parameter: Treatment Value: 5mM NO vs. No Treatment
  misc_feature: MA Experiment ID: 20000477 Result: Up-regulated in Transcription
  misc_feature: MA Experiment 20000477 PARAMETER Experiment Name: Zm_5mM_SA_P Parameter: Age (day) Value: 10
  misc_feature: MA Experiment 20000477 PARAMETER Experiment Name: Zm_5mM_SA_P Parameter: Organism Value: Zea mays
  misc_feature: MA Experiment 20000477 PARAMETER Experiment Name: Zm_5mM_SA_P Parameter: Plant Line Value: 35A19
  misc_feature: MA Experiment 20000477 PARAMETER Experiment Name: Zm_5mM_SA_P Parameter: Timepoint (hr) Value: 48
  misc_feature: MA Experiment 20000477 PARAMETER Experiment Name: Zm_5mM_SA_P Parameter: Tissue Value: Aerial
  misc_feature: MA Experiment 20000477 PARAMETER Experiment Name: Zm_5mM_SA_P Parameter: Treatment Value: 5mM SA vs. No Treatment
  misc_feature: MA Experiment ID: 20000478 Result: Up-regulated in Transcription
  misc_feature: MA Experiment 20000478 PARAMETER Experiment Name: Zm_5mM_SA_P Parameter: Age (day) Value: 11
  misc_feature: MA Experiment 20000478 PARAMETER Experiment Name: Zm_5mM_SA_P Parameter: Organism Value: Zea mays
  misc_feature: MA Experiment 20000478 PARAMETER Experiment Name: Zm_5mM_SA_P Parameter: Plant Line Value: 35A19
  misc_feature: MA Experiment 20000478 PARAMETER Experiment Name: Zm_5mM_SA_P Parameter: Timepoint (hr) Value: 72
  misc_feature: MA Experiment 20000478 PARAMETER Experiment Name: Zm_5mM_SA_P Parameter: Tissue Value: Aerial
  misc_feature: MA Experiment 20000478 PARAMETER Experiment Name: Zm_5mM_SA_P Parameter: Treatment Value: 5mM SA vs. No Treatment
  misc_feature: MA Experiment ID: 20000480 Result: Up-regulated in Transcription
  misc_feature: MA Experiment 20000480 PARAMETER Experiment Name: Zm_Drought_P Parameter: Age (day) Value: 11
  misc_feature: MA Experiment 20000480 PARAMETER Experiment Name: Zm_Drought_P Parameter: Organism Value: Zea mays
  misc_feature: MA Experiment 20000480 PARAMETER Experiment Name: Zm_Drought_P Parameter: Plant Line Value: 35A19
  misc_feature: MA Experiment 20000480 PARAMETER Experiment Name: Zm_Drought_P Parameter: Timepoint (hr) Value: 72
  misc_feature: MA Experiment 20000480 PARAMETER Experiment Name: Zm_Drought_P Parameter: Tissue Value: Aerial
  misc_feature: MA Experiment 20000480 PARAMETER Experiment Name: Zm_Drought_P Parameter: Treatment Value: Drought vs. No Drought
  misc_feature: MA Experiment ID: 20000488 Result: Up-regulated in Transcription
  misc_feature: MA Experiment 20000488 PARAMETER Experiment Name: Zm_50mM_NH4NO3_L_to_H_P Parameter: Organism Value: Zea mays
  misc_feature: MA Experiment 20000488 PARAMETER Experiment Name: Zm_50mM_NH4NO3_L_to_H_P Parameter: Timepoint (hr) Value: 8
  misc_feature: MA Experiment 20000488 PARAMETER Experiment Name: Zm_50mM_NH4NO3_L_to_H_P Parameter: Tissue Value: Leaves
  misc_feature: MA Experiment 20000488 PARAMETER Experiment Name: Zm_50mM_NH4NO3_L_to_H_P Parameter: Treatment Value: 50mM NH4NO3 vs. 100mM Mannitol
  misc_feature: MA Experiment ID: 20000492 Result: Down-regulated in Transcription
  misc_feature: MA Experiment 20000492 PARAMETER Experiment Name: Zm_Hybrid_Seed_Dev_P Parameter: DAP Value: 12
  misc_feature: MA Experiment 20000492 PARAMETER Experiment Name: Zm_Hybrid_Seed_Dev_P Parameter: Organism Value: Zea mays
  misc_feature: MA Experiment 20000492 PARAMETER Experiment Name: Zm_Hybrid_Seed_Dev_P Parameter: Plant Line Value: 35A19
  misc_feature: MA Experiment 20000492 PARAMETER Experiment Name: Zm_Hybrid_Seed_Dev_P Parameter: Tissue Value: Fert Kernel vs. Unfert Floret
  misc_feature: MA Experiment ID: 20000534 Result: Up-regulated in Transcription
  misc_feature: MA Experiment 20000534 PARAMETER Experiment Name: Zm_Hybrid_Pollen_P Parameter: Age (day) Value: 8
  misc_feature: MA Experiment 20000534 PARAMETER Experiment Name: Zm_Hybrid_Pollen_P Parameter: Organism Value: Zea mays
  misc_feature: MA Experiment 20000534 PARAMETER Experiment Name: Zm_Hybrid_Pollen_P Parameter: Plant Line Value: 35A19
  misc_feature: MA Experiment 20000534 PARAMETER Experiment Name: Zm_Hybrid_Pollen_P Parameter: Tissue Value: Pollen vs. Aerial
  misc_feature: MA Experiment ID: 20000535 Result: Down-regulated in Transcription
  misc_feature: MA Experiment 20000535 PARAMETER Experiment Name: Zm_Hybrid_Seed_Dev_P Parameter: DAP Value: 30 vs. 12
  misc_feature: MA Experiment 20000535 PARAMETER Experiment Name: Zm_Hybrid_Seed_Dev_P Parameter: Organism Value: Zea mays
  misc_feature: MA Experiment 20000535 PARAMETER Experiment Name: Zm_Hybrid_Seed_Dev_P Parameter: Plant Line Value: 35A19
  misc_feature: MA Experiment 20000535 PARAMETER Experiment Name: Zm_Hybrid_Seed_Dev_P Parameter: Tissue Value: Embryo vs. Unfert Floret
gcaccaacagccaatccacacctcgcttgcgttgtcctcgccctgatccggttcccccgttcctcgcctcctctgacccaaattgagccaagcgaagccgtgcccgtgatccggtccatgcgcggagcgtggtagccggattctatcgccgtcgcctccccttcgccgccattttccagtcgccgggatcagccgagttggatctcgaggcataaagcgttgcgggcgcccggcgaggatacgatgcctgcggtgctcgccgcattcgctaccctccgagccgccgctgccatcgcctccggggactcctccttcccctgttcccatcgcctcaagcatcgttttagtagtagtaattttagtagtagtaattgtcattgacctttgcgttccctccgtcgcgcacgctcctcggctcggtcctcaccttcgcatctcggttttggtctggttgtgctcgatccgaagcttactttggctttgcagcttctctccttgtcgaagtttggtgtctggattcgacctgcagatcggaaggaaacaagaaacttctctttgtaatttgggatcaagcctgtggatggacgaaccctcggtggacttcagtgctgaaggtgttagcagcaactcaggtctctgccaaagcacctgtttaaatcctggttgcaagcatggctgtgcttgctgggaagatgattatgtcaaggccgtaatatctcatgggcaagatgatttggtggtcgatgaaattgaattggctcttactgaagtgatgcatgcatatgatgatgacaaatggtcaagtctgtatgaagattttgacgacggtgtcggcgaagaatcaattcttcctctggaatctgattcaactggtgattttgtggacattgactctgcatcacctacctttcctagtgacgatgcaatggaatcatcaattaccaattcatttgctcggaattgttcaattaatggcactccaagtttagtttctgccatgaaaggaacacgtgtgaagaagggaatcacgacaaagttgagcgtttcttgggcccctgatgtatacgaccctcctattacttctgactcgcacacggtgaaagggcaccatacgagttcaactaagagtaactacaaatacaagacctccaagagcagcaatatcactagaaggaaaaaggacaagaagcattctaggcacagtagtagcaatgggggtggcagcaaaagagacaagaagcattcttaccgcagtagtgccagcagcagcagcagagctattaccagtggttctctatattgtgacgcgtacagtggtggtggcatcagcagcagaactgttcctgaatctgccaagatatctccattggtggtagctgaaaatgtcacaccgcaagagatggttcctatactgaagacactggaaccaatcaaatgtactaccagctgcggcaaagagaagccatttgccttgctgtcgcgccagttttcccctgcaaggtacaaggggatgttcaccttttggaaccaaaaccaactgacttcttgacaatttgctatgcggaagctcacctgaaagttcccttgccaagggctgttcggatcccctccaaactttagagcttcaaaaaatttagagcattttagctcacttttgagctctaatctaaggttgaccaaagtttagatctaactgagctttacctctaaagtttagagaaggaaatctaaacatgccctaatttgattttatcaaagattgttgctattgttctcttcgttaccatgtttgtttcgcctgtctgaaacttcagagatcatgttttggaaaattgcttggcaaagtgcttgtgttgt

SEQ ID NO: 11361 - protein, 322 aa, Zea mays subsp. mays
  peptide (1)..(322): Ceres Seq. ID no. 12373416
  misc_feature (78)..(224): Homolog of NCBI NO: 30687157 NR Description: expressed protein [Arabidopsis thaliana]
  misc_feature (113)..(232): Homolog of NCBI NO: 15231857 NR Description: putative protein; protein id: At3g53670.1, by cDNA: gi_18377573 [Arabidopsis thaliana]
MDEPSVDFSAEGVSSNSGLCQSTCLNPGCKHGCACWEDDYVKAVISHGQDDLVVDEIELALTEVMHAYDDDKWSSLYEDFDDGVGEESILPLESDSTGDFVDIDSASPTFPSDDAMESSITNSFARNCSINGTPSLVSAMKGTRVKKGITTKLSVSWAPDVYDPPITSDSHTVKGHHTSSTKSNYKYKTSKSSNITRRKKDKKHSRHSSSNGGGSKRDKKHSYRSSASSSSRAITSGSLYCDAYSGGGISSRTVPESAKISPLVVAENVTPQEMVPILKTLEPIKCTTSCGKEKPFALLSRQFSPARYKGMFTFWNQNQLTS

SEQ ID NO: 11362 - protein, 258 aa, Zea mays subsp. mays
  peptide (1)..(258): Ceres Seq. ID no. 12373417
  misc_feature (14)..(160): Homolog of NCBI NO: 30687157 NR Description: expressed protein [Arabidopsis thaliana]
  misc_feature (49)..(168): Homolog of NCBI NO: 15231857 NR Description: putative protein; protein id: At3g53670.1, by cDNA: gi_18377573 [Arabidopsis thaliana]
MHAYDDDKWSSLYEDFDDGVGEESILPLESDSTGDFVDIDSASPTFPSDDAMESSITNSFARNCSINGTPSLVSAMKGTRVKKGITTKLSVSWAPDVYDPPITSDSHTVKGHHTSSTKSNYKYKTSKSSNITRRKKDKKHSRHSSSNGGGSKRDKKHSYRSSASSSSRAITSGSLYCDAYSGGGISSRTVPESAKISPLVVAENVTPQEMVPILKTLEPIKCTTSCGKEKPFALLSRQFSPARYKGMFTFWNQNQLTS

SEQ ID NO: 11363 - protein, 207 aa, Zea mays subsp. mays
  peptide (1)..(207): Ceres Seq. ID no. 12373418
  misc_feature (1)..(109): Homolog of NCBI NO: 30687157 NR Description: expressed protein [Arabidopsis thaliana]
  misc_feature (1)..(117): Homolog of NCBI NO: 15231857 NR Description: putative protein; protein id: At3g53670.1, by cDNA: gi_18377573 [Arabidopsis thaliana]
MESSITNSFARNCSINGTPSLVSAMKGTRVKKGITTKLSVSWAPDVYDPPITSDSHTVKGHHTSSTKSNYKYKTSKSSNITRRKKDKKHSRHSSSNGGGSKRDKKHSYRSSASSSSRAITSGSLYCDAYSGGGISSRTVPESAKISPLVVAENVTPQEMVPILKTLEPIKCTTSCGKEKPFALLSRQFSPARYKGMFTFWNQNQLTS

SEQ ID NO: 11364 - DNA, 936 bp, Zea mays subsp. mays
  misc_feature (1)..(936): Ceres Seq. ID no. 12361858
  misc_feature: MA Experiment ID: 108527 Result: Down-regulated in Transcription
  misc_feature: MA Experiment 108527 PARAMETER Experiment Name: Zm_5mM_NO_P Parameter: Age (day) Value: 8
  misc_feature: MA Experiment 108527 PARAMETER Experiment Name: Zm_5mM_NO_P Parameter: Organism Value: Zea mays
  misc_feature: MA Experiment 108527 PARAMETER Experiment Name: Zm_5mM_NO_P Parameter: Plant Line Value: 35A19
  misc_feature: MA Experiment 108527 PARAMETER Experiment Name: Zm_5mM_NO_P Parameter: Timepoint (hr) Value: 6
  misc_feature: MA Experiment 108527 PARAMETER Experiment Name: Zm_5mM_NO_P Parameter: Tissue Value: Aerial
  misc_feature: MA Experiment 108527 PARAMETER Experiment Name: Zm_5mM_NO_P Parameter: Treatment Value: 5mM NO vs. No Treatment
  misc_feature: MA Experiment ID: 108530 Result: Up-regulated in Transcription
  misc_feature: MA Experiment 108530 PARAMETER Experiment Name: Zm_Imbibed_Seeds_P Parameter: Age (day) Value: 6 vs. 2
  misc_feature: MA Experiment 108530 PARAMETER Experiment Name: Zm_Imbibed_Seeds_P Parameter: Organism Value: Zea mays
  misc_feature: MA Experiment 108530 PARAMETER Experiment Name: Zm_Imbibed_Seeds_P Parameter: Plant Line Value: 35A19
  misc_feature: MA Experiment 108530 PARAMETER Experiment Name: Zm_Imbibed_Seeds_P Parameter: Tissue Value: Aerial vs. Embryo
  misc_feature: MA Experiment ID: 108547 Result: Up-regulated in Transcription
  misc_feature: MA Experiment 108547 PARAMETER Experiment Name: Zm_Imbibed_Seeds_P Parameter: Age (day) Value: 4 vs. 2
  misc_feature: MA Experiment 108547 PARAMETER Experiment Name: Zm_Imbibed_Seeds_P Parameter: Organism Value: Zea mays
  misc_feature: MA Experiment 108547 PARAMETER Experiment Name: Zm_Imbibed_Seeds_P Parameter: Plant Line Value: 35A19
  misc_feature: MA Experiment 108547 PARAMETER Experiment Name: Zm_Imbibed_Seeds_P Parameter: Tissue Value: Aerial vs. Embryo
  misc_feature: MA Experiment ID: 108559 Result: Down-regulated in Transcription
  misc_feature: MA Experiment 108559 PARAMETER Experiment Name: Zm_5mM_NO_P Parameter: Age (day) Value: 8
  misc_feature: MA Experiment 108559 PARAMETER Experiment Name: Zm_5mM_NO_P Parameter: Organism Value: Zea mays
  misc_feature: MA Experiment 108559 PARAMETER Experiment Name: Zm_5mM_NO_P Parameter: Plant Line Value: 35A19
  misc_feature: MA Experiment 108559 PARAMETER Experiment Name: Zm_5mM_NO_P Parameter: Timepoint (hr) Value: 12
  misc_feature: MA Experiment 108559 PARAMETER Experiment Name: Zm_5mM_NO_P Parameter: Tissue Value: Aerial
  misc_feature: MA Experiment 108559 PARAMETER Experiment Name: Zm_5mM_NO_P Parameter: Treatment Value: 5mM NO vs. No Treatment
gaagcccaagacgctaactctctccctctcgtcctcctccctcacctccatgtcctcctcctcgctgcccgcccccgtcaccgatgtctgggaggtcgtcacccccactgccccacctgttgaccacgtggacggagggcttgatgactgcgtcatcttcccgccgcggctgcatgaggggctgggcctggacggcgagcccgaggaggtcccgccgatgccagcagtggcgaaggaggagaacgaggaggatggtgaatacgagggggaggacgatgagtggctgtggggatgggagaggtgcagcttggcggcgaggcgcgcttgggcggccggtgtcgggatcgttcaggagcgggtgctcgtgcatggcgcgtgtgggtgcccggcggtgaggcccgccgtgtggtcggttgcggcggcggctgctgtggtggggacacttctgtacgcccgtcggcgggataggagggaacgggacctgctcgtgcttctctccaaagagaaggataagaggatagcacaactcctgcatcaaattgctttaatgagtgacatcagaagcggcaatgaagcagtgaaggttatcaggaagtcctaatcattttcactgttgaagggttcagttgctatgttgtagcaaactgattaggtagttagggaatcagactagtcggtttgcaggttcaatacttgtagctaaattgtagtttagctgcatgatcttcacggttctgatgtttacgtataactagatgctgaaacctgcaaggttgcaacacaatctcaagcaatcaatagtcaccaccacgtcgcggtttcttctaaaaatatgtgtatagctgaatgatttggttaattcgtagatgtgtagaattgttgttcatgtcgacaaccctggacaatgctctgtatatgtatcttccatttattgct

SEQ ID NO: 11365 - protein, 199 aa, Zea mays subsp. mays
  peptide (1)..(199): Ceres Seq. ID no. 12361859
  misc_feature (1)..(171): Homolog of NCBI NO: 29027780 NR Description: OJ1710_H11.31 [Oryza sativa (japonica
KPKTLTLSLSSSSLTSMSSSSLPAPVTDVWEVVTPTAPPVDHVDGGLDDCVIFPPRLHEGLGLDGEPEEVPPMPAVAKEENEEDGEYEGEDDEWLWGWERCSLAARRAWAAGVGIVQERVLVHGACGCPAVRPAVWSVAAAAAVVGTLLYARRRDRRERDLLVLLSKEKDKRIAQLLHQIALMSDIRSGNEAVKVIRKS

SEQ ID NO: 11366 - protein, 183 aa, Zea mays subsp. mays
  peptide (1)..(183): Ceres Seq. ID no. 12361860
  misc_feature (1)..(155): Homolog of NCBI NO: 29027780 NR Description: OJ1710_H11.31 [Oryza sativa (japonica
MSSSSLPAPVTDVWEVVTPTAPPVDHVDGGLDDCVIFPPRLHEGLGLDGEPEEVPPMPAVAKEENEEDGEYEGEDDEWLWGWERCSLAARRAWAAGVGIVQERVLVHGACGCPAVRPAVWSVAAAAAVVGTLLYARRRDRRERDLLVLLSKEKDKRIAQLLHQIALMSDIRSGNEAVKVIRKS

SEQ ID NO: 11367 - protein, 127 aa, Zea mays subsp. mays
  peptide (1)..(127): Ceres Seq. ID no. 12361861
  misc_feature (1)..(99): Homolog of NCBI NO: 29027780 NR Description: OJ1710_H11.31 [Oryza sativa (japonica
MPAVAKEENEEDGEYEGEDDEWLWGWERCSLAARRAWAAGVGIVQERVLVHGACGCPAVRPAVWSVAAAAAVVGTLLYARRRDRRERDLLVLLSKEKDKRIAQLLHQIALMSDIRSGNEAVKVIRKS

SEQ ID NO: 11368 - DNA, 1954 bp, Zea mays subsp. mays
  misc_feature (1)..(1954): Ceres Seq. ID no. 12366827
  misc_feature: MA Experiment ID: 108535 Result: Up-regulated in Transcription
  misc_feature: MA Experiment 108535 PARAMETER Experiment Name: Zm_Meristem_P Parameter: Age (day) Value: 8
  misc_feature: MA Experiment 108535 PARAMETER Experiment Name: Zm_Meristem_P Parameter: Organism Value: Zea mays
  misc_feature: MA Experiment 108535 PARAMETER Experiment Name: Zm_Meristem_P Parameter: Plant Line Value: 35A19
  misc_feature: MA Experiment 108535 PARAMETER Experiment Name: Zm_Meristem_P Parameter: Tissue Value: Root Meristem vs. Above Root Meristem
  misc_feature: MA Experiment ID: 108544 Result: Down-regulated in Transcription
ctcttccgagtctgatccctccttccttccgtcagcgcacatctctagggttttagcgccccatttccgcatcgccattcccgatcggatcgcccccttcccacccgccgccgaccagatcccggcgcgagtgctacccaaccctccggcgccgccacccttagtctcagagggtcggtctccaccgaaagcttcgcacaaatcccctccgtttgtcggtgccatttgttgcaaagattgtgttttcctcctcatccgtgcctcgcgttctatttctgccgtccccgaaaatgccaccgctttgttgagatctctcgtttctcgatctgatctcgcctcggtatggcgtgagagttcctaggggagggcaaaatcctcggagttgagattcttgcgtccatttgctagtctcaataccgagcatccgatctcgaacagtgagacaaagtagcgacctttgtgccgttccttgtaactgagcttgcccccgcctgcgtatcggtgggtgacggcgagctctacggcgctgcccattcctatgaatggacgggagggagtccacggtggcgtcggggcccaacttctcgtcgttctacacgcagcaccggggcatcggggcgccgggtgtccccggccactcggcggtgctccatgacccgccgcccgctgggtaccggcagcatcttgatgctgtctctgctgggtacgcattccagaccccgcaggttgggggttcccacattggacaggggtaccaccatgtcgaggcctcaccccatgtggcgcaatacagctccggtggcggcaccagctccggcggtgatatggacattggcatgggttcggctgtgtgcaccaatgttaagggggagctggggagcgggcctgcccaagatgagcaggtgaagaagaagcggggtaggccaaggaagtataagcctgatggggcggtgactctcgggttatcaccctcttcatcattaacacctcactcggccagcttggggatgggaaccatggttagtgctccaggttctggatttgggtcggggggatcaggggcttcaggcttgggtgcgccatcagagaagcgtggcagggggcggccacctggctctggaaagatgcaacagttggcttcgcttggaaagtggtttcttggctctgttggaactggttttactcctcatgtgattattattcagccaggagaggacgttgctgccagaataatggccttctcacaacaagggcccaaggggcagtgtgcatcatttcagcaactggagctgtttctgcagcaacccttcaccaggattcagaatctggcagtgtggttacatatgagggtcggtttgagatcctgtgcctttctgggtcatacttggtagtagatgaaggtggcggcgcacggacccgaagtggagggctttgcatagctttgtgtggtcctgacaacagggttattggtgggagtgtaggtggagtcctgatggcagctggagcggttcaggtgatagtggggagcttcatgtacggcggaggttcgaagaagaacaaggtgaaagccgagttggatgcggggcctgaggaggcgaatgccggcgaccaagaggtggcacttgcggagcacagcagcatggcccctcatcctgccatgagtggtggtggcgggtgggcatctggcatgatgaggcagatggagtcgagaactcccaacatcgatatcaactccatccgcgagtagtttgcctgtttggttgggtggatgaggaaggctcctcctccttggatgcacacagcacagcggcatgcatatgtttggttgtaggcgttgctatgttttaggactccagagtatattgtgatgtgatgttgtacttggatgttgttgtataagatcatgggaacgcttggtcgtgttattatgttaataaaaatatataatggatgg

SEQ ID NO: 11369 - protein, 282 aa, Zea mays subsp. mays
  peptide (1)..(282): Ceres Seq. ID no. 12366828
  misc_feature (117)..(242): Homolog of NCBI NO: 15237481 NR Description: putative protein; protein id: At5g46640.1
  misc_feature (143)..(242): Homolog of NCBI NO: 15225902 NR Description: putative AT-hook DNA-binding protein; protein id: supported by cDNA: gi_14194130, supported by cDNA: gi_16323337, by cDNA: gi_17065245 [Arabidopsis thaliana]
  misc_feature (112)..(257): Homolog of NCBI NO: 37537056 NR Description: putative AT-Hook DNA-binding protein [Oryza
  misc_feature (71)..(242): Homolog of NCBI NO: 18414996 NR Description: putative protein; protein id: At4g17950.1, by cDNA: gi_15451059, supported by cDNA: gi_20148332 [Arabidopsis >gi|15451060|gb|AAK96801.1| putative protein [Arabidopsis
  misc_feature (71)..(242): Homolog of NCBI NO: 25456045 NR Description: probable DNA-binding protein AT-hook 2 [imported]
  misc_feature (153)..(257): Homolog of NCBI NO: 38346715 NR Description: OSJNBa0086O06.13 [Oryza sativa (japonica
  misc_feature (178)..(242): Homolog of NCBI NO: 7488825 NR Description: probable DNA-binding protein - garden pea
  misc_feature (121)..(242): Homolog of NCBI NO: 22328578 NR Description: putative DNA-binding protein; protein id: supported by cDNA: gi_17979484 [Arabidopsis thaliana] AT4g12080/F16J13_150 [Arabidopsis thaliana]
  misc_feature (143)..(242): Homolog of NCBI NO: 30696854 NR Description: DNA-binding protein -related [Arabidopsis
  misc_feature (160)..(242): Homolog of NCBI NO: 2213534 NR Description: DNA-binding PD1-like protein [Pisum sativum]
MDGRESTVASGPNFSSFYTQHRGIGAPGVPGHSAVLHDPPPAGYRQHLDAVSAGYAFQTPQVGGSHIGQGYHHVEASPHVAQYSSGGGTSSGGDMDIGMGSAVCTNVKGELGSGPAQDEQVKKKRGRPRKYKPDGAVTLGLSPSSSLTPHSASLGMGTMVSAPGSGFGSGGSGASGLGAPSEKRGRGRPPGSGKMQQLASLGKWFLGSVGTGFTPHVIIIQPGEDVAARIMAFSQQGPKGQCASFQQLELFLQQPFTRIQNLAVWLHMRVGLRSCAFLGHTW

SEQ ID NO: 11370 - protein, 188 aa, Zea mays subsp. mays
  peptide (1)..(188): Ceres Seq. ID no. 12366829
  misc_feature (23)..(148): Homolog of NCBI NO: 15237481 NR Description: putative protein; protein id: At5g46640.1
  misc_feature (49)..(148): Homolog of NCBI NO: 15225902 NR Description: putative AT-hook DNA-binding protein; protein id: supported by cDNA: gi_14194130, supported by cDNA: gi_16323337, by cDNA: gi_17065245 [Arabidopsis thaliana]
  misc_feature (18)..(163): Homolog of NCBI NO: 37537056 NR Description: putative AT-Hook DNA-binding protein [Oryza
  misc_feature (1)..(148): Homolog of NCBI NO: 18414996 NR Description: putative protein; protein id: At4g17950.1, by cDNA: gi_15451059, supported by cDNA: gi_20148332 [Arabidopsis >gi|15451060|gb|AAK96801.1| putative protein [Arabidopsis
  misc_feature (1)..(148): Homolog of NCBI NO: 25456045 NR Description: probable DNA-binding protein AT-hook 2 [imported]
  misc_feature (59)..(163): Homolog of NCBI NO: 38346715 NR Description: OSJNBa0086O06.13 [Oryza sativa (japonica
  misc_feature (84)..(148): Homolog of NCBI NO: 7488825 NR Description: probable DNA-binding protein - garden pea
  misc_feature (27)..(148): Homolog of NCBI NO: 22328578 NR Description: putative DNA-binding protein; protein id: supported by cDNA: gi_17979484 [Arabidopsis thaliana] AT4g12080/F16J13_150 [Arabidopsis thaliana]
  misc_feature (49)..(148): Homolog of NCBI NO: 30696854 NR Description: DNA-binding protein -related [Arabidopsis
  misc_feature (66)..(148): Homolog of NCBI NO: 2213534 NR Description: DNA-binding PD1-like protein [Pisum sativum]
MDIGMGSAVCTNVKGELGSGPAQDEQVKKKRGRPRKYKPDGAVTLGLSPSSSLTPHSASLGMGTMVSAPGSGFGSGGSGASGLGAPSEKRGRGRPPGSGKMQQLASLGKWFLGSVGTGFTPHVIIIQPGEDVAARIMAFSQQGPKGQCASFQQLELFLQQPFTRIQNLAVWLHMRVGLRSCAFLGHTW

SEQ ID NO: 11371 - protein, 184 aa, Zea mays subsp. mays
  peptide (1)..(184): Ceres Seq. ID no. 12366830
  misc_feature (19)..(144): Homolog of NCBI NO: 15237481 NR Description: putative protein; protein id: At5g46640.1
  misc_feature (45)..(144): Homolog of NCBI NO: 15225902 NR Description: putative AT-hook DNA-binding protein; protein id: supported by cDNA: gi_14194130, supported by cDNA: gi_16323337, by cDNA: gi_17065245 [Arabidopsis thaliana]
  misc_feature (14)..(159): Homolog of NCBI NO: 37537056 NR Description: putative AT-Hook DNA-binding protein [Oryza
  misc_feature (1)..(144): Homolog of NCBI NO: 18414996 NR Description: putative protein; protein id: At4g17950.1, by cDNA: gi_15451059, supported by cDNA: gi_20148332 [Arabidopsis >gi|15451060|gb|AAK96801.1| putative protein [Arabidopsis
  misc_feature (1)..(144): Homolog of NCBI NO: 25456045 NR Description: probable DNA-binding protein AT-hook 2 [imported]
  misc_feature (55)..(159): Homolog of NCBI NO: 38346715 NR Description: OSJNBa0086O06.13 [Oryza sativa (japonica
  misc_feature (80)..(144): Homolog of NCBI NO: 7488825 NR Description: probable DNA-binding protein - garden pea
  misc_feature (23)..(144): Homolog of NCBI NO: 22328578 NR Description: putative DNA-binding protein; protein id: supported by cDNA: gi_17979484 [Arabidopsis thaliana] AT4g12080/F16J13_150 [Arabidopsis thaliana]
  misc_feature (45)..(144): Homolog of NCBI NO: 30696854 NR Description: DNA-binding protein -related [Arabidopsis
  misc_feature (62)..(144): Homolog of NCBI NO: 2213534 NR Description: DNA-binding PD1-like protein [Pisum sativum]
MGSAVCTNVKGELGSGPAQDEQVKKKRGRPRKYKPDGAVTLGLSPSSSLTPHSASLGMGTMVSAPGSGFGSGGSGASGLGAPSEKRGRGRPPGSGKMQQLASLGKWFLGSVGTGFTPHVIIIQPGEDVAARIMAFSQQGPKGQCASFQQLELFLQQPFTRIQNLAVWLHMRVGLRSCAFLGHTW

SEQ ID NO: 11372 - DNA, 1097 bp, Zea mays subsp. mays
  misc_feature (1)..(1097): Ceres Seq. ID no. 12353369
  misc_feature: MA Experiment ID: 108504 Result: Down-regulated in Transcription
  misc_feature: MA Experiment 108504 PARAMETER Experiment Name: Zm_Drought_P Parameter: Age (day) Value: 8
  misc_feature: MA Experiment 108504 PARAMETER Experiment Name: Zm_Drought_P Parameter: Organism Value: Zea mays
  misc_feature: MA Experiment 108504 PARAMETER Experiment Name: Zm_Drought_P Parameter: Plant Line Value: 35A19
  misc_feature: MA Experiment 108504 PARAMETER Experiment Name: Zm_Drought_P Parameter: Timepoint (hr) Value: 12
  misc_feature: MA Experiment 108504 PARAMETER Experiment Name: Zm_Drought_P Parameter: Tissue Value: Aerial
  misc_feature: MA Experiment 108504 PARAMETER Experiment Name: Zm_Drought_P Parameter: Treatment Value: Drought vs. No Drought
  misc_feature: MA Experiment ID: 108527 Result: Down-regulated in Transcription
  misc_feature: MA Experiment 108527 PARAMETER Experiment Name: Zm_5mM_NO_P Parameter: Age (day) Value: 8
  misc_feature: MA Experiment 108527 PARAMETER Experiment Name: Zm_5mM_NO_P Parameter: Organism Value: Zea mays
  misc_feature: MA Experiment 108527 PARAMETER Experiment Name: Zm_5mM_NO_P Parameter: Plant Line Value: 35A19
  misc_feature: MA Experiment 108527 PARAMETER Experiment Name: Zm_5mM_NO_P Parameter: Timepoint (hr) Value: 6
  misc_feature: MA Experiment 108527 PARAMETER Experiment Name: Zm_5mM_NO_P Parameter: Tissue Value: Aerial
  misc_feature: MA Experiment 108527 PARAMETER Experiment Name: Zm_5mM_NO_P Parameter: Treatment Value: 5mM NO vs. No Treatment
  misc_feature: MA Experiment ID: 108530 Result: Up-regulated in Transcription
  misc_feature: MA Experiment 108530 PARAMETER Experiment Name: Zm_Imbibed_Seeds_P Parameter: Age (day) Value: 6 vs. 2
  misc_feature: MA Experiment 108530 PARAMETER Experiment Name: Zm_Imbibed_Seeds_P Parameter: Organism Value: Zea mays
  misc_feature: MA Experiment 108530 PARAMETER Experiment Name: Zm_Imbibed_Seeds_P Parameter: Plant Line Value: 35A19
  misc_feature: MA Experiment 108530 PARAMETER Experiment Name: Zm_Imbibed_Seeds_P Parameter: Tissue Value: Aerial vs. Embryo
  misc_feature: MA Experiment ID: 108536 Result: Down-regulated in Transcription
  misc_feature: MA Experiment 108536 PARAMETER Experiment Name: Zm_Meristem_P Parameter: Age (day) Value: 8
  misc_feature: MA Experiment 108536 PARAMETER Experiment Name: Zm_Meristem_P Parameter: Organism Value: Zea mays
  misc_feature: MA Experiment 108536 PARAMETER Experiment Name: Zm_Meristem_P Parameter: Plant Line Value: 35A19
  misc_feature: MA Experiment 108536 PARAMETER Experiment Name: Zm_Meristem_P Parameter: Tissue Value: Shoot Meristem vs. Above Shoot Meristem
  misc_feature: MA Experiment ID: 108545 Result: Up-regulated in Transcription
  misc_feature: MA Experiment 108545 PARAMETER Experiment Name: Zm_Imbibed_Seeds_P Parameter: Age (day) Value: 3 vs. 2
  misc_feature: MA Experiment 108545 PARAMETER Experiment Name: Zm_Imbibed_Seeds_P Parameter: Organism Value: Zea mays
  misc_feature: MA Experiment 108545 PARAMETER Experiment Name: Zm_Imbibed_Seeds_P Parameter: Plant Line Value: 35A19
  misc_feature: MA Experiment 108545 PARAMETER Experiment Name: Zm_Imbibed_Seeds_P Parameter: Tissue Value: Aerial vs. Embryo
  misc_feature: MA Experiment ID: 108547 Result: Up-regulated in Transcription
  misc_feature: MA Experiment 108547 PARAMETER Experiment Name: Zm_Imbibed_Seeds_P Parameter: Age (day) Value: 4 vs. 2
  misc_feature: MA Experiment 108547 PARAMETER Experiment Name: Zm_Imbibed_Seeds_P Parameter: Organism Value: Zea mays
  misc_feature: MA Experiment 108547 PARAMETER Experiment Name: Zm_Imbibed_Seeds_P Parameter: Plant Line Value: 35A19
  misc_feature: MA Experiment 108547 PARAMETER Experiment Name: Zm_Imbibed_Seeds_P Parameter: Tissue Value: Aerial vs. Embryo
  misc_feature: MA Experiment ID: 108556 Result: Down-regulated in Transcription
  misc_feature: MA Experiment 108556 PARAMETER Experiment Name: Zm_Drought_P Parameter: Age (day) Value: 9
  misc_feature: MA Experiment 108556 PARAMETER Experiment Name: Zm_Drought_P Parameter: Organism Value: Zea mays
  misc_feature: MA Experiment 108556 PARAMETER Experiment Name: Zm_Drought_P Parameter: Plant Line Value: 35A19
  misc_feature: MA Experiment 108556 PARAMETER Experiment Name: Zm_Drought_P Parameter: Timepoint (hr) Value: 24
  misc_feature: MA Experiment 108556 PARAMETER Experiment Name: Zm_Drought_P Parameter: Tissue Value: Aerial
  misc_feature: MA Experiment 108556 PARAMETER Experiment Name: Zm_Drought_P Parameter: Treatment Value: Drought vs. No Drought
  misc_feature: MA Experiment ID: 108559 Result: Down-regulated in Transcription
  misc_feature: MA Experiment 108559 PARAMETER Experiment Name: Zm_5mM_NO_P Parameter: Age (day) Value: 8
  misc_feature: MA Experiment 108559 PARAMETER Experiment Name: Zm_5mM_NO_P Parameter: Organism Value: Zea mays
  misc_feature: MA Experiment 108559 PARAMETER Experiment Name: Zm_5mM_NO_P Parameter: Plant Line Value: 35A19
  misc_feature: MA Experiment 108559 PARAMETER Experiment Name: Zm_5mM_NO_P Parameter: Timepoint (hr) Value: 12
  misc_feature: MA Experiment 108559 PARAMETER Experiment Name: Zm_5mM_NO_P Parameter: Tissue Value: Aerial
  misc_feature: MA Experiment 108559 PARAMETER Experiment Name: Zm_5mM_NO_P Parameter: Treatment Value: 5mM NO vs. No Treatment
  misc_feature: MA Experiment ID: 20000478 Result: Down-regulated in Transcription
  misc_feature: MA Experiment 20000478 PARAMETER Experiment Name: Zm_5mM_SA_P Parameter: Age (day) Value: 11
  misc_feature: MA Experiment 20000478 PARAMETER Experiment Name: Zm_5mM_SA_P Parameter: Organism Value: Zea mays
  misc_feature: MA Experiment 20000478 PARAMETER Experiment Name: Zm_5mM_SA_P Parameter: Plant Line Value: 35A19
  misc_feature: MA Experiment 20000478 PARAMETER Experiment Name: Zm_5mM_SA_P Parameter: Timepoint (hr) Value: 72
  misc_feature: MA Experiment 20000478 PARAMETER Experiment Name: Zm_5mM_SA_P Parameter: Tissue Value: Aerial
  misc_feature: MA Experiment 20000478 PARAMETER Experiment Name: Zm_5mM_SA_P Parameter: Treatment Value: 5mM SA vs. No Treatment
  misc_feature: MA Experiment ID: 20000480 Result: Down-regulated in Transcription
  misc_feature: MA Experiment 20000480 PARAMETER Experiment Name: Zm_Drought_P Parameter: Age (day) Value: 11
  misc_feature: MA Experiment 20000480 PARAMETER Experiment Name: Zm_Drought_P Parameter: Organism Value: Zea mays
  misc_feature: MA Experiment 20000480 PARAMETER Experiment Name: Zm_Drought_P Parameter: Plant Line Value: 35A19
  misc_feature: MA Experiment 20000480 PARAMETER Experiment Name: Zm_Drought_P Parameter: Timepoint (hr) Value: 72
  misc_feature: MA Experiment 20000480 PARAMETER Experiment Name: Zm_Drought_P Parameter: Tissue Value: Aerial
  misc_feature: MA Experiment 20000480 PARAMETER Experiment Name: Zm_Drought_P Parameter: Treatment Value: Drought vs. No Drought
ctatcagcccaaaaccgaacccacacctctgcccttcccatggcggccacgctattctccacctccctcttgccccagttcctctccctctccgctaagcccgccgccgccgccgccgccccgtccgccgccgccttcccatcggggatgccgcagctccacgcgctgtccgccgcggcggtgggctttaggccgctcgagcccgtgcgagcagccgcgaccgcggccgtgacggaggagctcgaggcggaggggcgttcgggcggggacgagttttcagatgatctcagggtcttcgtcggtaaccttccgttcagcgtcgacagcgcccagctcgcgggacttttcgagcaggccggctccgtcgagatggtcgaggttatctatgacaaattgacgggaagaagccgtggattcgggtttgtgaccatgtcttcggtcgaagaagttgaggtggctgttgaccaatttaatggctatgtgcttgatggaagaagtttgagggtgaactctgggccgccaccacccagagatcggtcatcaccgtcaccgcaaagacccaggggtgatgccaacagggtctacgtgggtaacctttcctggggagttgacaattcagctctcgcaaacctgttcagtgagcaaggtgaggtactggaagcaaggatcatctatgacagggagagtggaaggtcaagggggtttggttttgtcacgtacggttctgccgaagaggttgagaatgcaatatctaatctcgatggcgctgacttggacggcagacagatccgtgttacggtagcagagtcgaagccacctaggcagcaatactgaaattcctcttgagatttttgtaggtgtaccggtagcccaaactctggattatagtgacgccagtcctggatttggtctcgagattcattgaagttaaaaagccctcatgtatatggctcactatttatatacatgtaatattggattcccgtgttcagtgtccttttgtatcaatttggctgcatagtgtcttgtggcacttcaaaggacatagattgttgacgggcaaccaaacctcaagaaagtatcttgtattgtttctt

SEQ ID NO: 11373 - protein, 277 aa, Zea mays subsp. mays
  peptide (1)..(277): Ceres Seq. ID no. 12353370
  misc_feature (98)..(169): Pfam Name: RNA recognition motif. (a.k.a. RRM, RBD, or RNP domain) Pfam Description: RNA recognition motif. (a.k.a. RRM, RBD, or RNP
  misc_feature (14)..(277): Homolog of NCBI NO: 18921322 NR Description: putative ribonucleoprotein [Oryza sativa]
  misc_feature (14)..(275): Homolog of NCBI NO: 34913270 NR Description: putative ribonucleoprotein [Oryza sativa cultivar- group)] >gi|22296371|dbj|BAC10140.1| putative 29 kDa
  misc_feature (10)..(197): Homolog of NCBI NO: 15228102 NR Description: chloroplast RNA-binding protein cp29, putative; id: At2g37220.1, supported by cDNA: 8849., supported by cDNA: supported by cDNA: gi_15081716, supported by cDNA: gi_16323481
  misc_feature (189)..(277): Homolog of NCBI NO: 15228102 NR Description: chloroplast RNA-binding protein cp29, putative; id: At2g37220.1, supported by cDNA: 8849., supported by cDNA: supported by cDNA: gi_15081716, supported by cDNA: gi_16323481
  misc_feature (10)..(197): Homolog of NCBI NO: 21617920 NR Description: putative RNA-binding protein [Arabidopsis
  misc_feature (189)..(277): Homolog of NCBI NO: 21617920 NR Description: putative RNA-binding protein [Arabidopsis
  misc_feature (15)..(277): Homolog of NCBI NO: 12230584 NR Description: 29 kDa ribonucleoprotein A, chloroplast precursor
  misc_feature (14)..(188): Homolog of NCBI NO: 15231817 NR Description: 29 kDa ribonucleoprotein, chloroplast precursor protein cp29); protein id: At3g53460.1, supported by cDNA: supported by cDNA: gi_14532569, supported by cDNA: gi_18655392
  misc_feature (189)..(277): Homolog of NCBI NO: 15231817 NR Description: 29 kDa ribonucleoprotein, chloroplast precursor protein cp29); protein id: At3g53460.1, supported by cDNA: supported by cDNA: gi_14532569, supported by cDNA: gi_18655392
  misc_feature (14)..(188): Homolog of NCBI NO: 30693824 NR Description: 29 kDa ribonucleoprotein, chloroplast
LSAQNRTHTSALPMAATLFSTSLLPQFLSLSAKPAAAAAAPSAAAFPSGMPQLHALSAAAVGFRPLEPVRAAATAAVTEELEAEGRSGGDEFSDDLRVFVGNLPFSVDSAQLAGLFEQAGSVEMVEVIYDKLTGRSRGFGFVTMSSVEEVEVAVDQFNGYVLDGRSLRVNSGPPPPRDRSSPSPQRPRGDANRVYVGNLSWGVDNSALANLFSEQGEVLEARIIYDRESGRSRGFGFVTYGSAEEVENAISNLDGADLDGRQIRVTVAESKPPRQQY

SEQ ID NO: 11374 - protein, 264 aa, Zea mays subsp. mays
  peptide (1)..(264): Ceres Seq. ID no. 12353371
  misc_feature (85)..(156): Pfam Name: RNA recognition motif. (a.k.a. RRM, RBD, or RNP domain) Pfam Description: RNA recognition motif. (a.k.a. RRM, RBD, or RNP
  misc_feature (1)..(184): Homolog of NCBI NO: 15228102 NR Description: chloroplast RNA-binding protein cp29, putative; id: At2g37220.1, supported by cDNA: 8849., supported by cDNA: supported by cDNA: gi_15081716, supported by cDNA: gi_16323481
  misc_feature (176)..(264): Homolog of NCBI NO: 15228102 NR Description: chloroplast RNA-binding protein cp29, putative; id: At2g37220.1, supported by cDNA: 8849., supported by cDNA: supported by cDNA: gi_15081716, supported by cDNA: gi_16323481
  misc_feature (1)..(184): Homolog of NCBI NO: 21617920 NR Description: putative RNA-binding protein [Arabidopsis
  misc_feature (176)..(264): Homolog of NCBI NO: 21617920 NR Description: putative RNA-binding protein [Arabidopsis
  misc_feature (1)..(264): Homolog of NCBI NO: 18921322 NR Description: putative ribonucleoprotein [Oryza sativa]
  misc_feature (1)..(262): Homolog of NCBI NO: 34913270 NR Description: putative ribonucleoprotein [Oryza sativa cultivar- group)] >gi|22296371|dbj|BAC10140.1| putative 29 kDa
  misc_feature (2)..(264): Homolog of NCBI NO: 12230584 NR Description: 29 kDa ribonucleoprotein A, chloroplast precursor
  misc_feature (1)..(175): Homolog of NCBI NO: 15231817 NR Description: 29 kDa ribonucleoprotein, chloroplast precursor protein cp29); protein id: At3g53460.1, supported by cDNA: supported by cDNA: gi_14532569, supported by cDNA: gi_18655392
  misc_feature (176)..(264): Homolog of NCBI NO: 15231817 NR Description: 29 kDa ribonucleoprotein, chloroplast precursor protein cp29); protein id: At3g53460.1, supported by cDNA: supported by cDNA: gi_14532569, supported by cDNA: gi_18655392
  misc_feature (1)..(175): Homolog of NCBI NO: 30693824 NR Description: 29 kDa ribonucleoprotein, chloroplast
MAATLFSTSLLPQFLSLSAKPAAAAAAPSAAAFPSGMPQLHALSAAAVGFRPLEPVRAAATAAVTEELEAEGRSGGDEFSDDLRVFVGNLPFSVDSAQLAGLFEQAGSVEMVEVIYDKLTGRSRGFGFVTMSSVEEVEVAVDQFNGYVLDGRSLRVNSGPPPPRDRSSPSPQRPRGDANRVYVGNLSWGVDNSALANLFSEQGEVLEARIIYDRESGRSRGFGFVTYGSAEEVENAISNLDGADLDGRQIRVTVAESKPPRQQY

SEQ ID NO: 11375 - protein, 228 aa, Zea mays subsp. mays
  peptide (1)..(228): Ceres Seq. ID no. 12353372
  misc_feature (49)..(120): Pfam Name: RNA recognition motif. (a.k.a. RRM, RBD, or RNP domain) Pfam Description: RNA recognition motif. (a.k.a. RRM, RBD, or RNP
  misc_feature (1)..(228): Homolog of NCBI NO: 18921322 NR Description: putative ribonucleoprotein [Oryza sativa]
  misc_feature (1)..(226): Homolog of NCBI NO: 34913270 NR Description: putative ribonucleoprotein [Oryza sativa cultivar- group)] >gi|22296371|dbj|BAC10140.1| putative 29 kDa
  misc_feature (1)..(148): Homolog of NCBI NO: 15228102 NR Description: chloroplast RNA-binding protein cp29, putative; id: At2g37220.1, supported by cDNA: 8849., supported by cDNA: supported by cDNA: gi_15081716, supported by cDNA: gi_16323481
  misc_feature (140)..(228): Homolog of NCBI NO: 15228102 NR Description: chloroplast RNA-binding protein cp29, putative; id: At2g37220.1, supported by cDNA: 8849., supported by cDNA: supported by cDNA: gi_15081716, supported by cDNA: gi_16323481
  misc_feature (1)..(148): Homolog of NCBI NO: 21617920 NR Description: putative RNA-binding protein [Arabidopsis
  misc_feature (140)..(228): Homolog of NCBI NO: 21617920 NR Description: putative RNA-binding protein [Arabidopsis
  misc_feature (1)..(228): Homolog of NCBI NO: 12230584 NR Description: 29 kDa ribonucleoprotein A, chloroplast precursor
  misc_feature (1)..(139): Homolog of NCBI NO: 15231817 NR Description: 29 kDa ribonucleoprotein, chloroplast precursor protein cp29); protein id: At3g53460.1, supported by cDNA: supported by cDNA: gi_14532569, supported by cDNA: gi_18655392
  misc_feature (140)..(228): Homolog of NCBI NO: 15231817 NR Description: 29 kDa ribonucleoprotein, chloroplast precursor protein cp29); protein id: At3g53460.1, supported by cDNA: supported by cDNA: gi_14532569, supported by cDNA: gi_18655392
  misc_feature (1)..(139): Homolog of NCBI NO: 30693824 NR Description: 29 kDa ribonucleoprotein, chloroplast
MPQLHALSAAAVGFRPLEPVRAAATAAVTEELEAEGRSGGDEFSDDLRVFVGNLPFSVDSAQLAGLFEQAGSVEMVEVIYDKLTGRSRGFGFVTMSSVEEVEVAVDQFNGYVLDGRSLRVNSGPPPPRDRSSPSPQRPRGDANRVYVGNLSWGVDNSALANLFSEQGEVLEARIIYDRESGRSRGFGFVTYGSAEEVENAISNLDGADLDGRQIRVTVAESKPPRQQY

SEQ ID NO: 11376 - DNA, 685 bp, Zea mays subsp. mays
  misc_feature (1)..(685): Ceres Seq. ID no. 12403937
  misc_feature: MA Experiment ID: 108504 Result: Down-regulated in Transcription
  misc_feature: MA Experiment 108504 PARAMETER Experiment Name: Zm_Drought_P Parameter: Age (day) Value: 8
  misc_feature: MA Experiment 108504 PARAMETER Experiment Name: Zm_Drought_P Parameter: Organism Value: Zea mays
  misc_feature: MA Experiment 108504 PARAMETER Experiment Name: Zm_Drought_P Parameter: Plant Line Value: 35A19
  misc_feature: MA Experiment 108504 PARAMETER Experiment Name: Zm_Drought_P Parameter: Timepoint (hr) Value: 12
  misc_feature: MA Experiment 108504 PARAMETER Experiment Name: Zm_Drought_P Parameter: Tissue Value: Aerial
  misc_feature: MA Experiment 108504 PARAMETER Experiment Name: Zm_Drought_P Parameter: Treatment Value: Drought vs. No Drought
  misc_feature: MA Experiment ID: 108530 Result: Down-regulated in Transcription
  misc_feature: MA Experiment 108530 PARAMETER Experiment Name: Zm_Imbibed_Seeds_P Parameter: Age (day) Value: 6 vs. 2
  misc_feature: MA Experiment 108530 PARAMETER Experiment Name: Zm_Imbibed_Seeds_P Parameter: Organism Value: Zea mays
  misc_feature: MA Experiment 108530 PARAMETER Experiment Name: Zm_Imbibed_Seeds_P Parameter: Plant Line Value: 35A19
  misc_feature: MA Experiment 108530 PARAMETER Experiment Name: Zm_Imbibed_Seeds_P Parameter: Tissue Value: Aerial vs. Embryo
  misc_feature: MA Experiment ID: 108535 Result: Up-regulated in Transcription
  misc_feature: MA Experiment 108535 PARAMETER Experiment Name: Zm_Meristem_P Parameter: Age (day) Value: 8
  misc_feature: MA Experiment 108535 PARAMETER Experiment Name: Zm_Meristem_P Parameter: Organism Value: Zea mays
  misc_feature: MA Experiment 108535 PARAMETER Experiment Name: Zm_Meristem_P Parameter: Plant Line Value: 35A19
  misc_feature: MA Experiment 108535 PARAMETER Experiment Name: Zm_Meristem_P Parameter: Tissue Value: Root Meristem vs. Above Root Meristem
  misc_feature: MA Experiment ID: 108544 Result: Down-regulated in Transcription
  misc_feature: MA Experiment ID: 108556 Result: Down-regulated in Transcription
  misc_feature: MA Experiment 108556 PARAMETER Experiment Name: Zm_Drought_P Parameter: Age (day) Value: 9
  misc_feature: MA Experiment 108556 PARAMETER Experiment Name: Zm_Drought_P Parameter: Organism Value: Zea mays
  misc_feature: MA Experiment 108556 PARAMETER Experiment Name: Zm_Drought_P Parameter: Plant Line Value: 35A19
  misc_feature: MA Experiment 108556 PARAMETER Experiment Name: Zm_Drought_P Parameter: Timepoint (hr) Value: 24
  misc_feature: MA Experiment 108556 PARAMETER Experiment Name: Zm_Drought_P Parameter: Tissue Value: Aerial
  misc_feature: MA Experiment 108556 PARAMETER Experiment Name: Zm_Drought_P Parameter: Treatment Value: Drought vs. No Drought
  misc_feature: MA Experiment ID: 20000479 Result: Down-regulated in Transcription
  misc_feature: MA Experiment 20000479 PARAMETER Experiment Name: Zm_Drought_P Parameter: Age (day) Value: 10
  misc_feature: MA Experiment 20000479 PARAMETER Experiment Name: Zm_Drought_P Parameter: Organism Value: Zea mays
  misc_feature: MA Experiment 20000479 PARAMETER Experiment Name: Zm_Drought_P Parameter: Plant Line Value: 35A19
  misc_feature: MA Experiment 20000479 PARAMETER Experiment Name: Zm_Drought_P Parameter: Timepoint (hr) Value: 48
  misc_feature: MA Experiment 20000479 PARAMETER Experiment Name: Zm_Drought_P Parameter: Tissue Value: Aerial
  misc_feature: MA Experiment 20000479 PARAMETER Experiment Name: Zm_Drought_P Parameter: Treatment Value: Drought vs. No Drought
  misc_feature: MA Experiment ID: 20000488 Result: Up-regulated in Transcription
  misc_feature: MA Experiment 20000488 PARAMETER Experiment Name: Zm_50mM_NH4NO3_L_to_H_P Parameter: Organism Value: Zea mays
  misc_feature: MA Experiment 20000488 PARAMETER Experiment Name: Zm_50mM_NH4NO3_L_to_H_P Parameter: Timepoint (hr) Value: 8
  misc_feature: MA Experiment 20000488 PARAMETER Experiment Name: Zm_50mM_NH4NO3_L_to_H_P Parameter: Tissue Value: Leaves
  misc_feature: MA Experiment 20000488 PARAMETER Experiment Name: Zm_50mM_NH4NO3_L_to_H_P Parameter: Treatment Value: 50mM NH4NO3 vs. 100mM Mannitol
  misc_feature: MA Experiment ID: 20000626 Result: Up-regulated in Transcription
  misc_feature: MA Experiment 20000626 PARAMETER Experiment Name: Zm_Herbicide-Treatments_P Parameter: Timepoint (hr) Value: 12
  misc_feature: MA Experiment 20000626 PARAMETER Experiment Name: Zm_Herbicide-Treatments_P Parameter: Tissue Value: Aerial
  misc_feature: MA Experiment 20000626 PARAMETER Experiment Name: Zm_Herbicide-Treatments_P Parameter: Treatment Value: Roundup vs. No Treatment
  misc_feature: MA Experiment ID: 20000632 Result: Down-regulated in Transcription
  misc_feature: MA Experiment 20000632 PARAMETER Experiment Name: Zm_Herbicide-Treatments_P Parameter: Timepoint (hr) Value: 4
  misc_feature: MA Experiment 20000632 PARAMETER Experiment Name: Zm_Herbicide-Treatments_P Parameter: Tissue Value: Aerial
  misc_feature: MA Experiment 20000632 PARAMETER Experiment Name: Zm_Herbicide-Treatments_P Parameter: Treatment Value: Glean vs. No Treatment
aaatatccctccattctcctaccaaaaatcgcagcgccgcccgcaccaatctcgaagtgttcgaaagtttccagacccccaaaaggcgaagcggcgatgagttccaccggaggcggcggccgcgggaaggcgaagccagcgaccaagtcggtgtcgcggtcctccaaggctgggcttcagttccccgtcggtcgcatcgcgcggtacctcaaggccgggaagtatgcggagcgcgtcggcgccggggcccccgtgtacctctccgccgttctcggagtatctcgccgccgaggtgctggagctggccgggaacgctgctcgggacaacaagaagaaccgtatcgtgccgcgccacatccagctggcggtgcggaacgacgaggagctgagcaagctgctgggcactgtgacgatcgcggccggcggcgtgatgccgaacatccatcagaccctgctgcccaagaaagctggtcagaagggggacatcggctctgcctcccaggagttctaagcgtttcggcggaatgaggagagggaccgccccctgtttctgtctcgtccgcgtggttgtgtttcagctctgcggtttttgggggagtgctgtcgatgagttgggattgatatgggttgtggggatgtaaacaaacgcagcgcgttgtttcatgaatgaatgatggatagaagg

SEQ ID NO: 11377 - protein, 175 aa, Zea mays subsp. mays
  peptide (1)..(175): Ceres Seq. ID no. 12403938
  misc_feature (35)..(91): Pfam Name: Core histone H2A/H2B/H3/H4 Pfam Description: Core histone H2A/H2B/H3/H4
  misc_feature (34)..(91): Homolog of NCBI NO: 685035 NR Description: histone H2A homolog [Phaseolus vulgaris, Great
  misc_feature (33)..(91): Homolog of NCBI NO: 462229 NR Description: Histone H2A.1 >gi|542442|pir||S41471 histone
  misc_feature (30)..(91): Homolog of NCBI NO: 27529852 NR Description: H2A histone [Nicotiana tabacum]
  misc_feature (34)..(91): Homolog of NCBI NO: 121964 NR Description: Histone H2A.1 >gi|70708|pir||HSTE91 histone H2A.1
  misc_feature (30)..(91): Homolog of NCBI NO: 122003 NR Description: HISTONE H2A >gi|82089|pir||JQ1182 histone H2A.1 -
  misc_feature (31)..(91): Homolog of NCBI NO: 122007 NR Description: Histone H2A >gi|100161|pir||S11498 histone H2A -
  misc_feature (33)..(91): Homolog of NCBI NO: 462230 NR Description: Histone H2A.2 >gi|542443|pir||S41472 histone
  misc_feature (37)..(91): Homolog of NCBI NO: 7649159 NR Description: histone H2A [Euphorbia esula]
  misc_feature (33)..(91): Homolog of NCBI NO: 15238549 NR Description: histone H2A - like protein; protein id: supported by cDNA: 20036. [Arabidopsis thaliana]
  misc_feature (34)..(91): Homolog of NCBI NO: 121973 NR Description: Histone H2A.2 >gi|70707|pir||HSTE92 histone H2A.2
KYPSILLPKIAAPPAPISKCSKVSRPPKGEAAMSSTGGGGRGKAKPATKSVSRSSKAGLQFPVGRIARYLKAGKYAERVGAGAPVYLSAVLGVSRRRGAGAGRERCSGQQEEPYRAAPHPAGGAERRGAEQAAGHCDDRGRRRDAEHPSDPAAQESWSEGGHRLCLPGVLSVSAE

SEQ ID NO: 11378 - protein, 143 aa, Zea mays subsp. mays
  peptide (1)..(143): Ceres Seq. ID no. 12403939
  misc_feature (3)..(59): Pfam Name: Core histone H2A/H2B/H3/H4 Pfam Description: Core histone H2A/H2B/H3/H4
  misc_feature (2)..(59): Homolog of NCBI NO: 685035 NR Description: histone H2A homolog [Phaseolus vulgaris, Great
  misc_feature (1)..(59): Homolog of NCBI NO: 462229 NR Description: Histone H2A.1 >gi|542442|pir||S41471 histone
  misc_feature (1)..(59): Homolog of NCBI NO: 27529852 NR Description: H2A histone [Nicotiana tabacum]
  misc_feature (2)..(59): Homolog of NCBI NO: 121964 NR Description: Histone H2A.1 >gi|70708|pir||HSTE91 histone H2A.1
  misc_feature (1)..(59): Homolog of NCBI NO: 122003 NR Description: HISTONE H2A >gi|82089|pir||JQ1182 histone H2A.1 -
  misc_feature (1)..(59): Homolog of NCBI NO: 122007 NR Description: Histone H2A >gi|100161|pir||S11498 histone H2A -
  misc_feature (1)..(59): Homolog of NCBI NO: 462230 NR Description: Histone H2A.2 >gi|542443|pir||S41472 histone
  misc_feature (5)..(59): Homolog of NCBI NO: 7649159 NR Description: histone H2A [Euphorbia esula]
  misc_feature (1)..(59): Homolog of NCBI NO: 15238549 NR Description: histone H2A - like protein; protein id: supported by cDNA: 20036. [Arabidopsis thaliana]
  misc_feature (2)..(59): Homolog of NCBI NO: 121973 NR Description: Histone H2A.2 >gi|70707|pir||HSTE92 histone H2A.2
MSSTGGGGRGKAKPATKSVSRSSKAGLQFPVGRIARYLKAGKYAERVGAGAPVYLSAVLGVSRRRGAGAGRERCSGQQEEPYRAAPHPAGGAERRGAEQAAGHCDDRGRRRDAEHPSDPAAQESWSEGGHRLCLPGVLSVSAE

SEQ ID NO: 11379 - protein, 128 aa, Zea mays subsp. mays
  peptide (1)..(128): Ceres Seq. ID no. 12403940
ISLHSPTKNRSAARTNLEVFESFQTPKRRSGDEFHRRRRPREGEASDQVGVAVLQGWASVPRRSHRAVPQGREVCGARRRRGPRVPLRRSRSISPPRCWSWPGTLLGTTRRTVSCRATSSWRCGTTRS

SEQ ID NO: 11380 - DNA, 827 bp, Zea mays subsp. mays
  misc_feature (1)..(827): Ceres Seq. ID no. 12343201
  misc_feature: MA Experiment ID: 20000534 Result: Down-regulated in Transcription
  misc_feature: MA Experiment 20000534 PARAMETER Experiment Name: Zm_Hybrid_Pollen_P Parameter: Age (day) Value: 8
  misc_feature: MA Experiment 20000534 PARAMETER Experiment Name: Zm_Hybrid_Pollen_P Parameter: Organism Value: Zea mays
  misc_feature: MA Experiment 20000534 PARAMETER Experiment Name: Zm_Hybrid_Pollen_P Parameter: Plant Line Value: 35A19
  misc_feature: MA Experiment 20000534 PARAMETER Experiment Name: Zm_Hybrid_Pollen_P Parameter: Tissue Value: Pollen vs. Aerial
atctccgaaaaaaaaacgcgaacgcagaacgccgccggcccgtcgtgcactcgtgtttcccttcctccacttgccttcgtgttcgtgattcgtgatttcgccgccggaaagccgagggagagggagcgatatggggttcgtcggagacacgatggagtcgatccgctccatgcagatccgccaagtgctcatgcagatcatcagcctcggtatgattgttacctctgcattaatcatatggaagggtttgatagttttcacggggagcgagtcaccagttgtagtggtgctctcgggtagcatggagcctggatttaaaaggggtgatatcctgtttttgcatatgagcaaagatcctattcgcacaggagaaatagttgttttcaatatcgatggtcgtgagattccaattgtccaccgagtgattaaggtccatgaacgtcaggacactgcagaagtggacatcctcaccaaaggtgacaataattttggggatgaccgactattatatgcacatggccagctttggctccagcaacaccacattatggggcgtgcggtgggctaccttccatatgttggctgggttacaattatcatgactgagaaaccatttattaagtacctgctgattggcgcactgggcttgctggtcataacgtcgaaagattagtgatgtcaaacttcagggccatgtagattttgctcttatggcgcaacagcagagatcactggctttgtggcgtttgagagatgccgctatgttgcgccatgtatcaaacgagaagatttctttatctactgcgagggcacctgcccattgatcg

SEQ ID NO: 11381 - protein, 180 aa, Zea mays subsp. mays
  peptide (1)..(180): Ceres Seq. ID no. 12343202
  misc_feature (1)..(157): Pfam Name: Signal peptidase I Pfam Description: Signal peptidase I
  misc_feature (1)..(180): Homolog of NCBI NO: 15219044 NR Description: signal peptidase subunit, putative; protein id: supported by cDNA: 103157., supported by cDNA: gi_17381151, by cDNA: gi_20465736 [Arabidopsis thaliana]
  misc_feature (1)..(180): Homolog of NCBI NO: 18400874 NR Description: putative signal peptidase 21kDa subunit; protein
  misc_feature (6)..(180): Homolog of NCBI NO: 9910550 NR Description: signal peptidase complex; sid2895p; signal complex (18kD) [Mus musculus] >gi|17369451|sp|Q9R0P6|SPC4_MOUSE signal peptidase 18 kDa subunit (SPase 18 kDa subunit) (SPC18)
  misc_feature (6)..(180): Homolog of NCBI NO: 34784421 NR Description: Spc18-pending protein [Mus musculus]
  misc_feature (6)..(180): Homolog of NCBI NO: 24025634 NR Description: signal peptidase 21kDa subunit [Rattus >gi|17367427|sp|Q9WTR7|SPC3_RAT Microsomal signal peptidase 21 subunit (SPase 21 kDa subunit) (SPC21)
  misc_feature (6)..(180): Homolog of NCBI NO: 134792 NR Description: Microsomal signal peptidase 21 kDa subunit (SPase
  misc_feature (6)..(180): Homolog of NCBI NO: 21313554 NR Description: RIKEN cDNA 1810029G24 [Mus musculus] Microsomal signal peptidase 21 kDa subunit (SPase 21 kDa subunit) >gi|12841311|dbj|BAB25156.1| unnamed protein product [Mus
  misc_feature (6)..(180): Homolog of NCBI NO: 7657609 NR Description: signal peptidase complex (18kD) [Homo sapiens] signal peptidase complex (18kD) [Bos taurus] Microsomal signal peptidase >gi|4335939|gb|AAD17526.1| microsomal
  misc_feature (1)..(180): Homolog of NCBI NO: 31195617 NR Description: ENSANGP00000013674 [Anopheles gambiae]
  misc_feature (1)..(180): Homolog of NCBI NO: 31207577 NR Description: ENSANGP00000020448 [Anopheles gambiae]
MGFVGDTMESIRSMQIRQVLMQIISLGMIVTSALIIWKGLIVFTGSESPVVVVLSGSMEPGFKRGDILFLHMSKDPIRTGEIVVFNIDGREIPIVHRVIKVHERQDTAEVDILTKGDNNFGDDRLLYAHGQLWLQQHHIMGRAVGYLPYVGWVTIIMTEKPFIKYLLIGALGLLVITSKD

SEQ ID NO: 11382 - protein, 173 aa, Zea mays subsp. mays
  peptide (1)..(173): Ceres Seq. ID no. 12343203
  misc_feature (1)..(150): Pfam Name: Signal peptidase I Pfam Description: Signal peptidase I
  misc_feature (1)..(173): Homolog of NCBI NO: 15219044 NR Description: signal peptidase subunit, putative; protein id: supported by cDNA: 103157., supported by cDNA: gi_17381151, by cDNA: gi_20465736 [Arabidopsis thaliana]
  misc_feature (1)..(173): Homolog of NCBI NO: 18400874 NR Description: putative signal peptidase 21kDa subunit; protein
  misc_feature (1)..(173): Homolog of NCBI NO: 9910550 NR Description: signal peptidase complex; sid2895p; signal complex (18kD) [Mus musculus] >gi|17369451|sp|Q9R0P6|SPC4_MOUSE signal peptidase 18 kDa subunit (SPase 18 kDa subunit) (SPC18)
  misc_feature (1)..(173): Homolog of NCBI NO: 34784421 NR Description: Spc18-pending protein [Mus musculus]
  misc_feature (1)..(173): Homolog of NCBI NO: 24025634 NR Description: signal peptidase 21kDa subunit [Rattus >gi|17367427|sp|Q9WTR7|SPC3_RAT Microsomal signal peptidase 21 subunit (SPase 21 kDa subunit) (SPC21)
  misc_feature (1)..(173): Homolog of NCBI NO: 134792 NR Description: Microsomal signal peptidase 21 kDa subunit (SPase
  misc_feature (1)..(173): Homolog of NCBI NO: 21313554 NR Description: RIKEN cDNA 1810029G24 [Mus musculus] Microsomal signal peptidase 21 kDa subunit (SPase 21 kDa subunit) >gi|12841311|dbj|BAB25156.1| unnamed protein product [Mus
  misc_feature (1)..(173): Homolog of NCBI NO: 7657609 NR Description: signal peptidase complex (18kD) [Homo sapiens] signal peptidase complex (18kD) [Bos taurus] Microsomal signal peptidase >gi|4335939|gb|AAD17526.1| microsomal
  misc_feature (1)..(173): Homolog of NCBI NO: 31195617 NR Description: ENSANGP00000013674 [Anopheles gambiae]
  misc_feature (1)..(173): Homolog of NCBI NO: 31207577 NR Description: ENSANGP00000020448 [Anopheles gambiae]
MESIRSMQIRQVLMQIISLGMIVTSALIIWKGLIVFTGSESPVVVVLSGSMEPGFKRGDILFLHMSKDPIRTGEIVVFNIDGREIPIVHRVIKVHERQDTAEVDILTKGDNNFGDDRLLYAHGQLWLQQHHIMGRAVGYLPYVGWVTIIMTEKPFIKYLLIGALGLLVITSKD

SEQ ID NO: 11383 - protein, 167 aa, Zea mays subsp. mays
  peptide (1)..(167): Ceres Seq. ID no. 12343204
  misc_feature (1)..(144): Pfam Name: Signal peptidase I Pfam Description: Signal peptidase I
  misc_feature (1)..(167): Homolog of NCBI NO: 15219044 NR Description: signal peptidase subunit, putative; protein id: supported by cDNA: 103157., supported by cDNA: gi_17381151, by cDNA: gi_20465736 [Arabidopsis thaliana]
  misc_feature (1)..(167): Homolog of NCBI NO: 18400874 NR Description: putative signal peptidase 21kDa subunit; protein
  misc_feature (1)..(167): Homolog of NCBI NO: 9910550 NR Description: signal peptidase complex; sid2895p; signal complex (18kD) [Mus musculus] >gi|17369451|sp|Q9R0P6|SPC4_MOUSE signal peptidase 18 kDa subunit (SPase 18 kDa subunit) (SPC18)
  misc_feature (1)..(167): Homolog of NCBI NO: 34784421 NR Description: Spc18-pending protein [Mus musculus]
  misc_feature (1)..(167): Homolog of NCBI NO: 24025634 NR Description: signal peptidase 21kDa subunit [Rattus >gi|17367427|sp|Q9WTR7|SPC3_RAT Microsomal signal peptidase 21 subunit (SPase 21 kDa subunit) (SPC21)
  misc_feature (1)..(167): Homolog of NCBI NO: 134792 NR Description: Microsomal signal peptidase 21 kDa subunit (SPase
  misc_feature (1)..(167): Homolog of NCBI NO: 21313554 NR Description: RIKEN cDNA 1810029G24 [Mus musculus] Microsomal signal peptidase 21 kDa subunit (SPase 21 kDa subunit) >gi|12841311|dbj|BAB25156.1| unnamed protein product [Mus
  misc_feature (1)..(167): Homolog of NCBI NO: 7657609 NR Description: signal peptidase complex (18kD) [Homo sapiens] signal peptidase complex (18kD) [Bos taurus] Microsomal signal peptidase >gi|4335939|gb|AAD17526.1| microsomal
  misc_feature (1)..(167): Homolog of NCBI NO: 31195617 NR Description: ENSANGP00000013674 [Anopheles gambiae]
  misc_feature (1)..(167): Homolog of NCBI NO: 31207577 NR Description: ENSANGP00000020448 [Anopheles gambiae]
MQIRQVLMQIISLGMIVTSALIIWKGLIVFTGSESPVVVVLSGSMEPGFKRGDILFLHMSKDPIRTGEIVVFNIDGREIPIVHRVIKVHERQDTAEVDILTKGDNNFGDDRLLYAHGQLWLQQHHIMGRAVGYLPYVGWVTIIMTEKPFIKYLLIGALGLLVITSKD

SEQ ID NO: 11384 - DNA, 1092 bp, Zea mays subsp. mays
  misc_feature (1)..(1092): Ceres Seq. ID no. 12404178
  misc_feature: MA Experiment ID: 108527 Result: Down-regulated in Transcription
  misc_feature: MA Experiment 108527 PARAMETER Experiment Name: Zm_5mM_NO_P Parameter: Age (day) Value: 8
  misc_feature: MA Experiment 108527 PARAMETER Experiment Name: Zm_5mM_NO_P Parameter: Organism Value: Zea mays
  misc_feature: MA Experiment 108527 PARAMETER Experiment Name: Zm_5mM_NO_P Parameter: Plant Line Value: 35A19
  misc_feature: MA Experiment 108527 PARAMETER Experiment Name: Zm_5mM_NO_P Parameter: Timepoint (hr) Value: 6
  misc_feature: MA Experiment 108527 PARAMETER Experiment Name: Zm_5mM_NO_P Parameter: Tissue Value: Aerial
  misc_feature: MA Experiment 108527 PARAMETER Experiment Name: Zm_5mM_NO_P Parameter: Treatment Value: 5mM NO vs. No Treatment
  misc_feature: MA Experiment ID: 20000487 Result: Up-regulated in Transcription
  misc_feature: MA Experiment 20000487 PARAMETER Experiment Name: Zm_50mM_NH4NO3_L_to_H_P Parameter: Organism Value: Zea mays
  misc_feature: MA Experiment 20000487 PARAMETER Experiment Name: Zm_50mM_NH4NO3_L_to_H_P Parameter: Timepoint (hr) Value: 4
  misc_feature: MA Experiment 20000487 PARAMETER Experiment Name: Zm_50mM_NH4NO3_L_to_H_P Parameter: Tissue Value: Leaves
  misc_feature: MA Experiment 20000487 PARAMETER Experiment Name: Zm_50mM_NH4NO3_L_to_H_P Parameter: Treatment Value: 50mM NH4NO3 vs. 100mM Mannitol
  misc_feature: MA Experiment ID: 20000535 Result: Up-regulated in Transcription
  misc_feature: MA Experiment 20000535 PARAMETER Experiment Name: Zm_Hybrid_Seed_Dev_P Parameter: DAP Value: 30 vs. 12
  misc_feature: MA Experiment 20000535 PARAMETER Experiment Name: Zm_Hybrid_Seed_Dev_P Parameter: Organism Value: Zea mays
  misc_feature: MA Experiment 20000535 PARAMETER Experiment Name: Zm_Hybrid_Seed_Dev_P Parameter: Plant Line Value: 35A19
  misc_feature: MA Experiment 20000535 PARAMETER Experiment Name: Zm_Hybrid_Seed_Dev_P Parameter: Tissue Value: Embryo vs. Unfert Floret
aaaaagaaaagagagggagaggaagcgagcggctgggcgccccaagccccacatggtgcagcgaggtccacgctaacaacttctcgaccttggcctcccacggctctgccgcattgccgcgcgccgccggccggcactcgccgtcctgacgcgagaaggaagatgctctaggaagttgggggcctggctagggacagcctgtgtcccgccgtgggatcggtgggagagggggaggcaggcatgtgtgatctggtggcccgcacgggccggcacctgcagcgctacgagaacggccgtcgccttgtggccgggtgcataccattcagatatagggatattaatgatggagcttctgatgatgaacaaaagaaacttgttgaagttctcatgatcagctcccaaagtggaccgggtcttctatttccaaagggaggctgggagaatgatgaaactgttgaagaggcagctgcaagggaagctatcgaagaagctggagtgcgaggagatttagtgcaactgctggggttctacgatttcaagagcaagcagcccgaagcaacgtgcagagccgcaatcttcgccctgcacgtgaaggaagagctagcctcctggccagaacagagcacccggcagaggagctggctcaccgttcccgaggcggcggagcggagccgctacccgtggatgcaggaggccctcgtgacaggcttctccgcctggctcgagaactggagaaacggtggtggcggcggcggcggctgcgtggaccgaactgagagatgacaccaccttaaagcatcaggggggcccccggcggagaagccatctgctagctatttcttggcgttgtatcttgcttggactagaattttcttccagaggctgactgcctggcatacatgcatgagggctctctgatgctcggtagcttttgtttactttgtcgctttattacaccgtcgtcttcaggatgacagtctcctcagctgatgatggcccgaggtttgttaaattgtaagcttgctgattctcgcggtcgccagctatatttaactgtcttgtattgagccttgagacaaagcaagctttgtg

SEQ ID NO: 11385 - protein, 180 aa, Zea mays subsp. mays
  peptide (1)..(180): Ceres Seq. ID no. 12404179
  misc_feature (19)..(158): Pfam Name: NUDIX domain Pfam Description: NUDIX domain
  misc_feature (1)..(167): Homolog of NCBI NO: 38175436 NR Description: MutT-like protein [Oryza sativa (japonica
  misc_feature (1)..(167): Homolog of NCBI NO: 34900054 NR Description: MutT-like protein~contains ESTs
  misc_feature (1)..(160): Homolog of NCBI NO: 18399682 NR Description: expressed protein; protein id: At3g12600.1 thaliana] >gi|9294354|dbj|BAB02251.1| to unknown protein [Arabidopsis thaliana]
  misc_feature (1)..(153): Homolog of NCBI NO: 15231598 NR Description: MutT-like protein; protein id: At3g26690.1
  misc_feature (1)..(153): Homolog of NCBI NO: 18379275 NR Description: expressed protein; protein id: At2g01670.1, by cDNA: 8247., supported by cDNA: gi_13272382, supported by gi_15293192, supported by cDNA: gi_15724325 [Arabidopsis
  misc_feature (1)..(153): Homolog of NCBI NO: 21595695 NR Description: unknown [Arabidopsis thaliana]
  misc_feature (1)..(153): Homolog of NCBI NO: 15223919 NR Description: hypothetical protein; protein id: At1g14860.1
  misc_feature (1)..(153): Homolog of NCBI NO: 18391450 NR Description: expressed protein; protein id: At1g12880.1, by cDNA: gi_15810278, supported by cDNA: gi_20258974 [Arabidopsis >gi|15810279|gb|AAL07027.1| unknown protein [Arabidopsis
  misc_feature (1)..(153): Homolog of NCBI NO: 25518008 NR Description: F13K23.14 protein - Arabidopsis thaliana
  misc_feature (4)..(153): Homolog of NCBI NO: 15221055 NR Description: unknown protein; protein id: At1g18300.1 thaliana] >gi|6714298|gb|AAF25994.1|AC013354_13 F15H18.18 thaliana] >gi|8671772|gb|AAF78378.1|AC069551_11 T10O22.27
MCDLVARTGRHLQRYENGRRLVAGCIPFRYRDINDGASDDEQKKLVEVLMISSQSGPGLLFPKGGWENDETVEEAAAREAIEEAGVRGDLVQLLGFYDFKSKQPEATCRAAIFALHVKEELASWPEQSTRQRSWLTVPEAAERSRYPWMQEALVTGFSAWLENWRNGGGGGGGCVDRTER

SEQ ID NO: 11386 - protein, 131 aa, Zea mays subsp. mays
  peptide (1)..(131): Ceres Seq. ID no. 12404180
  misc_feature (1)..(109): Pfam Name: NUDIX domain Pfam Description: NUDIX domain
  misc_feature (1)..(104): Homolog of NCBI NO: 15223919 NR Description: hypothetical protein; protein id: At1g14860.1
  misc_feature (1)..(104): Homolog of NCBI NO: 18391450 NR Description: expressed protein; protein id: At1g12880.1, by cDNA: gi_15810278, supported by cDNA: gi_20258974 [Arabidopsis >gi|15810279|gb|AAL07027.1| unknown protein [Arabidopsis
  misc_feature (1)..(118): Homolog of NCBI NO: 38175436 NR Description: MutT-like protein [Oryza sativa (japonica
  misc_feature (1)..(111): Homolog of NCBI NO: 18399682 NR Description: expressed protein; protein id: At3g12600.1 thaliana] >gi|9294354|dbj|BAB02251.1| to unknown protein [Arabidopsis thaliana]
  misc_feature (1)..(104): Homolog of NCBI NO: 18379275 NR Description: expressed protein; protein id: At2g01670.1, by cDNA: 8247., supported by cDNA: gi_13272382, supported by gi_15293192, supported by cDNA: gi_15724325 [Arabidopsis
  misc_feature (1)..(104): Homolog of NCBI NO: 21595695 NR Description: unknown [Arabidopsis thaliana]
  misc_feature (1)..(104): Homolog of NCBI NO: 15231598 NR Description: MutT-like protein; protein id: At3g26690.1
  misc_feature (1)..(118): Homolog of NCBI NO: 34900054 NR Description: MutT-like protein~contains ESTs
  misc_feature (1)..(104): Homolog of NCBI NO: 25518008 NR Description: F13K23.14 protein - Arabidopsis thaliana
  misc_feature (1)..(104): Homolog of NCBI NO: 15221055 NR Description: unknown protein; protein id: At1g18300.1 thaliana] >gi|6714298|gb|AAF25994.1|AC013354_13 F15H18.18 thaliana] >gi|8671772|gb|AAF78378.1|AC069551_11 T10O22.27
MISSQSGPGLLFPKGGWENDETVEEAAAREAIEEAGVRGDLVQLLGFYDFKSKQPEATCRAAIFALHVKEELASWPEQSTRQRSWLTVPEAAERSRYPWMQEALVTGFSAWLENWRNGGGGGGGCVDRTER

SEQ ID NO: 11387 - DNA, 1635 bp, Zea mays subsp. mays
  misc_feature (1)..(1635): Ceres Seq. ID no. 12364926
  misc_feature: MA Experiment ID: 108522 Result: Up-regulated in Transcription
  misc_feature: MA Experiment 108522 PARAMETER Experiment Name: Zm_42deg_Heat_P Parameter: Age (day) Value: 8
  misc_feature: MA Experiment 108522 PARAMETER Experiment Name: Zm_42deg_Heat_P Parameter: Organism Value: Zea mays
  misc_feature: MA Experiment 108522 PARAMETER Experiment Name: Zm_42deg_Heat_P Parameter: Plant Line Value: 35A19
  misc_feature: MA Experiment 108522 PARAMETER Experiment Name: Zm_42deg_Heat_P Parameter: Temperature (deg C) Value: 42 vs. 22
  misc_feature: MA Experiment 108522 PARAMETER Experiment Name: Zm_42deg_Heat_P Parameter: Timepoint (hr) Value: 1
  misc_feature: MA Experiment 108522 PARAMETER Experiment Name: Zm_42deg_Heat_P Parameter: Tissue Value: Aerial
  misc_feature: MA Experiment ID: 108597 Result: Up-regulated in Transcription
  misc_feature: MA Experiment 108597 PARAMETER Experiment Name: Zm_100uM_ABA_P Parameter: Age (day) Value: 9
  misc_feature: MA Experiment 108597 PARAMETER Experiment Name: Zm_100uM_ABA_P Parameter: Organism Value: Zea mays
  misc_feature: MA Experiment 108597 PARAMETER Experiment Name: Zm_100uM_ABA_P Parameter: Plant Line Value: 35A19
  misc_feature: MA Experiment 108597 PARAMETER Experiment Name: Zm_100uM_ABA_P Parameter: Timepoint (hr) Value: 24
  misc_feature: MA Experiment 108597 PARAMETER Experiment Name: Zm_100uM_ABA_P Parameter: Tissue Value: Aerial
  misc_feature: MA Experiment 108597 PARAMETER Experiment Name: Zm_100uM_ABA_P Parameter: Treatment Value: 100uM ABA vs. No Treatment
acgcagcggaaaaatcccatcaaaaaacaaggggaaaaaacaacacagcatgaactgcttgaagaactcgcgttctgtcctctcgcgactccttcgccacaggccccacgtagccgcgccaccgccgccgacgccggcgacggcgccgcagccaccggcttcacggtactactactacgcctcccgcgtcaagccagccgtctcccgaccgccgcctcagttgccgagatctaggcactactacacatccccgcggcgtcagcaggtcgtccacttcaaccgccgccgcggcgggtcccggtggtaccacgaccagcggaagctcacggcggcggtcttaatcagcggcggcggggcggtcgcgttctacttcggccatttggagaccgtgccctacaccaaccgctcccacctcgtcgtcctctcgccgaagttcgagcgccagctcggcgagtcccagtttgcccagctcaagaaggagttcgggcccaagatcctgccaccgcttcaccccgacagcatccgtgtccgcctcatcgcctcggagatcgtccgcgccgtccaccgtggcatctccgtccaacagcgccacgacgccttctacggagaggacgcctcgtatgggtatggcggcatcgccgacgacctctccatcaagaaccgcgacgccgacgctgctgcagcgctgcttggtgcttcccccggcaagaacgccagtgctgccgtggccgctcagcgagatgacgagctcctggatgacaggtgggtgaccgagagtcggagccgaggtaaggcacgtggggcgcaaccgcagacgggtcacctggacggggttaactgggaggtgatcgttgtcaaagatgacctcgtcaatgcattttgcctgcctggtggcaagattgtagtcttcactggattgcttaacaaattcagggccgatgctgaggttgccactgttgttgggcatgaggttgggcatgctattgcgaggcactccgctgagcagatcactaagaacctctgggtggcaatcctgcagattgtcatcctgcagtttatttacatgccggacttgataaatacggtgtcaacactactcctcaggctacccttctcacgaagaatggagatagaggctgaccacatcgggctcctgctgctcgctgctgctggttacgatccgcgtgtggccccttcggtctatgagaagctaggaaagatcggaggagattcagcactgaataactacctctcgactcacccgtccagcaagaagagggcgcagcttctgtcgcaggccagtgtcatgaacgaggcgctgaaactgtacagggaggttagtgccggccaaggcaccgaaggtttcctctagattctgggacctgctcctctgcttgtttcaaacgcctcacaaagaggttggtggtcttgttagctgcagtagtgacggcctgtggcgatcggcgttctgagtggttcagaagcctggaagattaaacctcgttatttccagtcgttctgatgtcgaacggggccctcgtcgcttcccctagcagaagcaggatagctgctttgcatttgtcattaggaaaaaagaaattaagcaccgtatattgtcaataattgttggttgac

SEQ ID NO: 11388 - protein, 456 aa, Zea mays subsp. mays
  peptide (1)..(456): Ceres Seq. ID no. 12364927
  misc_feature (78)..(456): Homolog of NCBI NO: 10177873 NR Description: contains similarity to peptidase~gene_id:MIO24.13
  misc_feature (78)..(456): Homolog of NCBI NO: 30696099 NR Description: expressed protein [Arabidopsis thaliana]
  misc_feature (275)..(445): Homolog of NCBI NO: 19114452 NR Description: hypothetical peptidase 48 family protein pombe] >gi|7211063|emb|CAB77005.1| hypothetical peptidase 48
  misc_feature (113)..(184): Homolog of NCBI NO: 19114452 NR Description: hypothetical peptidase 48 family protein pombe] >gi|7211063|emb|CAB77005.1| hypothetical peptidase 48
  misc_feature (275)..(432): Homolog of NCBI NO: 6322940 NR Description: Hypothetical ORF; Ykr087cp [Saccharomyces
  misc_feature (117)..(193): Homolog of NCBI NO: 6322940 NR Description: Hypothetical ORF; Ykr087cp [Saccharomyces
  misc_feature (275)..(430): Homolog of NCBI NO: 40745859 NR Description: hypothetical protein AN1850.2 [Aspergillus
  misc_feature (50)..(184): Homolog of NCBI NO: 40745859 NR Description: hypothetical protein AN1850.2 [Aspergillus
  misc_feature (235)..(453): Homolog of NCBI NO: 33601095 NR Description: putative lipoprotein [Bordetella bronchiseptica]
  misc_feature (235)..(453): Homolog of NCBI NO: 33596542 NR Description: putative lipoprotein [Bordetella parapertussis]
RSGKIPSKNKGKKQHSMNCLKNSRSVLSRLLRHRPHVAAPPPPTPATAPQPPASRYYYYASRVKPAVSRPPPQLPRSRHYYTSPRRQQVVHFNRRRGGSRWYHDQRKLTAAVLISGGGAVAFYFGHLETVPYTNRSHLVVLSPKFERQLGESQFAQLKKEFGPKILPPLHPDSIRVRLIASEIVRAVHRGISVQQRHDAFYGEDASYGYGGIADDLSIKNRDADAAAALLGASPGKNASAAVAAQRDDELLDDRWVTESRSRGKARGAQPQTGHLDGVNWEVIVVKDDLVNAFCLPGGKIVVFTGLLNKFRADAEVATVVGHEVGHAIARHSAEQITKNLWVAILQIVILQFIYMPDLINTVSTLLLRLPFSRRMEIEADHIGLLLLAAAGYDPRVAPSVYEKLGKIGGDSALNNYLSTHPSSKKRAQLLSQASVMNEALKLYREVSAGQGTEGFL

SEQ ID NO: 11389 - protein, 440 aa, Zea mays subsp. mays
  peptide (1)..(440): Ceres Seq. ID no. 12364928
  misc_feature (62)..(440): Homolog of NCBI NO: 10177873 NR Description: contains similarity to peptidase~gene_id:MIO24.13
  misc_feature (62)..(440): Homolog of NCBI NO: 30696099 NR Description: expressed protein [Arabidopsis thaliana]
  misc_feature (259)..(429): Homolog of NCBI NO: 19114452 NR Description: hypothetical peptidase 48 family protein pombe] >gi|7211063|emb|CAB77005.1| hypothetical peptidase 48
  misc_feature (97)..(168): Homolog of NCBI NO: 19114452 NR Description: hypothetical peptidase 48 family protein pombe] >gi|7211063|emb|CAB77005.1| hypothetical peptidase 48
  misc_feature (259)..(416): Homolog of NCBI NO: 6322940 NR Description: Hypothetical ORF; Ykr087cp [Saccharomyces
  misc_feature (101)..(177): Homolog of NCBI NO: 6322940 NR Description: Hypothetical ORF; Ykr087cp [Saccharomyces
  misc_feature (259)..(414): Homolog of NCBI NO: 40745859 NR Description: hypothetical protein AN1850.2 [Aspergillus
  misc_feature (34)..(168): Homolog of NCBI NO: 40745859 NR Description: hypothetical protein AN1850.2 [Aspergillus
  misc_feature (219)..(437): Homolog of NCBI NO: 33601095 NR Description: putative lipoprotein [Bordetella bronchiseptica]
  misc_feature (219)..(437): Homolog of NCBI NO: 33596542 NR Description: putative lipoprotein [Bordetella parapertussis]
MNCLKNSRSVLSRLLRHRPHVAAPPPPTPATAPQPPASRYYYYASRVKPAVSRPPPQLPRSRHYYTSPRRQQVVHFNRRRGGSRWYHDQRKLTAAVLISGGGAVAFYFGHLETVPYTNRSHLVVLSPKFERQLGESQFAQLKKEFGPKILPPLHPDSIRVRLIASEIVRAVHRGISVQQRHDAFYGEDASYGYGGIADDLSIKNRDADAAAALLGASPGKNASAAVAAQRDDELLDDRWVTESRSRGKARGAQPQTGHLDGVNWEVIVVKDDLVNAFCLPGGKIVVFTGLLNKFRADAEVATVVGHEVGHAIARHSAEQITKNLWVAILQIVILQFIYMPDLINTVSTLLLRLPFSRRMEIEADHIGLLLLAAAGYDPRVAPSVYEKLGKIGGDSALNNYLSTHPSSKKRAQLLSQASVMNEALKLYREVSAGQGTEGFL

SEQ ID NO: 11390 - DNA, 1332 bp, Zea mays subsp. mays
  misc_feature (1)..(1332): Ceres Seq. ID no. 13498636
  misc_feature: MA Experiment ID: 108522 Result: Down-regulated in Transcription
  misc_feature: MA Experiment 108522 PARAMETER Experiment Name: Zm_42deg_Heat_P Parameter: Age (day) Value: 8
  misc_feature: MA Experiment 108522 PARAMETER Experiment Name: Zm_42deg_Heat_P Parameter: Organism Value: Zea mays
  misc_feature: MA Experiment 108522 PARAMETER Experiment Name: Zm_42deg_Heat_P Parameter: Plant Line Value: 35A19
  misc_feature: MA Experiment 108522 PARAMETER Experiment Name: Zm_42deg_Heat_P Parameter: Temperature (deg C) Value: 42 vs. 22
  misc_feature: MA Experiment 108522 PARAMETER Experiment Name: Zm_42deg_Heat_P Parameter: Timepoint (hr) Value: 1
  misc_feature: MA Experiment 108522 PARAMETER Experiment Name: Zm_42deg_Heat_P Parameter: Tissue Value: Aerial
  misc_feature: MA Experiment ID: 108529 Result: Up-regulated in Transcription
  misc_feature: MA Experiment 108529 PARAMETER Experiment Name: Zm_Imbibed_Seeds_P Parameter: Age (day) Value: 5 vs. 2
  misc_feature: MA Experiment 108529 PARAMETER Experiment Name: Zm_Imbibed_Seeds_P Parameter: Organism Value: Zea mays
  misc_feature: MA Experiment 108529 PARAMETER Experiment Name: Zm_Imbibed_Seeds_P Parameter: Plant Line Value: 35A19
  misc_feature: MA Experiment 108529 PARAMETER Experiment Name: Zm_Imbibed_Seeds_P Parameter: Tissue Value: Roots vs. Embryo
  misc_feature: MA Experiment ID: 108535 Result: Down-regulated in Transcription
  misc_feature: MA Experiment 108535 PARAMETER Experiment Name: Zm_Meristem_P Parameter: Age (day) Value: 8
  misc_feature: MA Experiment 108535 PARAMETER Experiment Name: Zm_Meristem_P Parameter: Organism Value: Zea mays
  misc_feature: MA Experiment 108535 PARAMETER Experiment Name: Zm_Meristem_P Parameter: Plant Line Value: 35A19
  misc_feature: MA Experiment 108535 PARAMETER Experiment Name: Zm_Meristem_P Parameter: Tissue Value: Root Meristem vs. Above Root Meristem
  misc_feature: MA Experiment ID: 108546 Result: Up-regulated in Transcription
  misc_feature: MA Experiment 108546 PARAMETER Experiment Name: Zm_Imbibed_Seeds_P Parameter: Age (day) Value: 3 vs. 2
  misc_feature: MA Experiment 108546 PARAMETER Experiment Name: Zm_Imbibed_Seeds_P Parameter: Organism Value: Zea mays
  misc_feature: MA Experiment 108546 PARAMETER Experiment Name: Zm_Imbibed_Seeds_P Parameter: Plant Line Value: 35A19
  misc_feature: MA Experiment 108546 PARAMETER Experiment Name: Zm_Imbibed_Seeds_P Parameter: Tissue Value: Roots vs. Embryo
  misc_feature: MA Experiment ID: 108599 Result: Down-regulated in Transcription
  misc_feature: MA Experiment 108599 PARAMETER Experiment Name: Zm_RT1_P Parameter: Age (day) Value: 11
  misc_feature: MA Experiment 108599 PARAMETER Experiment Name: Zm_RT1_P Parameter: Organism Value: Zea mays
  misc_feature: MA Experiment 108599 PARAMETER Experiment Name: Zm_RT1_P Parameter: Plant Line Value: rt1 mut vs. rt1 wt
  misc_feature: MA Experiment 108599 PARAMETER Experiment Name: Zm_RT1_P Parameter: Tissue Value: Roots
  misc_feature: MA Experiment ID: 20000535 Result: Down-regulated in Transcription
  misc_feature: MA Experiment 20000535 PARAMETER Experiment Name: Zm_Hybrid_Seed_Dev_P Parameter: DAP Value: 30 vs. 12
  misc_feature: MA Experiment 20000535 PARAMETER Experiment Name: Zm_Hybrid_Seed_Dev_P Parameter: Organism Value: Zea mays
  misc_feature: MA Experiment 20000535 PARAMETER Experiment Name: Zm_Hybrid_Seed_Dev_P Parameter: Plant Line Value: 35A19
  misc_feature: MA Experiment 20000535 PARAMETER Experiment Name: Zm_Hybrid_Seed_Dev_P Parameter: Tissue Value: Embryo vs. Unfert Floret
actacgtagctgcctgtgcctctttctggctccctgctgtctgcctggccggtgctcacagacacgcgcaagatggccggacgcacggaggaggctcgcaggagcggggagagggagacggtgtgcgtgacgggcgccggcgggtacatcgcctcatggctcgtcaagctcctcctctcccgcggctacgccgtgcacgccaccgtccgtgacccgcgtgatcccaagaacgcccacctggggcagctggaatgggccgcggagaatctccggctgttcaaggccgacgtgctcgacagcgacgcgctggctgccgcagtctccgggtgccggggggtcttccatgttgcctgtccggtgcccacggatagggttcttgatccggagtcagaagtactggctcctgctgtgcaaggtaccttaaacattcttcaggcttgctcagctaataatattcagaaggttgttgtggtttcgtctaccgccgctgttcatttcgacccaaattggcctccacatagacctaaagacgaggattgctggtcggacataaacttttgcaaaaagaacgaggactggtatatggttgccaaggttattgctgaaaagacagccctagaatacggagagagaaatggattaaatgttgttacagtttgccctactatggctttaggaccgctcttgcggcctatgctcaatgtcagccatgaattcctcatgtacattattaaaggaggtcctactatgatgaagaacattccatggcacatagttgatgtccgagatgtggttgatgctttgcttatggtatacaagaaagaggaatcgacagggagatacatctgtgcaccaaattgcatcagtgcaaaagatctggtgaacatgctgaagagggattatcctaattacaattatgtaaactgcgacaatgatatggtgcttaactctatagttacaccacttatgtcggagaaactgaagaatttgggctggaaaccaatgaagacactagaggaaacattattggatagtgttgaatgctataagaagatggggcttctaaaagatgctgagggatgcccttgtcgtcttcctcacctttttcatatggctatagaaaaatgaagaatactcaccattgcttcttgtgttacctaattactctttgaacattgttgggtatgtgttctaatcacacaccaataatgttgacattcaatgggttgtggttgatttgaaataaatgtttggtttcttatgtaatctatatggaacaaagtgcacctttcactttttttgtatggaagttgtcatgcatcttttttctcg

SEQ ID NO: 11391 - protein, 351 aa, Zea mays subsp. mays
  peptide (1)..(351): Ceres Seq. ID no. 13498637
  misc_feature (19)..(227): Pfam Name: NAD dependent epimerase/dehydratase family Pfam Description: NAD dependent epimerase/dehydratase family
  misc_feature (17)..(331): Homolog of NCBI NO: 15226134 NR Description: cinnamoyl-CoA reductase family [Arabidopsis
  misc_feature (14)..(334): Homolog of NCBI NO: 15223068 NR Description: cinnamoyl-CoA reductase family [Arabidopsis
  misc_feature (14)..(334): Homolog of NCBI NO: 6554472 NR Description: putative cinnamoyl-CoA reductase; 14056-15506
  misc_feature (13)..(331): Homolog of NCBI NO: 15226135 NR Description: cinnamoyl-CoA reductase family [Arabidopsis
  misc_feature (12)..(338): Homolog of NCBI NO: 9964087 NR Description: cinnamoyl CoA reductase [Lolium perenne]
  misc_feature (12)..(331): Homolog of NCBI NO: 25140432 NR Description: cinnamoyl CoA reductase [Hordeum vulgare]
  misc_feature (2)..(331): Homolog of NCBI NO: 3341511 NR Description: cinnamoyl-CoA reductase [Saccharum officinarum]
  misc_feature (2)..(331): Homolog of NCBI NO: 17978549 NR Description: cinnamoyl-CoA reductase [Lolium perenne]
  misc_feature (11)..(331): Homolog of NCBI NO: 3242328 NR Description: cinnamoyl-CoA reductase [Zea mays]
  misc_feature (11)..(331): Homolog of NCBI NO: 7431410 NR Description: cinnamoyl CoA reductase - maize
MAGRTEEARRSGERETVCVTGAGGYIASWLVKLLLSRGYAVHATVRDPRDPKNAHLGQLEWAAENLRLFKADVLDSDALAAAVSGCRGVFHVACPVPTDRVLDPESEVLAPAVQGTLNILQACSANNIQKVVVVSSTAAVHFDPNWPPHRPKDEDCWSDINFCKKNEDWYMVAKVIAEKTALEYGERNGLNVVTVCPTMALGPLLRPMLNVSHEFLMYIIKGGPTMMKNIPWHIVDVRDVVDALLMVYKKEESTGRYICAPNCISAKDLVNMLKRDYPNYNYVNCDNDMVLNSIVTPLMSEKLKNLGWKPMKTLEETLLDSVECYKKMGLLKDAEGCPCRLPHLFHMAIEK

SEQ ID NO: 11392 - protein, 181 aa, Zea mays subsp. mays
  peptide (1)..(181): Ceres Seq. ID no. 13498638
  misc_feature (1)..(57): Pfam Name: NAD dependent epimerase/dehydratase family Pfam Description: NAD dependent epimerase/dehydratase family
  misc_feature (1)..(161): Homolog of NCBI NO: 15226134 NR Description: cinnamoyl-CoA reductase family [Arabidopsis
  misc_feature (1)..(164): Homolog of NCBI NO: 15223068 NR Description: cinnamoyl-CoA reductase family [Arabidopsis
  misc_feature (1)..(164): Homolog of NCBI NO: 6554472 NR Description: putative cinnamoyl-CoA reductase; 14056-15506
  misc_feature (1)..(161): Homolog of NCBI NO: 15226135 NR Description: cinnamoyl-CoA reductase family [Arabidopsis
  misc_feature (1)..(168): Homolog of NCBI NO: 9964087 NR Description: cinnamoyl CoA reductase [Lolium perenne]
  misc_feature (1)..(161): Homolog of NCBI NO: 25140432 NR Description: cinnamoyl CoA reductase [Hordeum vulgare]
  misc_feature (1)..(161): Homolog of NCBI NO: 3341511 NR Description: cinnamoyl-CoA reductase [Saccharum officinarum]
  misc_feature (1)..(161): Homolog of NCBI NO: 17978549 NR Description: cinnamoyl-CoA reductase [Lolium perenne]
  misc_feature (1)..(161): Homolog of NCBI NO: 3242328 NR Description: cinnamoyl-CoA reductase [Zea mays]
  misc_feature (1)..(161): Homolog of NCBI NO: 7431410 NR Description: cinnamoyl CoA reductase - maize
MVAKVIAEKTALEYGERNGLNVVTVCPTMALGPLLRPMLNVSHEFLMYIIKGGPTMMKNIPWHIVDVRDVVDALLMVYKKEESTGRYICAPNCISAKDLVNMLKRDYPNYNYVNCDNDMVLNSIVTPLMSEKLKNLGWKPMKTLEETLLDSVECYKKMGLLKDAEGCPCRLPHLFHMAIEK

SEQ ID NO: 11393 - DNA, 1368 bp, Zea mays subsp. mays
  misc_feature (1)..(1368): Ceres Seq. ID no. 12373411
  misc_feature: MA Experiment ID: 108527 Result: Down-regulated in Transcription
  misc_feature: MA Experiment 108527 PARAMETER Experiment Name: Zm_5mM_NO_P Parameter: Age (day) Value: 8
  misc_feature: MA Experiment 108527 PARAMETER Experiment Name: Zm_5mM_NO_P Parameter: Organism Value: Zea mays
  misc_feature: MA Experiment 108527 PARAMETER Experiment Name: Zm_5mM_NO_P Parameter: Plant Line Value: 35A19
  misc_feature: MA Experiment 108527 PARAMETER Experiment Name: Zm_5mM_NO_P Parameter: Timepoint (hr) Value: 6
  misc_feature: MA Experiment 108527 PARAMETER Experiment Name: Zm_5mM_NO_P Parameter: Tissue Value: Aerial
  misc_feature: MA Experiment 108527 PARAMETER Experiment Name: Zm_5mM_NO_P Parameter: Treatment Value: 5mM NO vs. No Treatment
  misc_feature: MA Experiment ID: 20000492 Result: Up-regulated in Transcription
  misc_feature: MA Experiment 20000492 PARAMETER Experiment Name: Zm_Hybrid_Seed_Dev_P Parameter: DAP Value: 12
  misc_feature: MA Experiment 20000492 PARAMETER Experiment Name: Zm_Hybrid_Seed_Dev_P Parameter: Organism Value: Zea mays
  misc_feature: MA Experiment 20000492 PARAMETER Experiment Name: Zm_Hybrid_Seed_Dev_P Parameter: Plant Line Value: 35A19
  misc_feature: MA Experiment 20000492 PARAMETER Experiment Name: Zm_Hybrid_Seed_Dev_P Parameter: Tissue Value: Fert Kernel vs. Unfert Floret
atgtttgcaggatttgcaacccatttctctcctcgactcccacaacagggtccgtacgggaaagagagagaaggtgggagtggaatcgacaggggaaaaccaagcctgtgtttcagagacaactcaggcgacgcgatggcgatggcggcgctgcgacgcgaggggaggcgcctcctcctcgcccccaccgtccccaacccgtcttcggcggccgcttccgctgcggtgacgcgatcctccgccatgtcgcaaccggagatggctccacttggtgcacgttctatttcaactcaagttgtgaggaaccggatgaagagtatcaaaaacatccagaagatcacaaaggctatgaagatggttgcagcatcaaagcttcgggctgttcagacgaggactgaaaattcacgcggcttgtggcagtcgttcaccgcccttcttggggacgctcctagtgttgacgtcaagaagaatgtgattgtggccattacctctgataagggactctgtggtggtatcaattcaacctcggtgaaagttagcagggcccttcacaaactgacatctggtccagaaaaagaaagcaagtatgttatattaggagaaaaaggcaaagttcagctgttgcgtgactcgaagaacagcattgaaatgaccgcaagtgaactacagaagaaccctatcaactatacacagattgctgtgctcgcggatgacatattgaaaaatgtggaatatgatgctctaagggttattttcaacaagttccattctgtcatatcgtttaagcccacaatggtaacgatactgtcccctgaggttgcagaaaaagaagcagaagctggtgggaagatgggtgacctagattcttatgagattgaaggcggtgagacaaaagcagagatattgcaaaacctagctgagttccagttttcttgtgtcatgtacaatggtgccctagagaatgcatgcagtgagcttggagcccgtatgtctgccatggacagctctagcagaaatgctggcgatatgcttgatcgtctcacgcttacttacaacaggacacgccaagcatccatcaccacagagcttactgagattatatctggtgcatcagcccttgaaggataggtgaagagactatgtggacttttccctttttccccatttgcgttcctctcacatgaaggcttcttttcttccggaggctcagtttcaacccttctcgtttcacttttccttgataaacgtattcttatgctttattgcaataattaggccaacgacagtgatgatgccgtgcgcctttgcatattccaaaaagaatgttctacatctatggtgaatggctggttttcataaatggtgatg

SEQ ID NO: 11394 - protein, 375 aa, Zea mays subsp. mays
  peptide (1)..(375): Ceres Seq. ID no. 12373412
  misc_feature (98)..(231): Pfam Name: ATP synthase Pfam Description: ATP synthase
  misc_feature (46)..(375): Homolog of NCBI NO: 543867 NR Description: ATP synthase gamma chain, mitochondrial precursor
  misc_feature (232)..(375): Homolog of NCBI NO: 37532654 NR Description: putative ATP SYNTHASE GAMMA CHAIN, MITOCHONDRIAL
  misc_feature (98)..(231): Homolog of NCBI NO: 37532654 NR Description: putative ATP SYNTHASE GAMMA CHAIN, MITOCHONDRIAL
  misc_feature (46)..(374): Homolog of NCBI NO: 15227257 NR Description: mitochondrial F1-ATPase, gamma subunit protein id: At2g33040.1, supported by cDNA: 26812., supported by
  misc_feature (46)..(374): Homolog of NCBI NO: 22530902 NR Description: mitochondrial F1-ATPase, gamma subunit
  misc_feature (48)..(374): Homolog of NCBI NO: 7436158 NR Description: probable H+-transporting two-sector ATPase (EC
  misc_feature (212)..(375): Homolog of NCBI NO: 7436157 NR Description: probable H+-transporting two-sector ATPase (EC
  misc_feature (96)..(373): Homolog of NCBI NO: 11466530 NR Description: ATP synthase F1 subunit alpha [Reclinomonas
  misc_feature (70)..(374): Homolog of NCBI NO: 31224910 NR Description: ENSANGP00000010167 [Anopheles gambiae]
  misc_feature (78)..(373): Homolog of NCBI NO: 23490546 NR Description: ATP synthase F1, gamma subunit [Plasmodium yoelii
MFAGFATHFSPRLPQQGPYGKEREGGSGIDRGKPSLCFRDNSGDAMAMAALRREGRRLLLAPTVPNPSSAAASAAVTRSSAMSQPEMAPLGARSISTQVVRNRMKSIKNIQKITKAMKMVAASKLRAVQTRTENSRGLWQSFTALLGDAPSVDVKKNVIVAITSDKGLCGGINSTSVKVSRALHKLTSGPEKESKYVILGEKGKVQLLRDSKNSIEMTASELQKNPINYTQIAVLADDILKNVEYDALRVIFNKFHSVISFKPTMVTILSPEVAEKEAEAGGKMGDLDSYEIEGGETKAEILQNLAEFQFSCVMYNGALENACSELGARMSAMDSSSRNAGDMLDRLTLTYNRTRQASITTELTEIISGASALEG

SEQ ID NO: 11395 - protein, 330 aa, Zea mays subsp. mays
  peptide (1)..(330): Ceres Seq. ID no. 12373413
  misc_feature (53)..(186): Pfam Name: ATP synthase Pfam Description: ATP synthase
  misc_feature (1)..(330): Homolog of NCBI NO: 543867 NR Description: ATP synthase gamma chain, mitochondrial precursor
  misc_feature (187)..(330): Homolog of NCBI NO: 37532654 NR Description: putative ATP SYNTHASE GAMMA CHAIN, MITOCHONDRIAL
  misc_feature (53)..(186): Homolog of NCBI NO: 37532654 NR Description: putative ATP SYNTHASE GAMMA CHAIN, MITOCHONDRIAL
  misc_feature (1)..(329): Homolog of NCBI NO: 15227257 NR Description: mitochondrial F1-ATPase, gamma subunit protein id: At2g33040.1, supported by cDNA: 26812., supported by
  misc_feature (1)..(329): Homolog of NCBI NO: 22530902 NR Description: mitochondrial F1-ATPase, gamma subunit
  misc_feature (3)..(329): Homolog of NCBI NO: 7436158 NR Description: probable H+-transporting two-sector ATPase (EC
  misc_feature (167)..(330): Homolog of NCBI NO: 7436157 NR Description: probable H+-transporting two-sector ATPase (EC
  misc_feature (51)..(328): Homolog of NCBI NO: 11466530 NR Description: ATP synthase F1 subunit alpha [Reclinomonas
  misc_feature (25)..(329): Homolog of NCBI NO: 31224910 NR Description: ENSANGP00000010167 [Anopheles gambiae]
  misc_feature (33)..(328): Homolog of NCBI NO: 23490546 NR Description: ATP synthase F1, gamma subunit [Plasmodium yoelii
MAMAALRREGRRLLLAPTVPNPSSAAASAAVTRSSAMSQPEMAPLGARSISTQVVRNRMKSIKNIQKITKAMKMVAASKLRAVQTRTENSRGLWQSFTALLGDAPSVDVKKNVIVAITSDKGLCGGINSTSVKVSRALHKLTSGPEKESKYVILGEKGKVQLLRDSKNSIEMTASELQKNPINYTQIAVLADDILKNVEYDALRVIFNKFHSVISFKPTMVTILSPEVAEKEAEAGGKMGDLDSYEIEGGETKAEILQNLAEFQFSCVMYNGALENACSELGARMSAMDSSSRNAGDMLDRLTLTYNRTRQASITTELTEIISGASALEG

SEQ ID NO: 11396 - protein, 328 aa, Zea mays subsp. mays
  peptide (1)..(328): Ceres Seq. ID no. 12373414
  misc_feature (51)..(184): Pfam Name: ATP synthase Pfam Description: ATP synthase
  misc_feature (1)..(328): Homolog of NCBI NO: 543867 NR Description: ATP synthase gamma chain, mitochondrial precursor
  misc_feature (185)..(328): Homolog of NCBI NO: 37532654 NR Description: putative ATP SYNTHASE GAMMA CHAIN, MITOCHONDRIAL
  misc_feature (51)..(184): Homolog of NCBI NO: 37532654 NR Description: putative ATP SYNTHASE GAMMA CHAIN, MITOCHONDRIAL
  misc_feature (1)..(327): Homolog of NCBI NO: 15227257 NR Description: mitochondrial F1-ATPase, gamma subunit protein id: At2g33040.1, supported by cDNA: 26812., supported by
  misc_feature (1)..(327): Homolog of NCBI NO: 22530902 NR Description: mitochondrial F1-ATPase, gamma subunit
  misc_feature (1)..(327): Homolog of NCBI NO: 7436158 NR Description: probable H+-transporting two-sector ATPase (EC
  misc_feature (165)..(328): Homolog of NCBI NO: 7436157 NR Description: probable H+-transporting two-sector ATPase (EC
  misc_feature (49)..(326): Homolog of NCBI NO: 11466530 NR Description: ATP synthase F1 subunit alpha [Reclinomonas
  misc_feature (23)..(327): Homolog of NCBI NO: 31224910 NR Description: ENSANGP00000010167 [Anopheles gambiae]
  misc_feature (31)..(326): Homolog of NCBI NO: 23490546 NR Description: ATP synthase F1, gamma subunit [Plasmodium yoelii
MAALRREGRRLLLAPTVPNPSSAAASAAVTRSSAMSQPEMAPLGARSISTQVVRNRMKSIKNIQKITKAMKMVAASKLRAVQTRTENSRGLWQSFTALLGDAPSVDVKKNVIVAITSDKGLCGGINSTSVKVSRALHKLTSGPEKESKYVILGEKGKVQLLRDSKNSIEMTASELQKNPINYTQIAVLADDILKNVEYDALRVIFNKFHSVISFKPTMVTILSPEVAEKEAEAGGKMGDLDSYEIEGGETKAEILQNLAEFQFSCVMYNGALENACSELGARMSAMDSSSRNAGDMLDRLTLTYNRTRQASITTELTEIISGASALEG

SEQ ID NO: 11397 - DNA, 1638 bp, Zea mays subsp. mays
  misc_feature (1)..(1638): Ceres Seq. ID no. 12341014
  misc_feature: MA Experiment ID: 20000534 Result: Down-regulated in Transcription
  misc_feature: MA Experiment 20000534 PARAMETER Experiment Name: Zm_Hybrid_Pollen_P Parameter: Age (day) Value: 8
  misc_feature: MA Experiment 20000534 PARAMETER Experiment Name: Zm_Hybrid_Pollen_P Parameter: Organism Value: Zea mays
  misc_feature: MA Experiment 20000534 PARAMETER Experiment Name: Zm_Hybrid_Pollen_P Parameter: Plant Line Value: 35A19
  misc_feature: MA Experiment 20000534 PARAMETER Experiment Name: Zm_Hybrid_Pollen_P Parameter: Tissue Value: Pollen vs. Aerial
aacccagtgtgcgcacttcaccccccctctcggtctcaccctcctggcgacgactgggcggccgaccggccgtcgccgccgccccacgccaggtttcaaagtcttcgtcaggcccttctccggcgacttgagcaccacagggtgacaaggatagctttctcgggtcactgaaggaagacatcttctcgacgcgttagaccttctgacggttggctggttgtgctttaagtgttcaaggggtggattaggaccgggaaactctgtactgaagggaaggtcaaaagtgtcaagagagcttgttccaagatggatgaaggtcagggagttaggtattggtgccacatgtgtcaggaggtgatagatcccatgcccgagatgaagtgcccaggctgcgagggcgggtttgtggaggagatggactctgaagactttgagccagctgcgaacgcgaggtctgatcgctccgtctctctcttggctccactgctgcttggtatgatggggggttcgtcgcgcagatcaagactcaggagggaggccatggttgaagctgatgccgaccaggatgacgaagaggatgattcagatcatgagcttgaactttccaggaggaggcggaggaggaggcgctcatcagcgcttttcagtgtgcttgaggctatgcgtgaccgtgatgaagtaaggggctcggatgacaccgacagtgatacagagagagacctggagagagggagaagggagaggatggagaggcagagggagaggttaaggcagatcgagagggtgagtgctcgtggcagagagaggacggaaagcttaatactgatcaactccaacaacgaggctattattctgcagggaacattcggatctgatgacaaccaagaggactcaagcaacacaagttctggtgtatcacttggggattactttcttggtcctgccttagatactctcttgcagcgtttggcggagagtgacctcagtcgttctggcacaccgcctgccaagaaggaagcagtcgccgcgctaccaactgtgaacatcgaggaagcgttgggctgttcagtctgtcttgaggatttcgagatgggaggagaagcgaagcagatgccctgtcagcataagttccactcgcactgcatactcccgtggctggagctccacagctcttgcccaatctgccggtttcagttgcctactgaggagacgaagaacaacccatgcgaatcagccagcaccgcaggggccgtgaacggcgatggagacaacgctgctgcaagcggcagcgatacagaaagtactaaccacaatgaagatgaccattccgatagccctatcttctctgctctgagcacactcttctctgatccgttctcatccgacgatgatgaaagtgttccacactcttacgagaactgaagatagcgtcggacgcaggcttgcgatatggtgaagccgttctgaggctggcatctttatattgtagcttctgtacatatctctctgaacggtcgctcccccccataagacaaactattacctctccgttttactgaaaactatgtggcttgtaatctgctagtgcttgctatgttcacttgcctcgaataaatgttatcctttagcgtgcttatt

SEQ ID NO: 11398 - protein, 371 aa, Zea mays subsp. mays
  peptide (1)..(371): Ceres Seq. ID no. 12341015
  misc_feature (253)..(293): Pfam Name: Zinc finger, C3HC4 type (RING finger) Pfam Description: Zinc finger, C3HC4 type (RING finger)
  misc_feature (1)..(371): Homolog of NCBI NO: 32129334 NR Description: unknown protein [Oryza sativa (japonica
  misc_feature (1)..(371): Homolog of NCBI NO: 15241188 NR Description: putative protein; protein id: At5g56340.1, by cDNA: gi_17380897, supported by cDNA: gi_20259580 [Arabidopsis >gi|10177832|dbj|BAB11261.1| gene_id:MCD7.7~pir||T05064~similar
  misc_feature (97)..(366): Homolog of NCBI NO: 18405411 NR Description: expressed protein; protein id: At1g55530.1, by cDNA: gi_14517545, supported by cDNA: gi_15983407 [Arabidopsis
  misc_feature (8)..(371): Homolog of NCBI NO: 22328949 NR Description: putative protein; protein id: At4g26400.1, by cDNA: gi_20466681 [Arabidopsis thaliana] putative protein [Arabidopsis thaliana]
  misc_feature (17)..(371): Homolog of NCBI NO: 7486783 NR Description: hypothetical protein M3E9.170 - Arabidopsis >gi|2982466|emb|CAA18230.1| putative protein [Arabidopsis >gi|7269492|emb|CAB79495.1| putative protein [Arabidopsis
  misc_feature (114)..(336): Homolog of NCBI NO: 15231238 NR Description: unknown protein; protein id: At3g13430.1 thaliana] >gi|9280292|dbj|BAB01747.1| gene_id:MRP15.6~unknown
  misc_feature (114)..(336): Homolog of NCBI NO: 38454178 NR Description: At3g13430 [Arabidopsis thaliana]
  misc_feature (196)..(320): Homolog of NCBI NO: 34903272 NR Description: unnamed protein product [Oryza sativa (japonica group)] >gi|6539567|dbj|BAA88184.1| unnamed protein product
  misc_feature (187)..(330): Homolog of NCBI NO: 11994207 NR Description: gene_id:MPN9.20~unknown protein [Arabidopsis
  misc_feature (187)..(330): Homolog of NCBI NO: 15231003 NR Description: unknown protein; protein id: At3g19950.1, by cDNA: gi_20465262 [Arabidopsis thaliana] AT3g19950/MPN9_19 [Arabidopsis thaliana]
MDEGQGVRYWCHMCQEVIDPMPEMKCPGCEGGFVEEMDSEDFEPAANARSDRSVSLLAPLLLGMMGGSSRRSRLRREAMVEADADQDDEEDDSDHELELSRRRRRRRRSSALFSVLEAMRDRDEVRGSDDTDSDTERDLERGRRERMERQRERLRQIERVSARGRERTESLILINSNNEAIILQGTFGSDDNQEDSSNTSSGVSLGDYFLGPALDTLLQRLAESDLSRSGTPPAKKEAVAALPTVNIEEALGCSVCLEDFEMGGEAKQMPCQHKFHSHCILPWLELHSSCPICRFQLPTEETKNNPCESASTAGAVNGDGDNAAASGSDTESTNHNEDDHSDSPIFSALSTLFSDPFSSDDDESVPHSYEN

SEQ ID NO: 11399 - protein, 359 aa, Zea mays subsp. mays
  peptide (1)..(359): Ceres Seq. ID no. 12341016
  misc_feature (241)..(281): Pfam Name: Zinc finger, C3HC4 type (RING finger) Pfam Description: Zinc finger, C3HC4 type (RING finger)
  misc_feature (1)..(359): Homolog of NCBI NO: 32129334 NR Description: unknown protein [Oryza sativa (japonica
  misc_feature (1)..(359): Homolog of NCBI NO: 15241188 NR Description: putative protein; protein id: At5g56340.1, by cDNA: gi_17380897, supported by cDNA: gi_20259580 [Arabidopsis >gi|10177832|dbj|BAB11261.1| gene_id:MCD7.7~pir||T05064~similar
  misc_feature (85)..(354): Homolog of NCBI NO: 18405411 NR Description: expressed protein; protein id: At1g55530.1, by cDNA: gi_14517545, supported by cDNA: gi_15983407 [Arabidopsis
  misc_feature (1)..(359): Homolog of NCBI NO: 22328949 NR Description: putative protein; protein id: At4g26400.1, by cDNA: gi_20466681 [Arabidopsis thaliana] putative protein [Arabidopsis thaliana]
  misc_feature (5)..(359): Homolog of NCBI NO: 7486783 NR Description: hypothetical protein M3E9.170 - Arabidopsis >gi|2982466|emb|CAA18230.1| putative protein [Arabidopsis >gi|7269492|emb|CAB79495.1| putative protein [Arabidopsis
  misc_feature (102)..(324): Homolog of NCBI NO: 15231238 NR Description: unknown protein; protein id: At3g13430.1 thaliana] >gi|9280292|dbj|BAB01747.1| gene_id:MRP15.6~unknown
  misc_feature (102)..(324): Homolog of NCBI NO: 38454178 NR Description: At3g13430 [Arabidopsis thaliana]
  misc_feature (184)..(308): Homolog of NCBI NO: 34903272 NR Description: unnamed protein product [Oryza sativa (japonica group)] >gi|6539567|dbj|BAA88184.1| unnamed protein product
  misc_feature (175)..(318): Homolog of NCBI NO: 11994207 NR Description: gene_id:MPN9.20~unknown protein [Arabidopsis
  misc_feature (175)..(318): Homolog of NCBI NO: 15231003 NR Description: unknown protein; protein id: At3g19950.1, by cDNA: gi_20465262 [Arabidopsis thaliana] AT3g19950/MPN9_19 [Arabidopsis thaliana]
MCQEVIDPMPEMKCPGCEGGFVEEMDSEDFEPAANARSDRSVSLLAPLLLGMMGGSSRRSRLRREAMVEADADQDDEEDDSDHELELSRRRRRRRRSSALFSVLEAMRDRDEVRGSDDTDSDTERDLERGRRERMERQRERLRQIERVSARGRERTESLILINSNNEAIILQGTFGSDDNQEDSSNTSSGVSLGDYFLGPALDTLLQRLAESDLSRSGTPPAKKEAVAALPTVNIEEALGCSVCLEDFEMGGEAKQMPCQHKFHSHCILPWLELHSSCPICRFQLPTEETKNNPCESASTAGAVNGDGDNAAASGSDTESTNHNEDDHSDSPIFSALSTLFSDPFSSDDDESVPHSYEN

SEQ ID NO: 11400 - protein, 351 aa, Zea mays subsp. mays
  peptide (1)..(351): Ceres Seq. ID no. 12341017
  misc_feature (233)..(273): Pfam Name: Zinc finger, C3HC4 type (RING finger) Pfam Description: Zinc finger, C3HC4 type (RING finger)
  misc_feature (167)..(310): Homolog of NCBI NO: 15231003 NR Description: unknown protein; protein id: At3g19950.1, by cDNA: gi_20465262 [Arabidopsis thaliana] AT3g19950/MPN9_19 [Arabidopsis thaliana]
  misc_feature (1)..(351): Homolog of NCBI NO: 32129334 NR Description: unknown protein [Oryza sativa (japonica
  misc_feature (1)..(351): Homolog of NCBI NO: 15241188 NR Description: putative protein; protein id: At5g56340.1, by cDNA: gi_17380897, supported by cDNA: gi_20259580 [Arabidopsis >gi|10177832|dbj|BAB11261.1| gene_id:MCD7.7~pir||T05064~similar
  misc_feature (77)..(346): Homolog of NCBI NO: 18405411 NR Description: expressed protein; protein id: At1g55530.1, by cDNA: gi_14517545, supported by cDNA: gi_15983407 [Arabidopsis
  misc_feature (1)..(351): Homolog of NCBI NO: 22328949 NR Description: putative protein; protein id: At4g26400.1, by cDNA: gi_20466681 [Arabidopsis thaliana] putative protein [Arabidopsis thaliana]
  misc_feature (1)..(351): Homolog of NCBI NO: 7486783 NR Description: hypothetical protein M3E9.170 - Arabidopsis >gi|2982466|emb|CAA18230.1| putative protein [Arabidopsis >gi|7269492|emb|CAB79495.1| putative protein [Arabidopsis
  misc_feature (94)..(316): Homolog of NCBI NO: 15231238 NR Description: unknown protein; protein id: At3g13430.1 thaliana] >gi|9280292|dbj|BAB01747.1| gene_id:MRP15.6~unknown
  misc_feature (94)..(316): Homolog of NCBI NO: 38454178 NR Description: At3g13430 [Arabidopsis thaliana]
  misc_feature (176)..(300): Homolog of NCBI NO: 34903272 NR Description: unnamed protein product [Oryza sativa (japonica group)] >gi|6539567|dbj|BAA88184.1| unnamed protein product
  misc_feature (167)..(310): Homolog of NCBI NO: 11994207 NR Description: gene_id:MPN9.20~unknown protein [Arabidopsis
MPEMKCPGCEGGFVEEMDSEDFEPAANARSDRSVSLLAPLLLGMMGGSSRRSRLRREAMVEADADQDDEEDDSDHELELSRRRRRRRRSSALFSVLEAMRDRDEVRGSDDTDSDTERDLERGRRERMERQRERLRQIERVSARGRERTESLILINSNNEAIILQGTFGSDDNQEDSSNTSSGVSLGDYFLGPALDTLLQRLAESDLSRSGTPPAKKEAVAALPTVNIEEALGCSVCLEDFEMGGEAKQMPCQHKFHSHCILPWLELHSSCPICRFQLPTEETKNNPCESASTAGAVNGDGDNAAASGSDTESTNHNEDDHSDSPIFSALSTLFSDPFSSDDDESVPHSYEN

SEQ ID NO: 11401 - DNA, 1567 bp, Zea mays subsp. mays
  misc_feature (1)..(1567): Ceres Seq. ID no. 12341078
  misc_feature: MA Experiment ID: 108543 Result: Up-regulated in Transcription
  misc_feature: MA Experiment ID: 108687 Result: Down-regulated in Transcription
  misc_feature: MA Experiment 108687 PARAMETER Experiment Name: Zm_Embryos-Flowers__P Parameter: Tissue Value: Embryo vs. Aerial+
  misc_feature: MA Experiment ID: 108689 Result: Up-regulated in Transcription
  misc_feature: MA Experiment 108689 PARAMETER Experiment Name: Zm_Drought_Roots_P Parameter: Age (day) Value: 9
  misc_feature: MA Experiment 108689 PARAMETER Experiment Name: Zm_Drought_Roots_P Parameter: Organism Value: Zea mays
  misc_feature: MA Experiment 108689 PARAMETER Experiment Name: Zm_Drought_Roots_P Parameter: Plant Line Value: 35A19
  misc_feature: MA Experiment 108689 PARAMETER Experiment Name: Zm_Drought_Roots_P Parameter: Timepoint (hr) Value: 24
  misc_feature: MA Experiment 108689 PARAMETER Experiment Name: Zm_Drought_Roots_P Parameter: Tissue Value: Roots
  misc_feature: MA Experiment 108689 PARAMETER Experiment Name: Zm_Drought_Roots_P Parameter: Treatment Value: Drought vs. No Drought
  misc_feature: MA Experiment ID: 20000477 Result: Down-regulated in Transcription
  misc_feature: MA Experiment 20000477 PARAMETER Experiment Name: Zm_5mM_SA_P Parameter: Age (day) Value: 10
  misc_feature: MA Experiment 20000477 PARAMETER Experiment Name: Zm_5mM_SA_P Parameter: Organism Value: Zea mays
  misc_feature: MA Experiment 20000477 PARAMETER Experiment Name: Zm_5mM_SA_P Parameter: Plant Line Value: 35A19
  misc_feature: MA Experiment 20000477 PARAMETER Experiment Name: Zm_5mM_SA_P Parameter: Timepoint (hr) Value: 48
  misc_feature: MA Experiment 20000477 PARAMETER Experiment Name: Zm_5mM_SA_P Parameter: Tissue Value: Aerial
  misc_feature: MA Experiment 20000477 PARAMETER Experiment Name: Zm_5mM_SA_P Parameter: Treatment Value: 5mM SA vs. No Treatment
  misc_feature: MA Experiment ID: 20000478 Result: Down-regulated in Transcription
  misc_feature: MA Experiment 20000478 PARAMETER Experiment Name: Zm_5mM_SA_P Parameter: Age (day) Value: 11
  misc_feature: MA Experiment 20000478 PARAMETER Experiment Name: Zm_5mM_SA_P Parameter: Organism Value: Zea mays
  misc_feature: MA Experiment 20000478 PARAMETER Experiment Name: Zm_5mM_SA_P Parameter: Plant Line Value: 35A19
  misc_feature: MA Experiment 20000478 PARAMETER Experiment Name: Zm_5mM_SA_P Parameter: Timepoint (hr) Value: 72
  misc_feature: MA Experiment 20000478 PARAMETER Experiment Name: Zm_5mM_SA_P Parameter: Tissue Value: Aerial
  misc_feature: MA Experiment 20000478 PARAMETER Experiment Name: Zm_5mM_SA_P Parameter: Treatment Value: 5mM SA vs. No Treatment
  misc_feature: MA Experiment ID: 20000535 Result: Up-regulated in Transcription
  misc_feature: MA Experiment 20000535 PARAMETER Experiment Name: Zm_Hybrid_Seed_Dev_P Parameter: DAP Value: 30 vs. 12
  misc_feature: MA Experiment 20000535 PARAMETER Experiment Name: Zm_Hybrid_Seed_Dev_P Parameter: Organism Value: Zea mays
  misc_feature: MA Experiment 20000535 PARAMETER Experiment Name: Zm_Hybrid_Seed_Dev_P Parameter: Plant Line Value: 35A19
  misc_feature: MA Experiment 20000535 PARAMETER Experiment Name: Zm_Hybrid_Seed_Dev_P Parameter: Tissue Value: Embryo vs. Unfert Floret
gaccctttctttcccaaagccgagcagcgaccagcgagggtgccactgccaccgcccgccccccagtcccccactcactcactagctagcttgctagctgcgcactacgggctacgccgagctagagtccggcgatcacagcccggcaggccggccatggccaccgcgcccgtcgtcgtcctagtcctgcacgttctgctaggcgctgcagcggccgcctgcgccgcggcggcagggagtagcagcaaggtgccggcgatgtacgtgttcggcgactccacggcggacgtgggcaccaacaactacttgccgggcggcgccgaagtgccgcgtgccaacttcccccacaacggcgtcgacttccccacggcgcgccccaccggcaggttcagcaacgggttcaacggcgtcgacttcttggccgtgaacatgggcttcaagcgcagccccccgccgttcctcgccgtggccaacaagaccaacaggcaggtcttccgaggtctcctgggagtgaacttcgcctctgcaggatcaggcatcctcgacacgacggggagctccatcatcccgctgagcaagcaggtggagcagttcgccgccgtgcggcgcaacatctcgtcgcgcgtcggcaacgggtctgctgctgccgacgccctgctgtcgcggtccctgttcctcgtcagcaccggcggcaacgacctgttcgccttcttcgcgcggaacagcacgccgtcggacgccgacaagcggcggttcgtcgccaacctcgtcacgctgtaccagaaccatgtgaaggctctgtacgtgctcggggctcggaagttcgccgtgatcgacgtcccgccggtcgggtgctgcccctacccgaggagcctgcacccgctgggcgcctgcatcgacgtgctcaacgagctggcgcgcgggttcaacgagggcgtcagggcggccatgcacggcctcggcgtgagcttccaggggctcaggtactccgtcgggagctcccacgccgtcgtgcagagcatcatgaagcaccctcaaaggctggggttcaaggacgtgacgaacgcgtgctgcgggtcgggccggttcaacggcaagtccgggtgcacgcccaacgcgacgctgtgcgacaaccgacaccagtacctgttctgggacctgctgcaccccacgcacgccgcctccaagatcgccgccgccgccatctacaacggctcgctccacttcgccgcgccgatgaacttcaggcagctggccgaagacgaccggtgctagctagctagcacagctagagctagcacgaggacgtagggacgtgtctctgttctctgctgcggactgtggtgaatatggtcgttggtgtgtagaggacgacggatgcgtgcatggctgctgtgttcgctgtatgtttctcgaccgtggtttggtttagatgatgatgaccgacgccgccggcgtagtttggactgtgaacgaatttacatcatgctgctgcagaggtacgggtgtaccgtgtacgtgacatcgtctacacctctcctggacaactttaactgaatcttttttt

SEQ ID NO: 11402 - protein, 424 aa, Zea mays subsp. mays
  peptide (1)..(424): Ceres Seq. ID no. 12341079
  misc_feature (87)..(396): Pfam Name: GDSL-like Lipase/Acylhydrolase Pfam Description: GDSL-like Lipase/Acylhydrolase
  misc_feature (49)..(419): Homolog of NCBI NO: 29837765 NR Description: putative GDSL-like lipase/acylhydrolase [Oryza
  misc_feature (84)..(420): Homolog of NCBI NO: 38345853 NR Description: OSJNBa0084K11.17 [Oryza sativa (japonica
  misc_feature (58)..(418): Homolog of NCBI NO: 15240452 NR Description: GDSL-motif lipase/hydrolase-like protein; protein At5g55050.1, supported by cDNA: gi_18175651 [Arabidopsis
  misc_feature (66)..(423): Homolog of NCBI NO: 32489520 NR Description: OSJNBa0043L24.11 [Oryza sativa (japonica
  misc_feature (73)..(420): Homolog of NCBI NO: 34909504 NR Description: putative GDSL-motif lipase/hydrolase-like protein
  misc_feature (80)..(418): Homolog of NCBI NO: 38345537 NR Description: OSJNBa0020J04.12 [Oryza sativa (japonica
  misc_feature (58)..(420): Homolog of NCBI NO: 15229742 NR Description: putative protein; protein id: At3g50400.1 thaliana] >gi|7630026|emb|CAB88323.1| putative protein thaliana] >gi|26450386|dbj|BAC42308.1| unknown protein
  misc_feature (60)..(418): Homolog of NCBI NO: 15224005 NR Description: putative GDSL-motif lipase/acylhydrolase; protein At1g71250.1 [Arabidopsis thaliana] >gi|25336259|pir||B96737
  misc_feature (71)..(424): Homolog of NCBI NO: 22758315 NR Description: putative early nodulin gene (Enod) related
  misc_feature (71)..(424): Homolog of NCBI NO: 37535146 NR Description: putative early nodulin gene (Enod) related
DPFFPKAEQRPARVPLPPPAPQSPTHSLASLLAAHYGLRRARVRRSQPGRPAMATAPVVVLVLHVLLGAAAAACAAAAGSSSKVPAMYVFGDSTADVGTNNYLPGGAEVPRANFPHNGVDFPTARPTGRFSNGFNGVDFLAVNMGFKRSPPPFLAVANKTNRQVFRGLLGVNFASAGSGILDTTGSSIIPLSKQVEQFAAVRRNISSRVGNGSAAADALLSRSLFLVSTGGNDLFAFFARNSTPSDADKRRFVANLVTLYQNHVKALYVLGARKFAVIDVPPVGCCPYPRSLHPLGACIDVLNELARGFNEGVRAAMHGLGVSFQGLRYSVGSSHAVVQSIMKHPQRLGFKDVTNACCGSGRFNGKSGCTPNATLCDNRHQYLFWDLLHPTHAASKIAAAAIYNGSLHFAAPMNFRQLAEDDRC

SEQ ID NO: 11403 - protein, 372 aa, Zea mays subsp. mays
  peptide (1)..(372): Ceres Seq. ID no. 12341080
  misc_feature (35)..(344): Pfam Name: GDSL-like Lipase/Acylhydrolase Pfam Description: GDSL-like Lipase/Acylhydrolase
  misc_feature (1)..(367): Homolog of NCBI NO: 29837765 NR Description: putative GDSL-like lipase/acylhydrolase [Oryza
  misc_feature (32)..(368): Homolog of NCBI NO: 38345853 NR Description: OSJNBa0084K11.17 [Oryza sativa (japonica
  misc_feature (6)..(366): Homolog of NCBI NO: 15240452 NR Description: GDSL-motif lipase/hydrolase-like protein; protein At5g55050.1, supported by cDNA: gi_18175651 [Arabidopsis
  misc_feature (14)..(371): Homolog of NCBI NO: 32489520 NR Description: OSJNBa0043L24.11 [Oryza sativa (japonica
  misc_feature (21)..(368): Homolog of NCBI NO: 34909504 NR Description: putative GDSL-motif lipase/hydrolase-like protein
  misc_feature (28)..(366): Homolog of NCBI NO: 38345537 NR Description: OSJNBa0020J04.12 [Oryza sativa (japonica
  misc_feature (6)..(368): Homolog of NCBI NO: 15229742 NR Description: putative protein; protein id: At3g50400.1 thaliana] >gi|7630026|emb|CAB88323.1| putative protein thaliana] >gi|26450386|dbj|BAC42308.1| unknown protein
  misc_feature (8)..(366): Homolog of NCBI NO: 15224005 NR Description: putative GDSL-motif lipase/acylhydrolase; protein At1g71250.1 [Arabidopsis thaliana] >gi|25336259|pir||B96737
  misc_feature (19)..(372): Homolog of NCBI NO: 22758315 NR Description: putative early nodulin gene (Enod) related
  misc_feature (19)..(372): Homolog of NCBI NO: 37535146 NR Description: putative early nodulin gene (Enod) related
MATAPVVVLVLHVLLGAAAAACAAAAGSSSKVPAMYVFGDSTADVGTNNYLPGGAEVPRANFPHNGVDFPTARPTGRFSNGFNGVDFLAVNMGFKRSPPPFLAVANKTNRQVFRGLLGVNFASAGSGILDTTGSSIIPLSKQVEQFAAVRRNISSRVGNGSAAADALLSRSLFLVSTGGNDLFAFFARNSTPSDADKRRFVANLVTLYQNHVKALYVLGARKFAVIDVPPVGCCPYPRSLHPLGACIDVLNELARGFNEGVRAAMHGLGVSFQGLRYSVGSSHAVVQSIMKHPQRLGFKDVTNACCGSGRFNGKSGCTPNATLCDNRHQYLFWDLLHPTHAASKIAAAAIYNGSLHFAAPMNFRQLAEDDRC

SEQ ID NO: 11404 - protein, 338 aa, Zea mays subsp. mays
  peptide (1)..(338): Ceres Seq. ID no. 12341081
  misc_feature (1)..(310): Pfam Name: GDSL-like Lipase/Acylhydrolase Pfam Description: GDSL-like Lipase/Acylhydrolase
  misc_feature (1)..(333): Homolog of NCBI NO: 29837765 NR Description: putative GDSL-like lipase/acylhydrolase [Oryza
  misc_feature (1)..(334): Homolog of NCBI NO: 38345853 NR Description: OSJNBa0084K11.17 [Oryza sativa (japonica
  misc_feature (1)..(332): Homolog of NCBI NO: 15240452 NR Description: GDSL-motif lipase/hydrolase-like protein; protein At5g55050.1, supported by cDNA: gi_18175651 [Arabidopsis
  misc_feature (1)..(337): Homolog of NCBI NO: 32489520 NR Description: OSJNBa0043L24.11 [Oryza sativa (japonica
  misc_feature (1)..(334): Homolog of NCBI NO: 34909504 NR Description: putative GDSL-motif lipase/hydrolase-like protein
  misc_feature (1)..(332): Homolog of NCBI NO: 38345537 NR Description: OSJNBa0020J04.12 [Oryza sativa (japonica
  misc_feature (1)..(334): Homolog of NCBI NO: 15229742 NR Description: putative protein; protein id: At3g50400.1 thaliana] >gi|7630026|emb|CAB88323.1| putative protein thaliana] >gi|26450386|dbj|BAC42308.1| unknown protein
  misc_feature (1)..(332): Homolog of NCBI NO: 15224005 NR Description: putative GDSL-motif lipase/acylhydrolase; protein At1g71250.1 [Arabidopsis thaliana] >gi|25336259|pir||B96737
  misc_feature (1)..(338): Homolog of NCBI NO: 22758315 NR Description: putative early nodulin gene (Enod) related
  misc_feature (1)..(338): Homolog of NCBI NO: 37535146 NR Description: putative early nodulin gene (Enod) related
MYVFGDSTADVGTNNYLPGGAEVPRANFPHNGVDFPTARPTGRFSNGFNGVDFLAVNMGFKRSPPPFLAVANKTNRQVFRGLLGVNFASAGSGILDTTGSSIIPLSKQVEQFAAVRRNISSRVGNGSAAADALLSRSLFLVSTGGNDLFAFFARNSTPSDADKRRFVANLVTLYQNHVKALYVLGARKFAVIDVPPVGCCPYPRSLHPLGACIDVLNELARGFNEGVRAAMHGLGVSFQGLRYSVGSSHAVVQSIMKHPQRLGFKDVTNACCGSGRFNGKSGCTPNATLCDNRHQYLFWDLLHPTHAASKIAAAAIYNGSLHFAAPMNFRQLAEDDRC

SEQ ID NO: 11405 - DNA, 1336 bp, Zea mays subsp. mays
  misc_feature (1)..(1336): Ceres Seq. ID no. 12411856
  misc_feature: MA Experiment ID: 108543 Result: Up-regulated in Transcription
  misc_feature: MA Experiment ID: 108544 Result: Up-regulated in Transcription
  misc_feature: MA Experiment ID: 20000535 Result: Down-regulated in Transcription
  misc_feature: MA Experiment 20000535 PARAMETER Experiment Name: Zm_Hybrid_Seed_Dev_P Parameter: DAP Value: 30 vs. 12
  misc_feature: MA Experiment 20000535 PARAMETER Experiment Name: Zm_Hybrid_Seed_Dev_P Parameter: Organism Value: Zea mays
  misc_feature: MA Experiment 20000535 PARAMETER Experiment Name: Zm_Hybrid_Seed_Dev_P Parameter: Plant Line Value: 35A19
  misc_feature: MA Experiment 20000535 PARAMETER Experiment Name: Zm_Hybrid_Seed_Dev_P Parameter: Tissue Value: Embryo vs. Unfert Floret
agttggccacatgccttgccttgcctttgcctacctgttgatcgagccgagcgagcagggagagacacggcaccgagtgaggccgccgcatcctcctcctctccgatccttagtccagtccgcctgctgcctgcctcaacggatcgacgcgacaggagggagggaggaaggagacggtcgatcagagtctgagacggaggccgatccaccaccgcagcgacgagcgggaggagatgaagatcatcattgacacggatcccggcatcgatgacagcgtggccatcctgatggcattccagatgccgggcgtccaggtcctagggctcaccaccatcttcggaaactgcaccacagagcatgccacacgcaacgccttgatcctgtgcgagaaggcaagccatctagaggtcccagtagctgagggcagccatgagcctctcaagggaggaaagccgcacgttgctgacttcgttcatggacctgatggcctcgggaacgtagatcttcctgatcccactatcaagaaagtggaggaaagtgctaccgacttcttggttgataaggtctcgcgatttcctggagaggtctctgtgctcgccttgggtcctctgacaaacatagcattggccatcaagaaggatccctcattcgtgaaaaacgttaagaagatcgttgtgctgggtggagcgttctttgcggctggaaatgccactccttccgctgaagcaaatatccacagtgatccggaggcagccgacatggttttcacttctggggcggacatctacgtcgttggcctcaacatcacaacgcaagtcagcttcacagataaggatctcctggagctaagaaactcgcaagggaagtacgcacagttcctatgtgatgtatgcaagttctacttggactggcacaccgagtcttatggtgctcctgtgattttcctccacgatccggtcagctttgccgcgctagttcgtccggagctgttcacgttcaagaagggcgtggtgagggtggagacgcagggcatctgcgtcgggcatacttccatggacatgttgctgaagaagtggaactcagagaacccgtggactggctactcaccgatttcggtcgcatggacggtcgatgtgcccaaggtggtcgcgtttgtgaaggagctcgtcaccaagccgtgaaccaagttaactaacgtgttgtggtctcgcgcaccagatgtgcagcaaatttgagatgtcgatatatttactcacattcgaagcactgcaaacactattatctcaatagttggttcctgtggaggattgcaaatcaatttgagatgttttaaatt

SEQ ID NO: 11406 - protein, 315 aa, Zea mays subsp. mays
  peptide (1)..(315): Ceres Seq. ID no. 12411857
  misc_feature (2)..(309): Pfam Name: Inosine-uridine preferring nucleoside hydrolase Pfam Description: Inosine-uridine preferring nucleoside hydrolase
  misc_feature (2)..(315): Homolog of NCBI NO: 18404099 NR Description: expressed protein; protein id: At2g36310.1, by cDNA: 2576., supported by cDNA: gi_15809829, supported by gi_17978870 [Arabidopsis thaliana] >gi|15809830|gb|AAL06843.1|
  misc_feature (15)..(259): Homolog of NCBI NO: 25321061 NR Description: hypothetical protein At2g36310 [imported] -
  misc_feature (236)..(281): Homolog of NCBI NO: 25321061 NR Description: hypothetical protein At2g36310 [imported] -
  misc_feature (2)..(313): Homolog of NCBI NO: 30089728 NR Description: putative inosine-uridine preferring nucleoside
  misc_feature (1)..(310): Homolog of NCBI NO: 18390550 NR Description: expressed protein; protein id: At1g05620.1, by cDNA: 39571. [Arabidopsis thaliana] unknown [Arabidopsis thaliana] >gi|25083300|gb|AAN72060.1|
  misc_feature (1)..(219): Homolog of NCBI NO: 25321071 NR Description: hypothetical protein [imported] - Arabidopsis >gi|4836912|gb|AAD30614.1|AC007153_6 Hypothetical protein
  misc_feature (199)..(310): Homolog of NCBI NO: 25321071 NR Description: hypothetical protein [imported] - Arabidopsis >gi|4836912|gb|AAD30614.1|AC007153_6 Hypothetical protein
  misc_feature (1)..(314): Homolog of NCBI NO: 15888904 NR Description: AGR_C_2923p [Agrobacterium tumefaciens]
  misc_feature (2)..(308): Homolog of NCBI NO: 15966659 NR Description: PUTATIVE NUCLEOSIDE HYDROLASE PROTEIN meliloti] >gi|15075931|emb|CAC47485.1| PUTATIVE NUCLEOSIDE
  misc_feature (1)..(314): Homolog of NCBI NO: 17935486 NR Description: inosine-uridine preferring nucleoside hydrolase
MKIIIDTDPGIDDSVAILMAFQMPGVQVLGLTTIFGNCTTEHATRNALILCEKASHLEVPVAEGSHEPLKGGKPHVADFVHGPDGLGNVDLPDPTIKKVEESATDFLVDKVSRFPGEVSVLALGPLTNIALAIKKDPSFVKNVKKIVVLGGAFFAAGNATPSAEANIHSDPEAADMVFTSGADIYVVGLNITTQVSFTDKDLLELRNSQGKYAQFLCDVCKFYLDWHTESYGAPVIFLHDPVSFAALVRPELFTFKKGVVRVETQGICVGHTSMDMLLKKWNSENPWTGYSPISVAWTVDVPKVVAFVKELVTKP

SEQ ID NO: 11407 - protein, 297 aa, Zea mays subsp. mays
  peptide (1)..(297): Ceres Seq. ID no. 12411858
  misc_feature (1)..(291): Pfam Name: Inosine-uridine preferring nucleoside hydrolase Pfam Description: Inosine-uridine preferring nucleoside hydrolase
  misc_feature (1)..(297): Homolog of NCBI NO: 18404099 NR Description: expressed protein; protein id: At2g36310.1, by cDNA: 2576., supported by cDNA: gi_15809829, supported by gi_17978870 [Arabidopsis thaliana] >gi|15809830|gb|AAL06843.1|
  misc_feature (1)..(241): Homolog of NCBI NO: 25321061 NR Description: hypothetical protein At2g36310 [imported] -
  misc_feature (218)..(263): Homolog of NCBI NO: 25321061 NR Description: hypothetical protein At2g36310 [imported] -
  misc_feature (1)..(295): Homolog of NCBI NO: 30089728 NR Description: putative inosine-uridine preferring nucleoside
  misc_feature (1)..(292): Homolog of NCBI NO: 18390550 NR Description: expressed protein; protein id: At1g05620.1, by cDNA: 39571. [Arabidopsis thaliana] unknown [Arabidopsis thaliana] >gi|25083300|gb|AAN72060.1|
  misc_feature (1)..(201): Homolog of NCBI NO: 25321071 NR Description: hypothetical protein [imported] - Arabidopsis >gi|4836912|gb|AAD30614.1|AC007153_6 Hypothetical protein
  misc_feature (181)..(292): Homolog of NCBI NO: 25321071 NR Description: hypothetical protein [imported] - Arabidopsis >gi|4836912|gb|AAD30614.1|AC007153_6 Hypothetical protein
  misc_feature (1)..(296): Homolog of NCBI NO: 15888904 NR Description: AGR_C_2923p [Agrobacterium tumefaciens]
  misc_feature (1)..(290): Homolog of NCBI NO: 15966659 NR Description: PUTATIVE NUCLEOSIDE HYDROLASE PROTEIN meliloti] >gi|15075931|emb|CAC47485.1| PUTATIVE NUCLEOSIDE
  misc_feature (1)..(296): Homolog of NCBI NO: 17935486 NR Description: inosine-uridine preferring nucleoside hydrolase
MAFQMPGVQVLGLTTIFGNCTTEHATRNALILCEKASHLEVPVAEGSHEPLKGGKPHVADFVHGPDGLGNVDLPDPTIKKVEESATDFLVDKVSRFPGEVSVLALGPLTNIALAIKKDPSFVKNVKKIVVLGGAFFAAGNATPSAEANIHSDPEAADMVFTSGADIYVVGLNITTQVSFTDKDLLELRNSQGKYAQFLCDVCKFYLDWHTESYGAPVIFLHDPVSFAALVRPELFTFKKGVVRVETQGICVGHTSMDMLLKKWNSENPWTGYSPISVAWTVDVPKVVAFVKELVTKP

SEQ ID NO: 11408 - protein, 293 aa, Zea mays subsp. mays
  peptide (1)..(293): Ceres Seq. ID no. 12411859
  misc_feature (1)..(287): Pfam Name: Inosine-uridine preferring nucleoside hydrolase Pfam Description: Inosine-uridine preferring nucleoside hydrolase
  misc_feature (1)..(293): Homolog of NCBI NO: 18404099 NR Description: expressed protein; protein id: At2g36310.1, by cDNA: 2576., supported by cDNA: gi_15809829, supported by gi_17978870 [Arabidopsis thaliana] >gi|15809830|gb|AAL06843.1|
  misc_feature (1)..(237): Homolog of NCBI NO: 25321061 NR Description: hypothetical protein At2g36310 [imported] -
  misc_feature (214)..(259): Homolog of NCBI NO: 25321061 NR Description: hypothetical protein At2g36310 [imported] -
  misc_feature (1)..(291): Homolog of NCBI NO: 30089728 NR Description: putative inosine-uridine preferring nucleoside
  misc_feature (1)..(288): Homolog of NCBI NO: 18390550 NR Description: expressed protein; protein id: At1g05620.1, by cDNA: 39571. [Arabidopsis thaliana] unknown [Arabidopsis thaliana] >gi|25083300|gb|AAN72060.1|
  misc_feature (1)..(197): Homolog of NCBI NO: 25321071 NR Description: hypothetical protein [imported] - Arabidopsis >gi|4836912|gb|AAD30614.1|AC007153_6 Hypothetical protein
  misc_feature (177)..(288): Homolog of NCBI NO: 25321071 NR Description: hypothetical protein [imported] - Arabidopsis >gi|4836912|gb|AAD30614.1|AC007153_6 Hypothetical protein
  misc_feature (1)..(292): Homolog of NCBI NO: 15888904 NR Description: AGR_C_2923p [Agrobacterium tumefaciens]
  misc_feature (1)..(286): Homolog of NCBI NO: 15966659 NR Description: PUTATIVE NUCLEOSIDE HYDROLASE PROTEIN meliloti] >gi|15075931|emb|CAC47485.1| PUTATIVE NUCLEOSIDE
  misc_feature (1)..(292): Homolog of NCBI NO: 17935486 NR Description: inosine-uridine preferring nucleoside hydrolase
MPGVQVLGLTTIFGNCTTEHATRNALILCEKASHLEVPVAEGSHEPLKGGKPHVADFVHGPDGLGNVDLPDPTIKKVEESATDFLVDKVSRFPGEVSVLALGPLTNIALAIKKDPSFVKNVKKIVVLGGAFFAAGNATPSAEANIHSDPEAADMVFTSGADIYVVGLNITTQVSFTDKDLLELRNSQGKYAQFLCDVCKFYLDWHTESYGAPVIFLHDPVSFAALVRPELFTFKKGVVRVETQGICVGHTSMDMLLKKWNSENPWTGYSPISVAWTVDVPKVVAFVKELVTKP

SEQ ID NO: 11409 - DNA, 1549 bp, Zea mays subsp. mays; identical to SEQ ID NO: 4380
  misc_feature (1)..(1549): Ceres Seq. ID no. 12345645
  misc_feature: MA Experiment ID: 108535 Result: Up-regulated in Transcription
  misc_feature: MA Experiment 108535 PARAMETER Experiment Name: Zm_Meristem_P Parameter: Age (day) Value: 8
  misc_feature: MA Experiment 108535 PARAMETER Experiment Name: Zm_Meristem_P Parameter: Organism Value: Zea mays
  misc_feature: MA Experiment 108535 PARAMETER Experiment Name: Zm_Meristem_P Parameter: Plant Line Value: 35A19
  misc_feature: MA Experiment 108535 PARAMETER Experiment Name: Zm_Meristem_P Parameter: Tissue Value: Root Meristem vs. Above Root Meristem
  misc_feature: MA Experiment ID: 108543 Result: Up-regulated in Transcription
  misc_feature: MA Experiment ID: 108556 Result: Down-regulated in Transcription
  misc_feature: MA Experiment 108556 PARAMETER Experiment Name: Zm_Drought_P Parameter: Age (day) Value: 9
  misc_feature: MA Experiment 108556 PARAMETER Experiment Name: Zm_Drought_P Parameter: Organism Value: Zea mays
  misc_feature: MA Experiment 108556 PARAMETER Experiment Name: Zm_Drought_P Parameter: Plant Line Value: 35A19
  misc_feature: MA Experiment 108556 PARAMETER Experiment Name: Zm_Drought_P Parameter: Timepoint (hr) Value: 24
  misc_feature: MA Experiment 108556 PARAMETER Experiment Name: Zm_Drought_P Parameter: Tissue Value: Aerial
  misc_feature: MA Experiment 108556 PARAMETER Experiment Name: Zm_Drought_P Parameter: Treatment Value: Drought vs. No Drought
  misc_feature: MA Experiment ID: 108559 Result: Down-regulated in Transcription
  misc_feature: MA Experiment 108559 PARAMETER Experiment Name: Zm_5mM_NO_P Parameter: Age (day) Value: 8
  misc_feature: MA Experiment 108559 PARAMETER Experiment Name: Zm_5mM_NO_P Parameter: Organism Value: Zea mays
  misc_feature: MA Experiment 108559 PARAMETER Experiment Name: Zm_5mM_NO_P Parameter: Plant Line Value: 35A19
  misc_feature: MA Experiment 108559 PARAMETER Experiment Name: Zm_5mM_NO_P Parameter: Timepoint (hr) Value: 12
  misc_feature: MA Experiment 108559 PARAMETER Experiment Name: Zm_5mM_NO_P Parameter: Tissue Value: Aerial
  misc_feature: MA Experiment 108559 PARAMETER Experiment Name: Zm_5mM_NO_P Parameter: Treatment Value: 5mM NO vs. No Treatment
  misc_feature: MA Experiment ID: 108689 Result: Up-regulated in Transcription
  misc_feature: MA Experiment 108689 PARAMETER Experiment Name: Zm_Drought_Roots_P Parameter: Age (day) Value: 9
  misc_feature: MA Experiment 108689 PARAMETER Experiment Name: Zm_Drought_Roots_P Parameter: Organism Value: Zea mays
  misc_feature: MA Experiment 108689 PARAMETER Experiment Name: Zm_Drought_Roots_P Parameter: Plant Line Value: 35A19
  misc_feature: MA Experiment 108689 PARAMETER Experiment Name: Zm_Drought_Roots_P Parameter: Timepoint (hr) Value: 24
  misc_feature: MA Experiment 108689 PARAMETER Experiment Name: Zm_Drought_Roots_P Parameter: Tissue Value: Roots
  misc_feature: MA Experiment 108689 PARAMETER Experiment Name: Zm_Drought_Roots_P Parameter: Treatment Value: Drought vs. No Drought
  misc_feature: MA Experiment ID: 20000477 Result: Down-regulated in Transcription
  misc_feature: MA Experiment 20000477 PARAMETER Experiment Name: Zm_5mM_SA_P Parameter: Age (day) Value: 10
  misc_feature: MA Experiment 20000477 PARAMETER Experiment Name: Zm_5mM_SA_P Parameter: Organism Value: Zea mays
  misc_feature: MA Experiment 20000477 PARAMETER Experiment Name: Zm_5mM_SA_P Parameter: Plant Line Value: 35A19
  misc_feature: MA Experiment 20000477 PARAMETER Experiment Name: Zm_5mM_SA_P Parameter: Timepoint (hr) Value: 48
  misc_feature: MA Experiment 20000477 PARAMETER Experiment Name: Zm_5mM_SA_P Parameter: Tissue Value: Aerial
  misc_feature: MA Experiment 20000477 PARAMETER Experiment Name: Zm_5mM_SA_P Parameter: Treatment Value: 5mM SA vs. No Treatment
  misc_feature: MA Experiment ID: 20000478 Result: Down-regulated in Transcription
  misc_feature: MA Experiment 20000478 PARAMETER Experiment Name: Zm_5mM_SA_P Parameter: Age (day) Value: 11
  misc_feature: MA Experiment 20000478 PARAMETER Experiment Name: Zm_5mM_SA_P Parameter: Organism Value: Zea mays
  misc_feature: MA Experiment 20000478 PARAMETER Experiment Name: Zm_5mM_SA_P Parameter: Plant Line Value: 35A19
  misc_feature: MA Experiment 20000478 PARAMETER Experiment Name: Zm_5mM_SA_P Parameter: Timepoint (hr) Value: 72
  misc_feature: MA Experiment 20000478 PARAMETER Experiment Name: Zm_5mM_SA_P Parameter: Tissue Value: Aerial
  misc_feature: MA Experiment 20000478 PARAMETER Experiment Name: Zm_5mM_SA_P Parameter: Treatment Value: 5mM SA vs. No Treatment
  misc_feature: MA Experiment ID: 20000479 Result: Down-regulated in Transcription
  misc_feature: MA Experiment 20000479 PARAMETER Experiment Name: Zm_Drought_P Parameter: Age (day) Value: 10
  misc_feature: MA Experiment 20000479 PARAMETER Experiment Name: Zm_Drought_P Parameter: Organism Value: Zea mays
  misc_feature: MA Experiment 20000479 PARAMETER Experiment Name: Zm_Drought_P Parameter: Plant Line Value: 35A19
  misc_feature: MA Experiment 20000479 PARAMETER Experiment Name: Zm_Drought_P Parameter: Timepoint (hr) Value: 48
  misc_feature: MA Experiment 20000479 PARAMETER Experiment Name: Zm_Drought_P Parameter: Tissue Value: Aerial
  misc_feature: MA Experiment 20000479 PARAMETER Experiment Name: Zm_Drought_P Parameter: Treatment Value: Drought vs. No Drought
  misc_feature: MA Experiment ID: 20000480 Result: Down-regulated in Transcription
  misc_feature: MA Experiment 20000480 PARAMETER Experiment Name: Zm_Drought_P Parameter: Age (day) Value: 11
  misc_feature: MA Experiment 20000480 PARAMETER Experiment Name: Zm_Drought_P Parameter: Organism Value: Zea mays
  misc_feature: MA Experiment 20000480 PARAMETER Experiment Name: Zm_Drought_P Parameter: Plant Line Value: 35A19
  misc_feature: MA Experiment 20000480 PARAMETER Experiment Name: Zm_Drought_P Parameter: Timepoint (hr) Value: 72
  misc_feature: MA Experiment 20000480 PARAMETER Experiment Name: Zm_Drought_P Parameter: Tissue Value: Aerial
  misc_feature: MA Experiment 20000480 PARAMETER Experiment Name: Zm_Drought_P Parameter: Treatment Value: Drought vs. No Drought
  misc_feature: MA Experiment ID: 20000492 Result: Up-regulated in Transcription
  misc_feature: MA Experiment 20000492 PARAMETER Experiment Name: Zm_Hybrid_Seed_Dev_P Parameter: DAP Value: 12
  misc_feature: MA Experiment 20000492 PARAMETER Experiment Name: Zm_Hybrid_Seed_Dev_P Parameter: Organism Value: Zea mays
  misc_feature: MA Experiment 20000492 PARAMETER Experiment Name: Zm_Hybrid_Seed_Dev_P Parameter: Plant Line Value: 35A19
  misc_feature: MA Experiment 20000492 PARAMETER Experiment Name: Zm_Hybrid_Seed_Dev_P Parameter: Tissue Value: Fert Kernel vs. Unfert Floret
  misc_feature: MA Experiment ID: 20000535 Result: Up-regulated in Transcription
  misc_feature: MA Experiment 20000535 PARAMETER Experiment Name: Zm_Hybrid_Seed_Dev_P Parameter: DAP Value: 30 vs. 12
  misc_feature: MA Experiment 20000535 PARAMETER Experiment Name: Zm_Hybrid_Seed_Dev_P Parameter: Organism Value: Zea mays
  misc_feature: MA Experiment 20000535 PARAMETER Experiment Name: Zm_Hybrid_Seed_Dev_P Parameter: Plant Line Value: 35A19
  misc_feature: MA Experiment 20000535 PARAMETER Experiment Name: Zm_Hybrid_Seed_Dev_P Parameter: Tissue Value: Embryo vs. Unfert Floret

SEQ ID NO: 11410 - protein, 443 aa, Zea mays subsp. mays; identical to SEQ ID NO: 4381
  peptide (1)..(443): Ceres Seq. ID no. 12345646
  misc_feature (312)..(434): Pfam Name: Transketolase, C-terminal domain Pfam Description: Transketolase, C-terminal domain
  misc_feature (100)..(442): Homolog of NCBI NO: 15220670 NR Description: pyruvate dehydrogenase E1 beta subunit, putative; id: At1g30120.1, supported by cDNA: 38062., supported by cDNA: supported by cDNA: gi_20334775, supported by cDNA: beta subunit,
  misc_feature (100)..(442): Homolog of NCBI NO: 2454184 NR Description: pyruvate dehydrogenase E1 beta subunit thaliana] >gi|21593321|gb|AAM65270.1| pyruvate dehydrogenase E1
  misc_feature (92)..(442): Homolog of NCBI NO: 15226781 NR Description: putative pyruvate dehydrogenase E1 beta subunit; id: At2g34590.1, supported by cDNA: 38439., supported by cDNA: [Arabidopsis thaliana] >gi|25284457|pir||E84758 probable E1 beta
  misc_feature (92)..(442): Homolog of NCBI NO: 21593379 NR Description: putative pyruvate dehydrogenase E1 beta subunit
  misc_feature (157)..(442): Homolog of NCBI NO: 2982328 NR Description: pyruvate dehydrogenase E1 beta subunit [Picea
  misc_feature (122)..(442): Homolog of NCBI NO: 22711921 NR Description: pyruvate dehydrogenase E1 component beta subunit globosum] >gi|22416925|gb|AAM96525.1| beta subunit of pyruvate
  misc_feature (122)..(441): Homolog of NCBI NO: 22297748 NR Description: pyruvate dehydrogenase E1 component beta subunit
  misc_feature (122)..(443): Homolog of NCBI NO: 23041427 NR Description: hypothetical protein [Trichodesmium erythraeum
  misc_feature (122)..(443): Homolog of NCBI NO: 17227618 NR Description: pyruvate dehydrogenase E1 beta subunit [Nostoc
  misc_feature (122)..(443): Homolog of NCBI NO: 23124048 NR Description: hypothetical protein [Nostoc punctiforme]

SEQ ID NO: 11411 - protein, 383 aa, Zea mays subsp. mays; identical to SEQ ID NO: 4382
  peptide (1)..(383): Ceres Seq. ID no. 12345647
  misc_feature (252)..(374): Pfam Name: Transketolase, C-terminal domain Pfam Description: Transketolase, C-terminal domain
  misc_feature (40)..(382): Homolog of NCBI NO: 15220670 NR Description: pyruvate dehydrogenase E1 beta subunit, putative; id: At1g30120.1, supported by cDNA: 38062., supported by cDNA: supported by cDNA: gi_20334775, supported by cDNA: beta subunit,
  misc_feature (40)..(382): Homolog of NCBI NO: 2454184 NR Description: pyruvate dehydrogenase E1 beta subunit thaliana] >gi|21593321|gb|AAM65270.1| pyruvate dehydrogenase E1
  misc_feature (32)..(382): Homolog of NCBI NO: 15226781 NR Description: putative pyruvate dehydrogenase E1 beta subunit; id: At2g34590.1, supported by cDNA: 38439., supported by cDNA: [Arabidopsis thaliana] >gi|25284457|pir||E84758 probable E1 beta
  misc_feature (32)..(382): Homolog of NCBI NO: 21593379 NR Description: putative pyruvate dehydrogenase E1 beta subunit
  misc_feature (97)..(382): Homolog of NCBI NO: 2982328 NR Description: pyruvate dehydrogenase E1 beta subunit [Picea
  misc_feature (62)..(382): Homolog of NCBI NO: 22711921 NR Description: pyruvate dehydrogenase E1 component beta subunit globosum] >gi|22416925|gb|AAM96525.1| beta subunit of pyruvate
  misc_feature (62)..(381): Homolog of NCBI NO: 22297748 NR Description: pyruvate dehydrogenase E1 component beta subunit
  misc_feature (62)..(383): Homolog of NCBI NO: 23041427 NR Description: hypothetical protein [Trichodesmium erythraeum
  misc_feature (62)..(383): Homolog of NCBI NO: 17227618 NR Description: pyruvate dehydrogenase E1 beta subunit [Nostoc
  misc_feature (62)..(383): Homolog of NCBI NO: 23124048 NR Description: hypothetical protein [Nostoc punctiforme]

SEQ ID NO: 11412 - protein, 310 aa, Zea mays subsp. mays; identical to SEQ ID NO: 4383
  peptide (1)..(310): Ceres Seq. ID no. 12345648
  misc_feature (179)..(301): Pfam Name: Transketolase, C-terminal domain Pfam Description: Transketolase, C-terminal domain
  misc_feature (1)..(309): Homolog of NCBI NO: 15220670 NR Description: pyruvate dehydrogenase E1 beta subunit, putative; id: At1g30120.1, supported by cDNA: 38062., supported by cDNA: supported by cDNA: gi_20334775, supported by cDNA: beta subunit,
  misc_feature (1)..(309): Homolog of NCBI NO: 2454184 NR Description: pyruvate dehydrogenase E1 beta subunit thaliana] >gi|21593321|gb|AAM65270.1| pyruvate dehydrogenase E1
  misc_feature (1)..(309): Homolog of NCBI NO: 15226781 NR Description: putative pyruvate dehydrogenase E1 beta subunit; id: At2g34590.1, supported by cDNA: 38439., supported by cDNA: [Arabidopsis thaliana] >gi|25284457|pir||E84758 probable E1 beta
  misc_feature (1)..(309): Homolog of NCBI NO: 21593379 NR Description: putative pyruvate dehydrogenase E1 beta subunit
  misc_feature (24)..(309): Homolog of NCBI NO: 2982328 NR Description: pyruvate dehydrogenase E1 beta subunit [Picea
  misc_feature (1)..(309): Homolog of NCBI NO: 22711921 NR Description: pyruvate dehydrogenase E1 component beta subunit globosum] >gi|22416925|gb|AAM96525.1| beta subunit of pyruvate
  misc_feature (1)..(308): Homolog of NCBI NO: 22297748 NR Description: pyruvate dehydrogenase E1 component beta subunit
  misc_feature (1)..(310): Homolog of NCBI NO: 23041427 NR Description: hypothetical protein [Trichodesmium erythraeum
  misc_feature (1)..(310): Homolog of NCBI NO: 17227618 NR Description: pyruvate dehydrogenase E1 beta subunit [Nostoc
  misc_feature (1)..(310): Homolog of NCBI NO: 23124048 NR Description: hypothetical protein [Nostoc punctiforme]

SEQ ID NO: 11413 - DNA, 2072 bp, Zea mays subsp. mays
  misc_feature (1)..(2072): Ceres Seq. ID no. 12411849
  misc_feature: MA Experiment ID: 108535 Result: Down-regulated in Transcription
  misc_feature: MA Experiment 108535 PARAMETER Experiment Name: Zm_Meristem_P Parameter: Age (day) Value: 8
  misc_feature: MA Experiment 108535 PARAMETER Experiment Name: Zm_Meristem_P Parameter: Organism Value: Zea mays
  misc_feature: MA Experiment 108535 PARAMETER Experiment Name: Zm_Meristem_P Parameter: Plant Line Value: 35A19
  misc_feature: MA Experiment 108535 PARAMETER Experiment Name: Zm_Meristem_P Parameter: Tissue Value: Root Meristem vs. Above Root Meristem
  misc_feature: MA Experiment ID: 108544 Result: Up-regulated in Transcription
gtcgctctcctcctcctcctcctcctcctccgtaggcaaggcaaggggggcaaggctctaacggagatcggatcgaactgcctgtgcagtctccctccctccctccctccctcatgtccatatataccaaaaaatctccgccgcgccgccattagctagctctcgtcgtcttcgttcctccgcaaataatttgttactcaagccgaaggaggacgagggcgacgggattggctaatcaaatcgaccgatctagtggctggtgcccaggagaagggacgcgggcagtgcggctcgtcgtggtcagcagcttgtggcgaccggtcgccagggaatcaatcaattcaatcagaaagttgcaattttgattgagctcgattcgtcatccacaagacattagggaatcgaaccaccacaaagcaagaaggcagtccagtgcagagagagagagagagaccaagaagagaaagagaaagggaaagagaagcaaagcaatggatccaccgcatcaccgtgctgtgctgcggcggcctcgtcctcctcctccctcctgccctttttataggccgcctccgcttcgtcgtcttggcaagacctgcccccgcgcctgcaatcctacgacaacagggcgccgctcctcctgcccgtcaagatcatggacaccgccgccgacgacaagccggaaatctccgacgatacggcccaccagattagcgttgatccttggtatcaagttggcttcgtcctcacaaccggggtcaacagcgcatacgttctaggatactctggatcaatcatggtccctctaggctggatcggcggcacatgcggcctcctcctagctgccgccatatccatgtacgctaatgctcttcttgcacggcttcatgaagtcggtggcaaacgccatatcagatacagagaccttgctggacacatatatggaccgaaaatttacgggcttacatgggctctgcagtacattaaccttttcatgatcaacactggctttatcatcttagctggacaagctctcaaggccacgtatggactgttcagtgatgatggagttctgaaactcccttactgcattgcgatatcaggattcgtctgtgctcttttcgccattggaatcccttatttatctgccctcaggatttggttggggttctccacgcttttcagcctcatgtatattgtgatagcagttgtgctgtcgtcgagagatgggataaccgcacctgcaagggattacagcatccccaaatcatcgcagtcaactcgagtcttcactacgataggttccatagcagaccttgtgtttgcttacaacaccggcatgctgccagaaattcaggcaaccatcaggcctcctgtggtgaagaacatggagaaagctctatggttccagttcaccattggctccttgcctctctatgctgtagtttttgtgggttactgggcttatgggtcctcaacatcaggctacctcctcaacagtgtcacaggcccagtctgggtgaaagcggttgcaaatctgtcggcattttttcagacagtcatagcgctgcacatctttgctagccccatgtatgaattcctggacacaaaatatggaagtgggcgtggccccttttgagatccacaacgtggcgttcagagtagcagtcagaggaggctacctgacggtgaacacgctggtggccgcggtgctcccattcctcggcgacttcatgagcctgacgggcgccctcagcaccttcccgctgacgtttgtgctcgcaaatcacatgtacctgatggtgaaggggcctaagctgggtgccatccagaaatcatggcactggctcaatgttcttgggttcactgcgctggctgttgcagcggcggtctccgcaataaggctcatcatgcgtgattccagcacctaccacttcttcgctgatctttgagatcgatcgttttcttttctttttgttggaatgctgagccagagctagtattttttcattttcagagaattattatccatgtatgtaaggatgacgcatatatatatattgaatagatgattt

SEQ ID NO: 11414 - protein, 327 aa, Zea mays subsp. mays
  peptide (1)..(327): Ceres Seq. ID no. 12411850
  misc_feature (1)..(327): Homolog of NCBI NO: 11358960 NR Description: proline transport protein [imported] - rice
  misc_feature (6)..(327): Homolog of NCBI NO: 16215723 NR Description: proline transporter [Hordeum vulgare subsp.
  misc_feature (6)..(327): Homolog of NCBI NO: 15225591 NR Description: proline transporter 1; protein id: At2g39890.1, by cDNA: 39048. [Arabidopsis thaliana] >gi|11358707|pir||T50692
  misc_feature (6)..(327): Homolog of NCBI NO: 21593453 NR Description: proline transporter 1 [Arabidopsis thaliana]
  misc_feature (14)..(321): Homolog of NCBI NO: 8571474 NR Description: proline/glycine betaine transporter [Atriplex
  misc_feature (14)..(326): Homolog of NCBI NO: 15228183 NR Description: proline transporter 2; protein id: At3g55740.1, by cDNA: gi_19698890 [Arabidopsis thaliana]
  misc_feature (14)..(321): Homolog of NCBI NO: 21069018 NR Description: betaine/proline transporter [Avicennia marina]
  misc_feature (1)..(326): Homolog of NCBI NO: 21554196 NR Description: putative proline transporter [Arabidopsis
  misc_feature (14)..(326): Homolog of NCBI NO: 15228000 NR Description: putative proline transporter; protein id: supported by cDNA: 20959. [Arabidopsis thaliana]
  misc_feature (5)..(321): Homolog of NCBI NO: 21069020 NR Description: betaine/proline transporter [Avicennia marina]
MDTAADDKPEISDDTAHQISVDPWYQVGFVLTTGVNSAYVLGYSGSIMVPLGWIGGTCGLLLAAAISMYANALLARLHEVGGKRHIRYRDLAGHIYGPKIYGLTWALQYINLFMINTGFIILAGQALKATYGLFSDDGVLKLPYCIAISGFVCALFAIGIPYLSALRIWLGFSTLFSLMYIVIAVVLSSRDGITAPARDYSIPKSSQSTRVFTTIGSIADLVFAYNTGMLPEIQATIRPPVVKNMEKALWFQFTIGSLPLYAVVFVGYWAYGSSTSGYLLNSVTGPVWVKAVANLSAFFQTVIALHIFASPMYEFLDTKYGSGRGPF

SEQ ID NO: 11415 - protein, 280 aa, Zea mays subsp. mays
  peptide (1)..(280): Ceres Seq. ID no. 12411851
  misc_feature (1)..(280): Homolog of NCBI NO: 11358960 NR Description: proline transport protein [imported] - rice
  misc_feature (1)..(280): Homolog of NCBI NO: 16215723 NR Description: proline transporter [Hordeum vulgare subsp.
  misc_feature (1)..(280): Homolog of NCBI NO: 15225591 NR Description: proline transporter 1; protein id: At2g39890.1, by cDNA: 39048. [Arabidopsis thaliana] >gi|11358707|pir||T50692
  misc_feature (1)..(280): Homolog of NCBI NO: 21593453 NR Description: proline transporter 1 [Arabidopsis thaliana]
  misc_feature (1)..(274): Homolog of NCBI NO: 8571474 NR Description: proline/glycine betaine transporter [Atriplex
  misc_feature (1)..(279): Homolog of NCBI NO: 15228183 NR Description: proline transporter 2; protein id: At3g55740.1, by cDNA: gi_19698890 [Arabidopsis thaliana]
  misc_feature (1)..(274): Homolog of NCBI NO: 21069018 NR Description: betaine/proline transporter [Avicennia marina]
  misc_feature (1)..(279): Homolog of NCBI NO: 21554196 NR Description: putative proline transporter [Arabidopsis
  misc_feature (1)..(279): Homolog of NCBI NO: 15228000 NR Description: putative proline transporter; protein id: supported by cDNA: 20959. [Arabidopsis thaliana]
  misc_feature (1)..(274): Homolog of NCBI NO: 21069020 NR Description: betaine/proline transporter [Avicennia marina]
MVPLGWIGGTCGLLLAAAISMYANALLARLHEVGGKRHIRYRDLAGHIYGPKIYGLTWALQYINLFMINTGFIILAGQALKATYGLFSDDGVLKLPYCIAISGFVCALFAIGIPYLSALRIWLGFSTLFSLMYIVIAVVLSSRDGITAPARDYSIPKSSQSTRVFTTIGSIADLVFAYNTGMLPEIQATIRPPVVKNMEKALWFQFTIGSLPLYAVVFVGYWAYGSSTSGYLLNSVTGPVWVKAVANLSAFFQTVIALHIFASPMYEFLDTKYGSGRGPF

SEQ ID NO: 11416 - protein, 260 aa, Zea mays subsp. mays
  peptide (1)..(260): Ceres Seq. ID no. 12411852
  misc_feature (1)..(260): Homolog of NCBI NO: 11358960 NR Description: proline transport protein [imported] - rice
  misc_feature (1)..(260): Homolog of NCBI NO: 16215723 NR Description: proline transporter [Hordeum vulgare subsp.
  misc_feature (1)..(260): Homolog of NCBI NO: 15225591 NR Description: proline transporter 1; protein id: At2g39890.1, by cDNA: 39048. [Arabidopsis thaliana] >gi|11358707|pir||T50692
  misc_feature (1)..(260): Homolog of NCBI NO: 21593453 NR Description: proline transporter 1 [Arabidopsis thaliana]
  misc_feature (1)..(254): Homolog of NCBI NO: 8571474 NR Description: proline/glycine betaine transporter [Atriplex
  misc_feature (1)..(259): Homolog of NCBI NO: 15228183 NR Description: proline transporter 2; protein id: At3g55740.1, by cDNA: gi_19698890 [Arabidopsis thaliana]
  misc_feature (1)..(254): Homolog of NCBI NO: 21069018 NR Description: betaine/proline transporter [Avicennia marina]
  misc_feature (1)..(259): Homolog of NCBI NO: 21554196 NR Description: putative proline transporter [Arabidopsis
  misc_feature (1)..(259): Homolog of NCBI NO: 15228000 NR Description: putative proline transporter; protein id: supported by cDNA: 20959. [Arabidopsis thaliana]
  misc_feature (1)..(254): Homolog of NCBI NO: 21069020 NR Description: betaine/proline transporter [Avicennia marina]
MYANALLARLHEVGGKRHIRYRDLAGHIYGPKIYGLTWALQYINLFMINTGFIILAGQALKATYGLFSDDGVLKLPYCIAISGFVCALFAIGIPYLSALRIWLGFSTLFSLMYIVIAVVLSSRDGITAPARDYSIPKSSQSTRVFTTIGSIADLVFAYNTGMLPEIQATIRPPVVKNMEKALWFQFTIGSLPLYAVVFVGYWAYGSSTSGYLLNSVTGPVWVKAVANLSAFFQTVIALHIFASPMYEFLDTKYGSGRGPF

SEQ ID NO: 11417 - DNA, 1913 bp, Zea mays subsp. mays
  misc_feature (1)..(1913): Ceres Seq. ID no. 12374119
  misc_feature: MA Experiment ID: 108527 Result: Up-regulated in Transcription
  misc_feature: MA Experiment 108527 PARAMETER Experiment Name: Zm_5mM_NO_P Parameter: Age (day) Value: 8
  misc_feature: MA Experiment 108527 PARAMETER Experiment Name: Zm_5mM_NO_P Parameter: Organism Value: Zea mays
  misc_feature: MA Experiment 108527 PARAMETER Experiment Name: Zm_5mM_NO_P Parameter: Plant Line Value: 35A19
  misc_feature: MA Experiment 108527 PARAMETER Experiment Name: Zm_5mM_NO_P Parameter: Timepoint (hr) Value: 6
  misc_feature: MA Experiment 108527 PARAMETER Experiment Name: Zm_5mM_NO_P Parameter: Tissue Value: Aerial
  misc_feature: MA Experiment 108527 PARAMETER Experiment Name: Zm_5mM_NO_P Parameter: Treatment Value: 5mM NO vs. No Treatment
  misc_feature: MA Experiment ID: 108559 Result: Up-regulated in Transcription
  misc_feature: MA Experiment 108559 PARAMETER Experiment Name: Zm_5mM_NO_P Parameter: Age (day) Value: 8
  misc_feature: MA Experiment 108559 PARAMETER Experiment Name: Zm_5mM_NO_P Parameter: Organism Value: Zea mays
  misc_feature: MA Experiment 108559 PARAMETER Experiment Name: Zm_5mM_NO_P Parameter: Plant Line Value: 35A19
  misc_feature: MA Experiment 108559 PARAMETER Experiment Name: Zm_5mM_NO_P Parameter: Timepoint (hr) Value: 12
  misc_feature: MA Experiment 108559 PARAMETER Experiment Name: Zm_5mM_NO_P Parameter: Tissue Value: Aerial
  misc_feature: MA Experiment 108559 PARAMETER Experiment Name: Zm_5mM_NO_P Parameter: Treatment Value: 5mM NO vs. No Treatment
  misc_feature: MA Experiment ID: 20000535 Result: Down-regulated in Transcription
  misc_feature: MA Experiment 20000535 PARAMETER Experiment Name: Zm_Hybrid_Seed_Dev_P Parameter: DAP Value: 30 vs. 12
  misc_feature: MA Experiment 20000535 PARAMETER Experiment Name: Zm_Hybrid_Seed_Dev_P Parameter: Organism Value: Zea mays
  misc_feature: MA Experiment 20000535 PARAMETER Experiment Name: Zm_Hybrid_Seed_Dev_P Parameter: Plant Line Value: 35A19
  misc_feature: MA Experiment 20000535 PARAMETER Experiment Name: Zm_Hybrid_Seed_Dev_P Parameter: Tissue Value: Embryo vs. Unfert Floret
  misc_feature: MA Experiment ID: 20001612 Result: Up-regulated in Transcription
  misc_feature: MA Experiment 20001612 PARAMETER Experiment Name: Zm_50ppm_KNO3_L-to-H_P Parameter: Age (day) Value: 19
  misc_feature: MA Experiment 20001612 PARAMETER Experiment Name: Zm_50ppm_KNO3_L-to-H_P Parameter: Organism Value: Zea mays
  misc_feature: MA Experiment 20001612 PARAMETER Experiment Name: Zm_50ppm_KNO3_L-to-H_P Parameter: Plant Line Value: 35A19
  misc_feature: MA Experiment 20001612 PARAMETER Experiment Name: Zm_50ppm_KNO3_L-to-H_P Parameter: Timepoint (hr) Value: 8
  misc_feature: MA Experiment 20001612 PARAMETER Experiment Name: Zm_50ppm_KNO3_L-to-H_P Parameter: Tissue Value: Roots
  misc_feature: MA Experiment 20001612 PARAMETER Experiment Name: Zm_50ppm_KNO3_L-to-H_P Parameter: Treatment Value: 50ppm KNO3 vs. 50ppm KCl
aattccgtccacagaagaagaatccttctcgacgccgcccccattcattcttggagggcaagaagaacgcgcagtccaaaagcgaaacaaggggaaggggcgaggcagccaaacgaatcccagcacctgcctctcctttgcttgcgcagatctagcgatggcggcgggcggtgagttggcgtggggggaggagcccgtggcgcggcgccggcctaagaccaagatcgtctgcacgctcggcccggcgtcgcgatccgtcgagatgatctcgcgcctgctgcgcgccgggatgtgcgtcgcgcgcttcaacttctcccatggctcccacgagtaccaccaggagacgctcgacaacctgcacgccgccatggagctcaccgggatcctctgcgccgttatgctcgacaccaagggtccagagattagaactggatttttgaaagatgggaatcctattcaattgataaaaggccaagaaatcacaatttctacagactatagcattcagggtgatgagaaaatgatatcaatgagctacaagaagcttgctgttgatctgaagccaggcagtgtcatattgtgtgctgatggtaccatcactcttactgttcttcactgtgataaagaacaaggcttggttcgctgccgctgtgagaacactttcaagcttggcgagaggaagaatgttaatcttccaggagttattgttgatctccccacactcacagacaaggacaaggaggacatccttaaatggggtgttccaaacaagattgacatgattgccttgtcatttgttcggaagggttcggatcttgtggaggttaggaaggtacttggtgagcatgccaagtccataatgctgatgtcaaaggttgagaatcaagagggagtagctaactttgatgatatcctggcaaactctgatgcttttatggtggcaagaggtgatttaggaatggaaattcctatagagaagattttctttgcacagaaggtgatgattttcaagtgcaatattcaaggcaagcctgttgtgactgcaacccagatgttggaatctatgatcaagtctcctcgccctactcgggcagaagcaacggatgttgcaaacgcagttcttgatggcacagactgtgttatgctcagtggtgagactgctgctggggcttatccagagttggcggtgcagactatggctaagatctgcctgcaagcagagtcttgcgtagaccatgctgctattttcaaatcaatcatggcttcagctccaattccaatgagtccattggagagccttgcatcatcagctgttcgcacagcaaactctgccagggcagcacttatcttggtcctgaccaggggaggaactactgctaggcttgtagccaagtataggccatccatgccgattctgtccgttgtggttcctgagctgaagacagactcgttcgactgggcctgcagtgacgagggtccggcaaggcacagcctcattgtgaggggtgtcatcccaatgctgagtgccgccactgccaaggcctttgacaacgaagccactgacgaagctattggttttgccattgaaaatgcgaagacgatggggctatgcaacaccggtcaatccgttgtggccctgcaccgcatcgggatttcatccgtcatcaagcttcttactgtgaagtaggggtccaagggtgagggacaccattttgcttggtgaatttttgtgaggctgcttacgcacatcagcgtatccacagcttttctgttgccaaagatacagactttgcgttctggtacaccttggtgttacaagggttgtgggaatttgtcgtttagatattagcgatttaaacagtttatcaactgctatagctaattaatttgcagctgtgctgcaactttatcgt

SEQ ID NO: 11418 - protein, 561 aa, Zea mays subsp. mays
  peptide (1)..(561): Ceres Seq. ID no. 12374120
  misc_feature (430)..(559): Pfam Name: Pyruvate kinase, alpha/beta domain Pfam Description: Pyruvate kinase, alpha/beta domain
  misc_feature (69)..(561): Homolog of NCBI NO: 2497543 NR Description: Pyruvate kinase, cytosolic isozyme
  misc_feature (69)..(561): Homolog of NCBI NO: 15241190 NR Description: pyruvate kinase; protein id: At5g56350.1, by cDNA: 31580., supported by cDNA: gi_15450941, supported by gi_17978780 [Arabidopsis thaliana] >gi|10177833|dbj|BAB11262.1|
  misc_feature (69)..(561): Homolog of NCBI NO: 15236190 NR Description: pyruvate kinase like protein; protein id: [Arabidopsis thaliana] >gi|4033431|sp|O65595|KPYC_ARATH Probable kinase, cytosolic isozyme (PK) >gi|7434442|pir||T05065 pyruvate
  misc_feature (63)..(561): Homolog of NCBI NO: 15242313 NR Description: pyruvate kinase; protein id: At5g08570.1 thaliana] >gi|9759351|dbj|BAB10006.1| pyruvate kinase
IPSTEEESFSTPPPFILGGQEERAVQKRNKGKGRGSQTNPSTCLSFACADLAMAAGGELAWGEEPVARRRPKTKIVCTLGPASRSVEMISRLLRAGMCVARFNFSHGSHEYHQETLDNLHAAMELTGILCAVMLDTKGPEIRTGFLKDGNPIQLIKGQEITISTDYSIQGDEKMISMSYKKLAVDLKPGSVILCADGTITLTVLHCDKEQGLVRCRCENTFKLGERKNVNLPGVIVDLPTLTDKDKEDILKWGVPNKIDMIALSFVRKGSDLVEVRKVLGEHAKSIMLMSKVENQEGVANFDDILANSDAFMVARGDLGMEIPIEKIFFAQKVMIFKCNIQGKPVVTATQMLESMIKSPRPTRAEATDVANAVLDGTDCVMLSGETAAGAYPELAVQTMAKICLQAESCVDHAAIFKSIMASAPIPMSPLESLASSAVRTANSARAALILVLTRGGTTARLVAKYRPSMPILSVVVPELKTDSFDWACSDEGPARHSLIVRGVIPMLSAATAKAFDNEATDEAIGFAIENAKTMGLCNTGQSVVALHRIGISSVIKLLTVK

SEQ ID NO: 11419 - protein, 509 aa, Zea mays subsp. mays
  peptide (1)..(509): Ceres Seq. ID no. 12374121
  misc_feature (378)..(507): Pfam Name: Pyruvate kinase, alpha/beta domain Pfam Description: Pyruvate kinase, alpha/beta domain
  misc_feature (17)..(509): Homolog of NCBI NO: 2497543 NR Description: Pyruvate kinase, cytosolic isozyme
  misc_feature (17)..(509): Homolog of NCBI NO: 15241190 NR Description: pyruvate kinase; protein id: At5g56350.1, by cDNA: 31580., supported by cDNA: gi_15450941, supported by gi_17978780 [Arabidopsis thaliana] >gi|10177833|dbj|BAB11262.1|
  misc_feature (17)..(509): Homolog of NCBI NO: 15236190 NR Description: pyruvate kinase like protein; protein id: [Arabidopsis thaliana] >gi|4033431|sp|O65595|KPYC_ARATH Probable kinase, cytosolic isozyme (PK) >gi|7434442|pir||T05065 pyruvate
  misc_feature (11)..(509): Homolog of NCBI NO: 15242313 NR Description: pyruvate kinase; protein id: At5g08570.1 thaliana] >gi|9759351|dbj|BAB10006.1| pyruvate kinase
MAAGGELAWGEEPVARRRPKTKIVCTLGPASRSVEMISRLLRAGMCVARFNFSHGSHEYHQETLDNLHAAMELTGILCAVMLDTKGPEIRTGFLKDGNPIQLIKGQEITISTDYSIQGDEKMISMSYKKLAVDLKPGSVILCADGTITLTVLHCDKEQGLVRCRCENTFKLGERKNVNLPGVIVDLPTLTDKDKEDILKWGVPNKIDMIALSFVRKGSDLVEVRKVLGEHAKSIMLMSKVENQEGVANFDDILANSDAFMVARGDLGMEIPIEKIFFAQKVMIFKCNIQGKPVVTATQMLESMIKSPRPTRAEATDVANAVLDGTDCVMLSGETAAGAYPELAVQTMAKICLQAESCVDHAAIFKSIMASAPIPMSPLESLASSAVRTANSARAALILVLTRGGTTARLVAKYRPSMPILSVVVPELKTDSFDWACSDEGPARHSLIVRGVIPMLSAATAKAFDNEATDEAIGFAIENAKTMGLCNTGQSVVALHRIGISSVIKLLTVK

SEQ ID NO: 11420 - protein, 474 aa, Zea mays subsp. mays
  peptide (1)..(474): Ceres Seq. ID no. 12374122
  misc_feature (343)..(472): Pfam Name: Pyruvate kinase, alpha/beta domain Pfam Description: Pyruvate kinase, alpha/beta domain
  misc_feature (1)..(474): Homolog of NCBI NO: 2497543 NR Description: Pyruvate kinase, cytosolic isozyme
  misc_feature (1)..(474): Homolog of NCBI NO: 15241190 NR Description: pyruvate kinase; protein id: At5g56350.1, by cDNA: 31580., supported by cDNA: gi_15450941, supported by gi_17978780 [Arabidopsis thaliana] >gi|10177833|dbj|BAB11262.1|
  misc_feature (1)..(474): Homolog of NCBI NO: 15236190 NR Description: pyruvate kinase like protein; protein id: [Arabidopsis thaliana] >gi|4033431|sp|O65595|KPYC_ARATH Probable kinase, cytosolic isozyme (PK) >gi|7434442|pir||T05065 pyruvate
  misc_feature (1)..(474): Homolog of NCBI NO: 15242313 NR Description: pyruvate kinase; protein id: At5g08570.1 thaliana] >gi|9759351|dbj|BAB10006.1| pyruvate kinase
MISRLLRAGMCVARFNFSHGSHEYHQETLDNLHAAMELTGILCAVMLDTKGPEIRTGFLKDGNPIQLIKGQEITISTDYSIQGDEKMISMSYKKLAVDLKPGSVILCADGTITLTVLHCDKEQGLVRCRCENTFKLGERKNVNLPGVIVDLPTLTDKDKEDILKWGVPNKIDMIALSFVRKGSDLVEVRKVLGEHAKSIMLMSKVENQEGVANFDDILANSDAFMVARGDLGMEIPIEKIFFAQKVMIFKCNIQGKPVVTATQMLESMIKSPRPTRAEATDVANAVLDGTDCVMLSGETAAGAYPELAVQTMAKICLQAESCVDHAAIFKSIMASAPIPMSPLESLASSAVRTANSARAALILVLTRGGTTARLVAKYRPSMPILSVVVPELKTDSFDWACSDEGPARHSLIVRGVIPMLSAATAKAFDNEATDEAIGFAIENAKTMGLCNTGQSVVALHRIGISSVIKLLTVK

SEQ ID NO: 11421 - DNA, 1107 bp, Zea mays subsp. mays
  misc_feature (1)..(1107): Ceres Seq. ID no. 12566683
  misc_feature: MA Experiment ID: 108523 Result: Down-regulated in Transcription
  misc_feature: MA Experiment 108523 PARAMETER Experiment Name: Zm_42deg_Heat_P Parameter: Age (day) Value: 8
  misc_feature: MA Experiment 108523 PARAMETER Experiment Name: Zm_42deg_Heat_P Parameter: Organism Value: Zea mays
  misc_feature: MA Experiment 108523 PARAMETER Experiment Name: Zm_42deg_Heat_P Parameter: Plant Line Value: 35A19
  misc_feature: MA Experiment 108523 PARAMETER Experiment Name: Zm_42deg_Heat_P Parameter: Temperature (deg C) Value: 42 vs. 22
  misc_feature: MA Experiment 108523 PARAMETER Experiment Name: Zm_42deg_Heat_P Parameter: Timepoint (hr) Value: 6
  misc_feature: MA Experiment 108523 PARAMETER Experiment Name: Zm_42deg_Heat_P Parameter: Tissue Value: Aerial
  misc_feature: MA Experiment ID: 108535 Result: Up-regulated in Transcription
  misc_feature: MA Experiment 108535 PARAMETER Experiment Name: Zm_Meristem_P Parameter: Age (day) Value: 8
  misc_feature: MA Experiment 108535 PARAMETER Experiment Name: Zm_Meristem_P Parameter: Organism Value: Zea mays
  misc_feature: MA Experiment 108535 PARAMETER Experiment Name: Zm_Meristem_P Parameter: Plant Line Value: 35A19
  misc_feature: MA Experiment 108535 PARAMETER Experiment Name: Zm_Meristem_P Parameter: Tissue Value: Root Meristem vs. Above Root Meristem
  misc_feature: MA Experiment ID: 108548 Result: Up-regulated in Transcription
  misc_feature: MA Experiment 108548 PARAMETER Experiment Name: Zm_20uM_KNO3_H-to-L_P Parameter: Age (day) Value: 11
  misc_feature: MA Experiment 108548 PARAMETER Experiment Name: Zm_20uM_KNO3_H-to-L_P Parameter: Organism Value: Zea mays
  misc_feature: MA Experiment 108548 PARAMETER Experiment Name: Zm_20uM_KNO3_H-to-L_P Parameter: Plant Line Value: 35A19
  misc_feature: MA Experiment 108548 PARAMETER Experiment Name: Zm_20uM_KNO3_H-to-L_P Parameter: Timepoint (hr) Value: 4
  misc_feature: MA Experiment 108548 PARAMETER Experiment Name: Zm_20uM_KNO3_H-to-L_P Parameter: Tissue Value: Roots
  misc_feature: MA Experiment 108548 PARAMETER Experiment Name: Zm_20uM_KNO3_H-to-L_P Parameter: Treatment Value: 20uM KNO3 vs. 60mM KNO3
  misc_feature: MA Experiment ID: 20000492 Result: Up-regulated in Transcription
  misc_feature: MA Experiment 20000492 PARAMETER Experiment Name: Zm_Hybrid_Seed_Dev_P Parameter: DAP Value: 12
  misc_feature: MA Experiment 20000492 PARAMETER Experiment Name: Zm_Hybrid_Seed_Dev_P Parameter: Organism Value: Zea mays
  misc_feature: MA Experiment 20000492 PARAMETER Experiment Name: Zm_Hybrid_Seed_Dev_P Parameter: Plant Line Value: 35A19
  misc_feature: MA Experiment 20000492 PARAMETER Experiment Name: Zm_Hybrid_Seed_Dev_P Parameter: Tissue Value: Fert Kernel vs. Unfert Floret
gcacgagaccattacctagaacatcctaatcgaaaagtctcatcagtcatcacccaccgcctccgccgccgacaacagcgtagtgtagtgtagttccggagagggttggggagagtagtagtgatccgcaatgtcgacggaggaggctgttgtggctgaggtcccggtgaccgaggtgccagcggaggtcccggcggcccaggtggccgaggcgcccaaggcgaagaaggcgcccaaggagaagaaggcgcctaaggagaagaagctttccgcggcgaagaagccggcggcgcaccctccctacgctgagatgattgtagaggcgatcgctgccctcaaggagaggaaggggtcgagctcggtggccatcagcaagtacgtcgaggggaagcatggcggcaagctccccaccaacttccgcaagcagctcactgtgcagctgaagaagctcgctgccgccggcaagctgacgagggtgaagaactccttcaagctgccggccaccgacgccaagcccaaggccgccaagcccaaggcacccaaggccgcgcccaagcccaagccctcgccgaaggcgaaggccaagaccgcttcgaagcccaaggcggcgtcgcccaaacccaaggccaaggccaaggccaagcctgtcgctcctgccgccgcgtcgcccaagccccgcgggcgccctcccaaggtcgccaagacctccgccaaggcctcccccgccaaggcagccaagaaggcggctgctcctgccaagaagggaaaggcagcggcggctcctaagaaggtggcaaccccgaagaaggctgctgctgctgccgccccggccaggaagggcgtggccaggaaggccaagaagtagtctgcctgccttgtcgctggcgagatccccccctcaattccgcctatagattcccctctttcatggattttgatccaatcgtaatattgtcagtagctctagattcgtcggtagctccagcatgagtgtcggtggtagttctgtgcctgtaaaaacttgggatagttgatcgcgtgtgatcagccgtcatgctcctccagtctctatgaacaagctaagctataatagtattttgctatccc

SEQ ID NO: 11422 - protein, 244 aa, Zea mays subsp. mays
  peptide (1)..(244): Ceres Seq. ID no. 12566684
  misc_feature (54)..(124): Pfam Name: linker histone H1 and H5 family Pfam Description: linker histone H1 and H5 family
  misc_feature (1)..(244): Homolog of NCBI NO: 18463959 NR Description: histone H1-like protein [Zea mays]
  misc_feature (1)..(244): Homolog of NCBI NO: 34897182 NR Description: histone-like protein [Oryza sativa (japonica
  misc_feature (1)..(244): Homolog of NCBI NO: 5230790 NR Description: histone H1 WH1A.4 [Triticum aestivum]
  misc_feature (1)..(244): Homolog of NCBI NO: 5230783 NR Description: histone H1 WH1A.2 [Triticum aestivum]
  misc_feature (3)..(244): Homolog of NCBI NO: 25553627 NR Description: putative histone H1 [Oryza sativa (japonica
  misc_feature (1)..(244): Homolog of NCBI NO: 11558848 NR Description: histone H1 [Triticum aestivum]
  misc_feature (1)..(244): Homolog of NCBI NO: 14916992 NR Description: HISTONE H1
  misc_feature (1)..(242): Homolog of NCBI NO: 5230785 NR Description: histone H1 WH1B.1 [Triticum aestivum]
  misc_feature (1)..(244): Homolog of NCBI NO: 5230781 NR Description: histone H1 WH1A.1 [Triticum aestivum]
  misc_feature (1)..(241): Homolog of NCBI NO: 7439660 NR Description: histone H1 (clone TH32) - wheat
MSTEEAVVAEVPVTEVPAEVPAAQVAEAPKAKKAPKEKKAPKEKKLSAAKKPAAHPPYAEMIVEAIAALKERKGSSSVAISKYVEGKHGGKLPTNFRKQLTVQLKKLAAAGKLTRVKNSFKLPATDAKPKAAKPKAPKAAPKPKPSPKAKAKTASKPKAASPKPKAKAKAKPVAPAAASPKPRGRPPKVAKTSAKASPAKAAKKAAAPAKKGKAAAAPKKVATPKKAAAAAAPARKGVARKAKK

SEQ ID NO: 11423 - protein, 184 aa, Zea mays subsp. mays
  peptide (1)..(184): Ceres Seq. ID no. 12566685
  misc_feature (1)..(64): Pfam Name: linker histone H1 and H5 family Pfam Description: linker histone H1 and H5 family
  misc_feature (1)..(184): Homolog of NCBI NO: 18463959 NR Description: histone H1-like protein [Zea mays]
  misc_feature (1)..(184): Homolog of NCBI NO: 34897182 NR Description: histone-like protein [Oryza sativa (japonica
  misc_feature (1)..(184): Homolog of NCBI NO: 5230790 NR Description: histone H1 WH1A.4 [Triticum aestivum]
  misc_feature (1)..(184): Homolog of NCBI NO: 5230783 NR Description: histone H1 WH1A.2 [Triticum aestivum]
  misc_feature (1)..(184): Homolog of NCBI NO: 25553627 NR Description: putative histone H1 [Oryza sativa (japonica
  misc_feature (1)..(184): Homolog of NCBI NO: 11558848 NR Description: histone H1 [Triticum aestivum]
  misc_feature (1)..(184): Homolog of NCBI NO: 14916992 NR Description: HISTONE H1
  misc_feature (1)..(182): Homolog of NCBI NO: 5230785 NR Description: histone H1 WH1B.1 [Triticum aestivum]
  misc_feature (1)..(184): Homolog of NCBI NO: 5230781 NR Description: histone H1 WH1A.1 [Triticum aestivum]
  misc_feature (1)..(181): Homolog of NCBI NO: 7439660 NR Description: histone H1 (clone TH32) - wheat
MIVEAIAALKERKGSSSVAISKYVEGKHGGKLPTNFRKQLTVQLKKLAAAGKLTRVKNSFKLPATDAKPKAAKPKAPKAAPKPKPSPKAKAKTASKPKAASPKPKAKAKAKPVAPAAASPKPRGRPPKVAKTSAKASPAKAAKKAAAPAKKGKAAAAPKKVATPKKAAAAAAPARKGVARKAKK

SEQ ID NO: 11424 - DNA, 1427 bp, Zea mays subsp. mays
  misc_feature (1)..(1427): Ceres Seq. ID no. 12376372
  misc_feature: MA Experiment ID: 108535 Result: Up-regulated in Transcription
  misc_feature: MA Experiment 108535 PARAMETER Experiment Name: Zm_Meristem_P Parameter: Age (day) Value: 8
  misc_feature: MA Experiment 108535 PARAMETER Experiment Name: Zm_Meristem_P Parameter: Organism Value: Zea mays
  misc_feature: MA Experiment 108535 PARAMETER Experiment Name: Zm_Meristem_P Parameter: Plant Line Value: 35A19
  misc_feature: MA Experiment 108535 PARAMETER Experiment Name: Zm_Meristem_P Parameter: Tissue Value: Root Meristem vs. Above Root Meristem
  misc_feature: MA Experiment ID: 108543 Result: Up-regulated in Transcription
  misc_feature: MA Experiment ID: 108556 Result: Down-regulated in Transcription
  misc_feature: MA Experiment 108556 PARAMETER Experiment Name: Zm_Drought_P Parameter: Age (day) Value: 9
  misc_feature: MA Experiment 108556 PARAMETER Experiment Name: Zm_Drought_P Parameter: Organism Value: Zea mays
  misc_feature: MA Experiment 108556 PARAMETER Experiment Name: Zm_Drought_P Parameter: Plant Line Value: 35A19
  misc_feature: MA Experiment 108556 PARAMETER Experiment Name: Zm_Drought_P Parameter: Timepoint (hr) Value: 24
  misc_feature: MA Experiment 108556 PARAMETER Experiment Name: Zm_Drought_P Parameter: Tissue Value: Aerial
  misc_feature: MA Experiment 108556 PARAMETER Experiment Name: Zm_Drought_P Parameter: Treatment Value: Drought vs. No Drought
  misc_feature: MA Experiment ID: 20000487 Result: Down-regulated in Transcription
  misc_feature: MA Experiment 20000487 PARAMETER Experiment Name: Zm_50mM_NH4NO3_L_to_H_P Parameter: Organism Value: Zea mays
  misc_feature: MA Experiment 20000487 PARAMETER Experiment Name: Zm_50mM_NH4NO3_L_to_H_P Parameter: Timepoint (hr) Value: 4
  misc_feature: MA Experiment 20000487 PARAMETER Experiment Name: Zm_50mM_NH4NO3_L_to_H_P Parameter: Tissue Value: Leaves
  misc_feature: MA Experiment 20000487 PARAMETER Experiment Name: Zm_50mM_NH4NO3_L_to_H_P Parameter: Treatment Value: 50mM NH4NO3 vs. 100mM Mannitol
  misc_feature: MA Experiment ID: 20000535 Result: Up-regulated in Transcription
  misc_feature: MA Experiment 20000535 PARAMETER Experiment Name: Zm_Hybrid_Seed_Dev_P Parameter: DAP Value: 30 vs. 12
  misc_feature: MA Experiment 20000535 PARAMETER Experiment Name: Zm_Hybrid_Seed_Dev_P Parameter: Organism Value: Zea mays
  misc_feature: MA Experiment 20000535 PARAMETER Experiment Name: Zm_Hybrid_Seed_Dev_P Parameter: Plant Line Value: 35A19
  misc_feature: MA Experiment 20000535 PARAMETER Experiment Name: Zm_Hybrid_Seed_Dev_P Parameter: Tissue Value: Embryo vs. Unfert Floret
  misc_feature: MA Experiment ID: 20000626 Result: Down-regulated in Transcription
  misc_feature: MA Experiment 20000626 PARAMETER Experiment Name: Zm_Herbicide-Treatments_P Parameter: Timepoint (hr) Value: 12
  misc_feature: MA Experiment 20000626 PARAMETER Experiment Name: Zm_Herbicide-Treatments_P Parameter: Tissue Value: Aerial
  misc_feature: MA Experiment 20000626 PARAMETER Experiment Name: Zm_Herbicide-Treatments_P Parameter: Treatment Value: Roundup vs. No Treatment
  misc_feature: MA Experiment ID: 20000632 Result: Down-regulated in Transcription
  misc_feature: MA Experiment 20000632 PARAMETER Experiment Name: Zm_Herbicide-Treatments_P Parameter: Timepoint (hr) Value: 4
  misc_feature: MA Experiment 20000632 PARAMETER Experiment Name: Zm_Herbicide-Treatments_P Parameter: Tissue Value: Aerial
  misc_feature: MA Experiment 20000632 PARAMETER Experiment Name: Zm_Herbicide-Treatments_P Parameter: Treatment Value: Glean vs. No Treatment
  misc_feature: MA Experiment ID: 20000633 Result: Down-regulated in Transcription
  misc_feature: MA Experiment 20000633 PARAMETER Experiment Name: Zm_Herbicide-Treatments_P Parameter: Timepoint (hr) Value: 4
  misc_feature: MA Experiment 20000633 PARAMETER Experiment Name: Zm_Herbicide-Treatments_P Parameter: Tissue Value: Aerial
  misc_feature: MA Experiment 20000633 PARAMETER Experiment Name: Zm_Herbicide-Treatments_P Parameter: Treatment Value: Trimec vs. No Treatment
gcacgagaccattacctagaacatcctaatcgaaaaagtttcaaatctcaaatcctcatcgttctcctttccccaaaggccaaaaccgaccccgctccacgcctccactccagccccagcggatcttctcgagcggcggccggcgatggcagcgagcaacatcgggatgatggacggagcctacttcgtcgggcgcaacgagatcctcgcgtggatcaacactacgctgcacctcggcctctccaaggtggaggaggcggcgtcagtcgcggttgcgtgccaactgatggacgcggcgcatcccggcgccgtgccgatgcacaaggtcaacttcgacgccaagacggagtacgacatgatccagaactacaaggtcctgcaggatgtgttcaacaagctcaagatcactaagcatatagaggtgaacaagctaatcaaaggaagaccccttgacaatctggagttcatgcagtggatgaaacgatattgtgattctgtcaatggtggcttcatgagcagctacaatgcttctgagagaagggaaagcagcaaagggggaaaggagacgaacagaagggcatcggtgccctctcacacaccggccaagtctgcatccacaggtcacaaggctcaagcatcacatggcgctaagcgggcaagcgggcagacggcgggtgcaccacagcgcagtgctaagccatcacctgtagccaactctagtggaccagcttatgacgaacaaataactgagctgaagctccttgtggatagcctggagaaggagagagatttctacttttccaagctgcgggacattgagatcttgtgccaaaaccctgaggttgagcacgtgccggtccatgctatccagaacatactctacacatcagaggaggaccctcagcagcaggctccagccctgagccccatcatggaggcgtccgaggagaggccgaagcaagaggcggcgcacaagagaaagagcatctcggacctggacgagtttggtatgtcgtccagctcaaggcagaggctctccgacatctcggacgtgcagctgtgtggatccccgctgacgagtttcagctaaagaaactgtcatctctacaaaatgggtgtctcgtctttctgttggattggttcgtggtttcgtatttcatgtgttgtttggtggtgaactgtcgtgtgctcttagcaaagtgtgacacatttagccacgaaccaaacagcctcttagtctgtgaccagagcgcatgacctcgtctactaatttctctctcagaatcagcttttttttcgtacctattgcgcatcagttgatttttccttctctcttttctttttggccgtatttcatcaggttgcatataaaaaaagtaagatctactggttctggcgttcggctataatgggatctttgatcaggc

SEQ ID NO: 11425 - protein, 314 aa, Zea mays subsp. mays
  peptide (1)..(314): Ceres Seq. ID no. 12376373
  misc_feature (16)..(116): Pfam Name: Calponin homology (CH) domain Pfam Description: Calponin homology (CH) domain
  misc_feature (1)..(303): Homolog of NCBI NO: 37535740 NR Description: putative microtubule-associated protein [Oryza
  misc_feature (3)..(308): Homolog of NCBI NO: 15240262 NR Description: putative protein; protein id: At5g67270.1, by cDNA: 38358. [Arabidopsis thaliana]
  misc_feature (1)..(267): Homolog of NCBI NO: 38344911 NR Description: OSJNBb0079B02.14 [Oryza sativa (japonica
  misc_feature (3)..(249): Homolog of NCBI NO: 32815913 NR Description: At3g47690 [Arabidopsis thaliana]
  misc_feature (3)..(273): Homolog of NCBI NO: 15241860 NR Description: microtubule-associated protein EB1-like protein; id: At5g62500.1, supported by cDNA: 112876. [Arabidopsis
  misc_feature (4)..(250): Homolog of NCBI NO: 29124955 NR Description: microtubule-associated protein EB1 [Chlamydomonas
  misc_feature (3)..(180): Homolog of NCBI NO: 26450360 NR Description: putative microtubule-associated protein EB1
  misc_feature (15)..(250): Homolog of NCBI NO: 12751131 NR Description: EBF3-S [Homo sapiens]
  misc_feature (15)..(250): Homolog of NCBI NO: 10800412 NR Description: microtubule-associated protein, RP/EB family,
  misc_feature (15)..(250): Homolog of NCBI NO: 12751130 NR Description: EBF3-L [Homo sapiens]
MAASNIGMMDGAYFVGRNEILAWINTTLHLGLSKVEEAASVAVACQLMDAAHPGAVPMHKVNFDAKTEYDMIQNYKVLQDVFNKLKITKHIEVNKLIKGRPLDNLEFMQWMKRYCDSVNGGFMSSYNASERRESSKGGKETNRRASVPSHTPAKSASTGHKAQASHGAKRASGQTAGAPQRSAKPSPVANSSGPAYDEQITELKLLVDSLEKERDFYFSKLRDIEILCQNPEVEHVPVHAIQNILYTSEEDPQQQAPALSPIMEASEERPKQEAAHKRKSISDLDEFGMSSSSRQRLSDISDVQLCGSPLTSFS

SEQ ID NO: 11426 - protein, 307 aa, Zea mays subsp. mays
  peptide (1)..(307): Ceres Seq. ID no. 12376374
  misc_feature (9)..(109): Pfam Name: Calponin homology (CH) domain Pfam Description: Calponin homology (CH) domain
  misc_feature (1)..(296): Homolog of NCBI NO: 37535740 NR Description: putative microtubule-associated protein [Oryza
  misc_feature (1)..(301): Homolog of NCBI NO: 15240262 NR Description: putative protein; protein id: At5g67270.1, by cDNA: 38358. [Arabidopsis thaliana]
  misc_feature (1)..(260): Homolog of NCBI NO: 38344911 NR Description: OSJNBb0079B02.14 [Oryza sativa (japonica
  misc_feature (1)..(242): Homolog of NCBI NO: 32815913 NR Description: At3g47690 [Arabidopsis thaliana]
  misc_feature (1)..(266): Homolog of NCBI NO: 15241860 NR Description: microtubule-associated protein EB1-like protein; id: At5g62500.1, supported by cDNA: 112876. [Arabidopsis
  misc_feature (1)..(243): Homolog of NCBI NO: 29124955 NR Description: microtubule-associated protein EB1 [Chlamydomonas
  misc_feature (1)..(173): Homolog of NCBI NO: 26450360 NR Description: putative microtubule-associated protein EB1
  misc_feature (8)..(243): Homolog of NCBI NO: 12751131 NR Description: EBF3-S [Homo sapiens]
  misc_feature (8)..(243): Homolog of NCBI NO: 10800412 NR Description: microtubule-associated protein, RP/EB family,
  misc_feature (8)..(243): Homolog of NCBI NO: 12751130 NR Description: EBF3-L [Homo sapiens]
MMDGAYFVGRNEILAWINTTLHLGLSKVEEAASVAVACQLMDAAHPGAVPMHKVNFDAKTEYDMIQNYKVLQDVFNKLKITKHIEVNKLIKGRPLDNLEFMQWMKRYCDSVNGGFMSSYNASERRESSKGGKETNRRASVPSHTPAKSASTGHKAQASHGAKRASGQTAGAPQRSAKPSPVANSSGPAYDEQITELKLLVDSLEKERDFYFSKLRDIEILCQNPEVEHVPVHAIQNILYTSEEDPQQQAPALSPIMEASEERPKQEAAHKRKSISDLDEFGMSSSSRQRLSDISDVQLCGSPLTSFS

SEQ ID NO: 11427 - protein, 306 aa, Zea mays subsp. mays
  peptide (1)..(306): Ceres Seq. ID no. 12376375
  misc_feature (8)..(108): Pfam Name: Calponin homology (CH) domain Pfam Description: Calponin homology (CH) domain
  misc_feature (1)..(295): Homolog of NCBI NO: 37535740 NR Description: putative microtubule-associated protein [Oryza
  misc_feature (1)..(300): Homolog of NCBI NO: 15240262 NR Description: putative protein; protein id: At5g67270.1, by cDNA: 38358. [Arabidopsis thaliana]
  misc_feature (1)..(259): Homolog of NCBI NO: 38344911 NR Description: OSJNBb0079B02.14 [Oryza sativa (japonica
  misc_feature (1)..(241): Homolog of NCBI NO: 32815913 NR Description: At3g47690 [Arabidopsis thaliana]
  misc_feature (1)..(265): Homolog of NCBI NO: 15241860 NR Description: microtubule-associated protein EB1-like protein; id: At5g62500.1, supported by cDNA: 112876. [Arabidopsis
  misc_feature (1)..(242): Homolog of NCBI NO: 29124955 NR Description: microtubule-associated protein EB1 [Chlamydomonas
  misc_feature (1)..(172): Homolog of NCBI NO: 26450360 NR Description: putative microtubule-associated protein EB1
  misc_feature (7)..(242): Homolog of NCBI NO: 12751131 NR Description: EBF3-S [Homo sapiens]
  misc_feature (7)..(242): Homolog of NCBI NO: 10800412 NR Description: microtubule-associated protein, RP/EB family,
  misc_feature (7)..(242): Homolog of NCBI NO: 12751130 NR Description: EBF3-L [Homo sapiens]
MDGAYFVGRNEILAWINTTLHLGLSKVEEAASVAVACQLMDAAHPGAVPMHKVNFDAKTEYDMIQNYKVLQDVFNKLKITKHIEVNKLIKGRPLDNLEFMQWMKRYCDSVNGGFMSSYNASERRESSKGGKETNRRASVPSHTPAKSASTGHKAQASHGAKRASGQTAGAPQRSAKPSPVANSSGPAYDEQITELKLLVDSLEKERDFYFSKLRDIEILCQNPEVEHVPVHAIQNILYTSEEDPQQQAPALSPIMEASEERPKQEAAHKRKSISDLDEFGMSSSSRQRLSDISDVQLCGSPLTSFS

SEQ ID NO: 11428 - DNA, 1206 bp, Zea mays subsp. mays
  misc_feature (1)..(1206): Ceres Seq. ID no. 12411839
  misc_feature: MA Experiment ID: 108527 Result: Down-regulated in Transcription
  misc_feature: MA Experiment 108527 PARAMETER Experiment Name: Zm_5mM_NO_P Parameter: Age (day) Value: 8
  misc_feature: MA Experiment 108527 PARAMETER Experiment Name: Zm_5mM_NO_P Parameter: Organism Value: Zea mays
  misc_feature: MA Experiment 108527 PARAMETER Experiment Name: Zm_5mM_NO_P Parameter: Plant Line Value: 35A19
  misc_feature: MA Experiment 108527 PARAMETER Experiment Name: Zm_5mM_NO_P Parameter: Timepoint (hr) Value: 6
  misc_feature: MA Experiment 108527 PARAMETER Experiment Name: Zm_5mM_NO_P Parameter: Tissue Value: Aerial
  misc_feature: MA Experiment 108527 PARAMETER Experiment Name: Zm_5mM_NO_P Parameter: Treatment Value: 5mM NO vs. No Treatment
  misc_feature: MA Experiment ID: 108535 Result: Down-regulated in Transcription
  misc_feature: MA Experiment 108535 PARAMETER Experiment Name: Zm_Meristem_P Parameter: Age (day) Value: 8
  misc_feature: MA Experiment 108535 PARAMETER Experiment Name: Zm_Meristem_P Parameter: Organism Value: Zea mays
  misc_feature: MA Experiment 108535 PARAMETER Experiment Name: Zm_Meristem_P Parameter: Plant Line Value: 35A19
  misc_feature: MA Experiment 108535 PARAMETER Experiment Name: Zm_Meristem_P Parameter: Tissue Value: Root Meristem vs. Above Root Meristem
  misc_feature: MA Experiment ID: 108543 Result: Up-regulated in Transcription
  misc_feature: MA Experiment ID: 108544 Result: Up-regulated in Transcription
  misc_feature: MA Experiment ID: 108556 Result: Down-regulated in Transcription
  misc_feature: MA Experiment 108556 PARAMETER Experiment Name: Zm_Drought_P Parameter: Age (day) Value: 9
  misc_feature: MA Experiment 108556 PARAMETER Experiment Name: Zm_Drought_P Parameter: Organism Value: Zea mays
  misc_feature: MA Experiment 108556 PARAMETER Experiment Name: Zm_Drought_P Parameter: Plant Line Value: 35A19
  misc_feature: MA Experiment 108556 PARAMETER Experiment Name: Zm_Drought_P Parameter: Timepoint (hr) Value: 24
  misc_feature: MA Experiment 108556 PARAMETER Experiment Name: Zm_Drought_P Parameter: Tissue Value: Aerial
  misc_feature: MA Experiment 108556 PARAMETER Experiment Name: Zm_Drought_P Parameter: Treatment Value: Drought vs. No Drought
  misc_feature: MA Experiment ID: 108559 Result: Down-regulated in Transcription
  misc_feature: MA Experiment 108559 PARAMETER Experiment Name: Zm_5mM_NO_P Parameter: Age (day) Value: 8
  misc_feature: MA Experiment 108559 PARAMETER Experiment Name: Zm_5mM_NO_P Parameter: Organism Value: Zea mays
  misc_feature: MA Experiment 108559 PARAMETER Experiment Name: Zm_5mM_NO_P Parameter: Plant Line Value: 35A19
  misc_feature: MA Experiment 108559 PARAMETER Experiment Name: Zm_5mM_NO_P Parameter: Timepoint (hr) Value: 12
  misc_feature: MA Experiment 108559 PARAMETER Experiment Name: Zm_5mM_NO_P Parameter: Tissue Value: Aerial
  misc_feature: MA Experiment 108559 PARAMETER Experiment Name: Zm_5mM_NO_P Parameter: Treatment Value: 5mM NO vs. No Treatment
  misc_feature: MA Experiment ID: 20000480 Result: Down-regulated in Transcription
  misc_feature: MA Experiment 20000480 PARAMETER Experiment Name: Zm_Drought_P Parameter: Age (day) Value: 11
  misc_feature: MA Experiment 20000480 PARAMETER Experiment Name: Zm_Drought_P Parameter: Organism Value: Zea mays
  misc_feature: MA Experiment 20000480 PARAMETER Experiment Name: Zm_Drought_P Parameter: Plant Line Value: 35A19
  misc_feature: MA Experiment 20000480 PARAMETER Experiment Name: Zm_Drought_P Parameter: Timepoint (hr) Value: 72
  misc_feature: MA Experiment 20000480 PARAMETER Experiment Name: Zm_Drought_P Parameter: Tissue Value: Aerial
  misc_feature: MA Experiment 20000480 PARAMETER Experiment Name: Zm_Drought_P Parameter: Treatment Value: Drought vs. No Drought
  misc_feature: MA Experiment ID: 20000492 Result: Down-regulated in Transcription
  misc_feature: MA Experiment 20000492 PARAMETER Experiment Name: Zm_Hybrid_Seed_Dev_P Parameter: DAP Value: 12
  misc_feature: MA Experiment 20000492 PARAMETER Experiment Name: Zm_Hybrid_Seed_Dev_P Parameter: Organism Value: Zea mays
  misc_feature: MA Experiment 20000492 PARAMETER Experiment Name: Zm_Hybrid_Seed_Dev_P Parameter: Plant Line Value: 35A19
  misc_feature: MA Experiment 20000492 PARAMETER Experiment Name: Zm_Hybrid_Seed_Dev_P Parameter: Tissue Value: Fert Kernel vs. Unfert Floret
  misc_feature: MA Experiment ID: 20000535 Result: Down-regulated in Transcription
  misc_feature: MA Experiment 20000535 PARAMETER Experiment Name: Zm_Hybrid_Seed_Dev_P Parameter: DAP Value: 30 vs. 12
  misc_feature: MA Experiment 20000535 PARAMETER Experiment Name: Zm_Hybrid_Seed_Dev_P Parameter: Organism Value: Zea mays
  misc_feature: MA Experiment 20000535 PARAMETER Experiment Name: Zm_Hybrid_Seed_Dev_P Parameter: Plant Line Value: 35A19
  misc_feature: MA Experiment 20000535 PARAMETER Experiment Name: Zm_Hybrid_Seed_Dev_P Parameter: Tissue Value: Embryo vs. Unfert Floret
gtgcctcggcccaagtgctaacgcccaactgccaaggcggggaggggggatccggtgcgcgcgcgcgcggaaatgaacaccggctgattagtaggtgggagatcgaggtcgcgcccttgccccacacgccactaaaggccgcgccgacgggctcatcaggcgctctggacgggctcgcttctgccgctccgcgcttgtgcggtgggtgaagtgctgctgctggtgcgggaagcgtcgccaaacgtgcagaccttggtgggggagcgaggagtcgaaacaagggtaagaaccatgagtgaaacagggcacactgtacaagtcactaacctctcgagcagagtatctgaaagtgatctttatgagttcttttcgttctctggccctattgaacatgttgaacttatcagatcaggagaatacggtgctactgcttatgtgacattcaaggagcgctttgccttggaaactgcggtattgctcagtggagctactattgtggatcagccggtatgcataacttattggggacaacctgaggagacttttaatttctgggacaggccaacttgggaggttgaagaggaaattgaatacacgagttatcaatcatgccagtacaacactactccgcaggaagctcttacagtggctcaagatatcgtgaagacgatgctagcaaaggggtacgtgctcagcaaggacgctttggctaaggctagagcctttgatgagtcccgcggattaacagctgcagctgcagccaaggctgcagagctgagcaagagaattggtttaactgacagggtcagtgctggtgtcggtgcaatgcgatcggtcgatgagacatatcgcgtaacggagacgaccaagacggtagctactgccactggaataactgcagctaaggtggtaaatggtatcgtcaccagcagctacttctctgcaggagccatgatgttgtctgatgctcttactagggctgccaaggccgcggctgatctggccgctcatggcagacagagttaagtgaaaaacaaaacatacaatccatcctttttcagttactaaacatgaggacgaacaccttaataggatgcttgaagtgttgttgttcgatgtatatttataacagacaacattgttgatttgttgtataaattaaaaggagacgtacactgcgtttgcactaataagtttgattattgc

SEQ ID NO: 11429 - protein, 244 aa, Zea mays subsp. mays
  peptide (1)..(244): Ceres Seq. ID no. 12411840
  misc_feature (8)..(76): Pfam Name: RNA recognition motif. (a.k.a. RRM, RBD, or RNP domain) Pfam Description: RNA recognition motif. (a.k.a. RRM, RBD, or RNP
  misc_feature (1)..(244): Homolog of NCBI NO: 38344906 NR Description: OSJNBb0079B02.9 [Oryza sativa (japonica
  misc_feature (5)..(243): Homolog of NCBI NO: 18394102 NR Description: RRM-containing protein; protein id: At1g14340.1, by cDNA: 9495., supported by cDNA: gi_15292970, supported by gi_20259676 [Arabidopsis thaliana] >gi|15292971|gb|AAK93596.1|
  misc_feature (5)..(243): Homolog of NCBI NO: 21618045 NR Description: unknown [Arabidopsis thaliana]
  misc_feature (5)..(239): Homolog of NCBI NO: 25518024 NR Description: F14L17.11 protein - Arabidopsis thaliana Contains similarity to Vip1 protein from Schizosaccharomyces gb|Y13635.1 and contains a RNA recognition motif PF|00076. EST
  misc_feature (1)..(241): Homolog of NCBI NO: 6714467 NR Description: unknown protein [Arabidopsis thaliana]
  misc_feature (7)..(243): Homolog of NCBI NO: 18414951 NR Description: RRM-containing protein; protein id: At4g17720.1, by cDNA: 39922. [Arabidopsis thaliana]
  misc_feature (7)..(239): Homolog of NCBI NO: 18071362 NR Description: putative splicing regulatory protein [Oryza
  misc_feature (7)..(237): Homolog of NCBI NO: 34897896 NR Description: ESTs D15336(C0474),C98053(C0474) correspond to a of the predicted gene.~Similar to Arabidopsis thaliana DNA
  misc_feature (2)..(243): Homolog of NCBI NO: 38347069 NR Description: OSJNBa0006A01.10 [Oryza sativa (japonica
  misc_feature (7)..(243): Homolog of NCBI NO: 8809670 NR Description: gene_id:MSD23.5~pir||C71447~similar to unknown
MSETGHTVQVTNLSSRVSESDLYEFFSFSGPIEHVELIRSGEYGATAYVTFKERFALETAVLLSGATIVDQPVCITYWGQPEETFNFWDRPTWEVEEEIEYTSYQSCQYNTTPQEALTVAQDIVKTMLAKGYVLSKDALAKARAFDESRGLTAAAAAKAAELSKRIGLTDRVSAGVGAMRSVDETYRVTETTKTVATATGITAAKVVNGIVTSSYFSAGAMMLSDALTRAAKAAADLAAHGRQS

SEQ ID NO: 11430 - DNA, 962 bp, Zea mays subsp. mays
  misc_feature (1)..(962): Ceres Seq. ID no. 13499139
  misc_feature: MA Experiment ID: 108528 Result: Down-regulated in Transcription
  misc_feature: MA Experiment 108528 PARAMETER Experiment Name: Zm_Imbibed_Seeds_P Parameter: Age (day) Value: 5 vs. 2
  misc_feature: MA Experiment 108528 PARAMETER Experiment Name: Zm_Imbibed_Seeds_P Parameter: Organism Value: Zea mays
  misc_feature: MA Experiment 108528 PARAMETER Experiment Name: Zm_Imbibed_Seeds_P Parameter: Plant Line Value: 35A19
  misc_feature: MA Experiment 108528 PARAMETER Experiment Name: Zm_Imbibed_Seeds_P Parameter: Tissue Value: Aerial vs. Embryo
  misc_feature: MA Experiment ID: 108530 Result: Down-regulated in Transcription
  misc_feature: MA Experiment 108530 PARAMETER Experiment Name: Zm_Imbibed_Seeds_P Parameter: Age (day) Value: 6 vs. 2
  misc_feature: MA Experiment 108530 PARAMETER Experiment Name: Zm_Imbibed_Seeds_P Parameter: Organism Value: Zea mays
  misc_feature: MA Experiment 108530 PARAMETER Experiment Name: Zm_Imbibed_Seeds_P Parameter: Plant Line Value: 35A19
  misc_feature: MA Experiment 108530 PARAMETER Experiment Name: Zm_Imbibed_Seeds_P Parameter: Tissue Value: Aerial vs. Embryo
  misc_feature: MA Experiment ID: 108534 Result: Up-regulated in Transcription
  misc_feature: MA Experiment 108534 PARAMETER Experiment Name: Zm_4deg_Cold_P Parameter: Age (hr) Value: 8
  misc_feature: MA Experiment 108534 PARAMETER Experiment Name: Zm_4deg_Cold_P Parameter: Organism Value: Zea mays
  misc_feature: MA Experiment 108534 PARAMETER Experiment Name: Zm_4deg_Cold_P Parameter: Plant Line Value: 35A19
  misc_feature: MA Experiment 108534 PARAMETER Experiment Name: Zm_4deg_Cold_P Parameter: Temperature (deg C) Value: 4 vs. 22
  misc_feature: MA Experiment 108534 PARAMETER Experiment Name: Zm_4deg_Cold_P Parameter: Timepoint (hr) Value: 6
  misc_feature: MA Experiment 108534 PARAMETER Experiment Name: Zm_4deg_Cold_P Parameter: Tissue Value: Aerial
  misc_feature: MA Experiment ID: 108535 Result: Up-regulated in Transcription
  misc_feature: MA Experiment 108535 PARAMETER Experiment Name: Zm_Meristem_P Parameter: Age (day) Value: 8
  misc_feature: MA Experiment 108535 PARAMETER Experiment Name: Zm_Meristem_P Parameter: Organism Value: Zea mays
  misc_feature: MA Experiment 108535 PARAMETER Experiment Name: Zm_Meristem_P Parameter: Plant Line Value: 35A19
  misc_feature: MA Experiment 108535 PARAMETER Experiment Name: Zm_Meristem_P Parameter: Tissue Value: Root Meristem vs. Above Root Meristem
  misc_feature: MA Experiment ID: 108543 Result: Up-regulated in Transcription
  misc_feature: MA Experiment ID: 108544 Result: Down-regulated in Transcription
  misc_feature: MA Experiment ID: 108545 Result: Down-regulated in Transcription
  misc_feature: MA Experiment 108545 PARAMETER Experiment Name: Zm_Imbibed_Seeds_P Parameter: Age (day) Value: 3 vs. 2
  misc_feature: MA Experiment 108545 PARAMETER Experiment Name: Zm_Imbibed_Seeds_P Parameter: Organism Value: Zea mays
  misc_feature: MA Experiment 108545 PARAMETER Experiment Name: Zm_Imbibed_Seeds_P Parameter: Plant Line Value: 35A19
  misc_feature: MA Experiment 108545 PARAMETER Experiment Name: Zm_Imbibed_Seeds_P Parameter: Tissue Value: Aerial vs. Embryo
  misc_feature: MA Experiment ID: 108556 Result: Down-regulated in Transcription
  misc_feature: MA Experiment 108556 PARAMETER Experiment Name: Zm_Drought_P Parameter: Age (day) Value: 9
  misc_feature: MA Experiment 108556 PARAMETER Experiment Name: Zm_Drought_P Parameter: Organism Value: Zea mays
  misc_feature: MA Experiment 108556 PARAMETER Experiment Name: Zm_Drought_P Parameter: Plant Line Value: 35A19
  misc_feature: MA Experiment 108556 PARAMETER Experiment Name: Zm_Drought_P Parameter: Timepoint (hr) Value: 24
  misc_feature: MA Experiment 108556 PARAMETER Experiment Name: Zm_Drought_P Parameter: Tissue Value: Aerial
  misc_feature: MA Experiment 108556 PARAMETER Experiment Name: Zm_Drought_P Parameter: Treatment Value: Drought vs. No Drought
  misc_feature: MA Experiment ID: 108687 Result: Down-regulated in Transcription
  misc_feature: MA Experiment 108687 PARAMETER Experiment Name: Zm_Embryos-Flowers__P Parameter: Tissue Value: Embryo vs. Aerial+
  misc_feature: MA Experiment ID: 108689 Result: Down-regulated in Transcription
  misc_feature: MA Experiment 108689 PARAMETER Experiment Name: Zm_Drought_Roots_P Parameter: Age (day) Value: 9
  misc_feature: MA Experiment 108689 PARAMETER Experiment Name: Zm_Drought_Roots_P Parameter: Organism Value: Zea mays
  misc_feature: MA Experiment 108689 PARAMETER Experiment Name: Zm_Drought_Roots_P Parameter: Plant Line Value: 35A19
  misc_feature: MA Experiment 108689 PARAMETER Experiment Name: Zm_Drought_Roots_P Parameter: Timepoint (hr) Value: 24
  misc_feature: MA Experiment 108689 PARAMETER Experiment Name: Zm_Drought_Roots_P Parameter: Tissue Value: Roots
  misc_feature: MA Experiment 108689 PARAMETER Experiment Name: Zm_Drought_Roots_P Parameter: Treatment Value: Drought vs. No Drought
  misc_feature: MA Experiment ID: 20000108 Result: Up-regulated in Transcription
  misc_feature: MA Experiment 20000108 PARAMETER Experiment Name: Zm_Root-Tips_P Parameter: Age (day) Value: 12
  misc_feature: MA Experiment 20000108 PARAMETER Experiment Name: Zm_Root-Tips_P Parameter: Organism Value: Zea mays
  misc_feature: MA Experiment 20000108 PARAMETER Experiment Name: Zm_Root-Tips_P Parameter: Tissue Value: Root tips vs. Root mid region    35
  misc_feature: MA Experiment 20000108 PARAMETER Experiment Name: Zm_Root-Tips_P Parameter: Tissue Value: Root tips vs. Root mid region   Sequence Listing-Misc Features (4)
  misc_feature: MA Experiment ID: 20000477 Result: Down-regulated in Transcription
  misc_feature: MA Experiment 20000477 PARAMETER Experiment Name: Zm_5mM_SA_P Parameter: Age (day) Value: 10
  misc_feature: MA Experiment 20000477 PARAMETER Experiment Name: Zm_5mM_SA_P Parameter: Organism Value: Zea mays
  misc_feature: MA Experiment 20000477 PARAMETER Experiment Name: Zm_5mM_SA_P Parameter: Plant Line Value: 35A19
  misc_feature: MA Experiment 20000477 PARAMETER Experiment Name: Zm_5mM_SA_P Parameter: Timepoint (hr) Value: 48
  misc_feature: MA Experiment 20000477 PARAMETER Experiment Name: Zm_5mM_SA_P Parameter: Tissue Value: Aerial
  misc_feature: MA Experiment 20000477 PARAMETER Experiment Name: Zm_5mM_SA_P Parameter: Treatment Value: 5mM SA vs. No Treatment
  misc_feature: MA Experiment ID: 20000478 Result: Down-regulated in Transcription
  misc_feature: MA Experiment 20000478 PARAMETER Experiment Name: Zm_5mM_SA_P Parameter: Age (day) Value: 11
  misc_feature: MA Experiment 20000478 PARAMETER Experiment Name: Zm_5mM_SA_P Parameter: Organism Value: Zea mays
  misc_feature: MA Experiment 20000478 PARAMETER Experiment Name: Zm_5mM_SA_P Parameter: Plant Line Value: 35A19
  misc_feature: MA Experiment 20000478 PARAMETER Experiment Name: Zm_5mM_SA_P Parameter: Timepoint (hr) Value: 72
  misc_feature: MA Experiment 20000478 PARAMETER Experiment Name: Zm_5mM_SA_P Parameter: Tissue Value: Aerial
  misc_feature: MA Experiment 20000478 PARAMETER Experiment Name: Zm_5mM_SA_P Parameter: Treatment Value: 5mM SA vs. No Treatment
  misc_feature: MA Experiment ID: 20000492 Result: Down-regulated in Transcription
  misc_feature: MA Experiment 20000492 PARAMETER Experiment Name: Zm_Hybrid_Seed_Dev_P Parameter: DAP Value: 12
  misc_feature: MA Experiment 20000492 PARAMETER Experiment Name: Zm_Hybrid_Seed_Dev_P Parameter: Organism Value: Zea mays
  misc_feature: MA Experiment 20000492 PARAMETER Experiment Name: Zm_Hybrid_Seed_Dev_P Parameter: Plant Line Value: 35A19
  misc_feature: MA Experiment 20000492 PARAMETER Experiment Name: Zm_Hybrid_Seed_Dev_P Parameter: Tissue Value: Fert Kernel vs. Unfert Floret
  misc_feature: MA Experiment ID: 20000535 Result: Down-regulated in Transcription
  misc_feature: MA Experiment 20000535 PARAMETER Experiment Name: Zm_Hybrid_Seed_Dev_P Parameter: DAP Value: 30 vs. 12
  misc_feature: MA Experiment 20000535 PARAMETER Experiment Name: Zm_Hybrid_Seed_Dev_P Parameter: Organism Value: Zea mays
  misc_feature: MA Experiment 20000535 PARAMETER Experiment Name: Zm_Hybrid_Seed_Dev_P Parameter: Plant Line Value: 35A19
  misc_feature: MA Experiment 20000535 PARAMETER Experiment Name: Zm_Hybrid_Seed_Dev_P Parameter: Tissue Value: Embryo vs. Unfert Floret
acgtacgtataggccggcgggaacgcgtaccaggtgccggcggggcggcgggacgggtccgtgtcgcgcgcgtcggacaccagcaacctgccgccgccgacggccaacgtcgcgcagctcacgcagatcttcggcaccaagggcctgacgcagaaggagatggtcatcctgtcgggcgcgcacaccatcggctcctcgcactgcagctccttcagcggccggctgtcggggtcggccacgacggcgggcgggcaggacccgaccatggaccccgcgtacgtggcgcagctggcgcggcagtgcccgcagggcggcgacccgctcgtgcccatggactacgtctcccccaacgccttcgacgagggcttctacaagggcgtcatggccaaccggggcctgctgtcctcggaccaggcgctgctcagcgacaagaacaccgccgtgcaggtcgtcacctacgccaacgacccggccaccttccaggccgacttcgccgccgccatggtcaagatgggctccgtcggcgtgctcaccggcaccagcggcaaggtcagggccaactgcagagtcgcctgattcatcgtcatcactcgtgtggagttgtagattcattatattgattgatttggaccggacgacgtcgacgggatgctacatggcctgcttgcgcaattgtatgtatgcctgtacttgcgcgtgtatgggtttcgctgtgcaaattttcgttgtctcccccgattgattgaggcgtgtgtgcgtgtgtgtctcttctgaatctgaatggaaaatctgtaacctgagctaaaactgctcgtgtactacccaatagttgcttcaaactacgatggatttttattcaaactatcacttccaaacacgcacaaatatgtactcaatcaactagggatcggagaaactggtttgtaaagggaattttataaacacaagctattcagacatgt

SEQ ID NO: 11431 - protein, 205 aa, Zea mays subsp. mays
  peptide (1)..(205): Ceres Seq. ID no. 13499140
VRIGRRERVPGAGGAAGRVRVARVGHQQPAAADGQRRAAHADLRHQGPDAEGDGHPVGRAHHRLLALQLLQRPAVGVGHDGGRAGPDHGPRVRGAAGAAVPAGRRPARAHGLRLPQRLRRGLLQGRHGQPGPAVLGPGAAQRQEHRRAGRHLRQRPGHLPGRLRRRHGQDGLRRRAHRHQRQGQGQLQSRLIHRHHSCGVVDSLY

SEQ ID NO: 11432 - protein, 138 aa, Zea mays subsp. mays
  peptide (1)..(138): Ceres Seq. ID no. 13499141
  misc_feature (1)..(103): Pfam Name: Peroxidase Pfam Description: Peroxidase
  misc_feature (1)..(138): Homolog of NCBI NO: 37536450 NR Description: putative peroxidase [Oryza sativa (japonica >gi|18057099|gb|AAL58122.1| putative peroxidase [Oryza sativa
  misc_feature (1)..(138): Homolog of NCBI NO: 34902230 NR Description: Putative peroxidase [Oryza sativa (japonica >gi|21426120|gb|AAM52317.1| Putative peroxidase [Oryza sativa
  misc_feature (1)..(138): Homolog of NCBI NO: 34902232 NR Description: Putative peroxidase [Oryza sativa (japonica >gi|21426121|gb|AAM52318.1| Putative peroxidase [Oryza sativa
  misc_feature (1)..(137): Homolog of NCBI NO: 4760700 NR Description: peroxidase 1 [Scutellaria baicalensis]
  misc_feature (1)..(137): Homolog of NCBI NO: 7453849 NR Description: peroxidase prx12 precursor [Spinacia oleracea]
  misc_feature (1)..(135): Homolog of NCBI NO: 34902236 NR Description: Putative peroxidase [Oryza sativa (japonica >gi|21426123|gb|AAM52320.1| Putative peroxidase [Oryza sativa
  misc_feature (1)..(137): Homolog of NCBI NO: 34915488 NR Description: peroxidase-like protein [Oryza sativa (japonica group)] >gi|22324453|dbj|BAC10368.1| putative peroxidase 1
  misc_feature (1)..(137): Homolog of NCBI NO: 34915320 NR Description: putative peroxidase [Oryza sativa (japonica >gi|22831350|dbj|BAC16194.1| putative peroxidase [Oryza sativa
  misc_feature (1)..(135): Homolog of NCBI NO: 28629828 NR Description: peroxidase 1 [Artemisia annua]
  misc_feature (1)..(137): Homolog of NCBI NO: 5453379 NR Description: bacterial-induced peroxidase precursor [Gossypium
MVILSGAHTIGSSHCSSFSGRLSGSATTAGGQDPTMDPAYVAQLARQCPQGGDPLVPMDYVSPNAFDEGFYKGVMANRGLLSSDQALLSDKNTAVQVVTYANDPATFQADFAAAMVKMGSVGVLTGTSGKVRANCRVA

SEQ ID NO: 11433 - protein, 103 aa, Zea mays subsp. mays
  peptide (1)..(103): Ceres Seq. ID no. 13499142
  misc_feature (1)..(68): Pfam Name: Peroxidase Pfam Description: Peroxidase
  misc_feature (1)..(103): Homolog of NCBI NO: 34902232 NR Description: Putative peroxidase [Oryza sativa (japonica >gi|21426121|gb|AAM52318.1| Putative peroxidase [Oryza sativa
  misc_feature (1)..(102): Homolog of NCBI NO: 4760700 NR Description: peroxidase 1 [Scutellaria baicalensis]
  misc_feature (1)..(102): Homolog of NCBI NO: 7453849 NR Description: peroxidase prx12 precursor [Spinacia oleracea]
  misc_feature (1)..(100): Homolog of NCBI NO: 34902236 NR Description: Putative peroxidase [Oryza sativa (japonica >gi|21426123|gb|AAM52320.1| Putative peroxidase [Oryza sativa
  misc_feature (1)..(103): Homolog of NCBI NO: 37536450 NR Description: putative peroxidase [Oryza sativa (japonica >gi|18057099|gb|AAL58122.1| putative peroxidase [Oryza sativa
  misc_feature (1)..(103): Homolog of NCBI NO: 34902230 NR Description: Putative peroxidase [Oryza sativa (japonica >gi|21426120|gb|AAM52317.1| Putative peroxidase [Oryza sativa
  misc_feature (1)..(102): Homolog of NCBI NO: 34915488 NR Description: peroxidase-like protein [Oryza sativa (japonica group)] >gi|22324453|dbj|BAC10368.1| putative peroxidase 1
  misc_feature (1)..(102): Homolog of NCBI NO: 34915320 NR Description: putative peroxidase [Oryza sativa (japonica >gi|22831350|dbj|BAC16194.1| putative peroxidase [Oryza sativa
  misc_feature (1)..(100): Homolog of NCBI NO: 28629828 NR Description: peroxidase 1 [Artemisia annua]
  misc_feature (1)..(102): Homolog of NCBI NO: 5453379 NR Description: bacterial-induced peroxidase precursor [Gossypium
MDPAYVAQLARQCPQGGDPLVPMDYVSPNAFDEGFYKGVMANRGLLSSDQALLSDKNTAVQVVTYANDPATFQADFAAAMVKMGSVGVLTGTSGKVRANCRVA

SEQ ID NO: 11434 - DNA, 1002 bp, Zea mays subsp. mays
  misc_feature (1)..(1002): Ceres Seq. ID no. 12414761
  misc_feature: MA Experiment ID: 108528 Result: Up-regulated in Transcription
  misc_feature: MA Experiment 108528 PARAMETER Experiment Name: Zm_Imbibed_Seeds_P Parameter: Age (day) Value: 5 vs. 2
  misc_feature: MA Experiment 108528 PARAMETER Experiment Name: Zm_Imbibed_Seeds_P Parameter: Organism Value: Zea mays
  misc_feature: MA Experiment 108528 PARAMETER Experiment Name: Zm_Imbibed_Seeds_P Parameter: Plant Line Value: 35A19
  misc_feature: MA Experiment 108528 PARAMETER Experiment Name: Zm_Imbibed_Seeds_P Parameter: Tissue Value: Aerial vs. Embryo
  misc_feature: MA Experiment ID: 108529 Result: Down-regulated in Transcription
  misc_feature: MA Experiment 108529 PARAMETER Experiment Name: Zm_Imbibed_Seeds_P Parameter: Age (day) Value: 5 vs. 2
  misc_feature: MA Experiment 108529 PARAMETER Experiment Name: Zm_Imbibed_Seeds_P Parameter: Organism Value: Zea mays
  misc_feature: MA Experiment 108529 PARAMETER Experiment Name: Zm_Imbibed_Seeds_P Parameter: Plant Line Value: 35A19
  misc_feature: MA Experiment 108529 PARAMETER Experiment Name: Zm_Imbibed_Seeds_P Parameter: Tissue Value: Roots vs. Embryo
  misc_feature: MA Experiment ID: 108530 Result: Up-regulated in Transcription
  misc_feature: MA Experiment 108530 PARAMETER Experiment Name: Zm_Imbibed_Seeds_P Parameter: Age (day) Value: 6 vs. 2
  misc_feature: MA Experiment 108530 PARAMETER Experiment Name: Zm_Imbibed_Seeds_P Parameter: Organism Value: Zea mays
  misc_feature: MA Experiment 108530 PARAMETER Experiment Name: Zm_Imbibed_Seeds_P Parameter: Plant Line Value: 35A19
  misc_feature: MA Experiment 108530 PARAMETER Experiment Name: Zm_Imbibed_Seeds_P Parameter: Tissue Value: Aerial vs. Embryo
  misc_feature: MA Experiment ID: 108536 Result: Down-regulated in Transcription
  misc_feature: MA Experiment 108536 PARAMETER Experiment Name: Zm_Meristem_P Parameter: Age (day) Value: 8
  misc_feature: MA Experiment 108536 PARAMETER Experiment Name: Zm_Meristem_P Parameter: Organism Value: Zea mays
  misc_feature: MA Experiment 108536 PARAMETER Experiment Name: Zm_Meristem_P Parameter: Plant Line Value: 35A19
  misc_feature: MA Experiment 108536 PARAMETER Experiment Name: Zm_Meristem_P Parameter: Tissue Value: Shoot Meristem vs. Above Shoot Meristem
  misc_feature: MA Experiment ID: 108543 Result: Up-regulated in Transcription
  misc_feature: MA Experiment ID: 108545 Result: Up-regulated in Transcription
  misc_feature: MA Experiment 108545 PARAMETER Experiment Name: Zm_Imbibed_Seeds_P Parameter: Age (day) Value: 3 vs. 2
  misc_feature: MA Experiment 108545 PARAMETER Experiment Name: Zm_Imbibed_Seeds_P Parameter: Organism Value: Zea mays
  misc_feature: MA Experiment 108545 PARAMETER Experiment Name: Zm_Imbibed_Seeds_P Parameter: Plant Line Value: 35A19
  misc_feature: MA Experiment 108545 PARAMETER Experiment Name: Zm_Imbibed_Seeds_P Parameter: Tissue Value: Aerial vs. Embryo
  misc_feature: MA Experiment ID: 108546 Result: Down-regulated in Transcription
  misc_feature: MA Experiment 108546 PARAMETER Experiment Name: Zm_Imbibed_Seeds_P Parameter: Age (day) Value: 3 vs. 2
  misc_feature: MA Experiment 108546 PARAMETER Experiment Name: Zm_Imbibed_Seeds_P Parameter: Organism Value: Zea mays
  misc_feature: MA Experiment 108546 PARAMETER Experiment Name: Zm_Imbibed_Seeds_P Parameter: Plant Line Value: 35A19
  misc_feature: MA Experiment 108546 PARAMETER Experiment Name: Zm_Imbibed_Seeds_P Parameter: Tissue Value: Roots vs. Embryo
  misc_feature: MA Experiment ID: 108547 Result: Up-regulated in Transcription
  misc_feature: MA Experiment 108547 PARAMETER Experiment Name: Zm_Imbibed_Seeds_P Parameter: Age (day) Value: 4 vs. 2
  misc_feature: MA Experiment 108547 PARAMETER Experiment Name: Zm_Imbibed_Seeds_P Parameter: Organism Value: Zea mays
  misc_feature: MA Experiment 108547 PARAMETER Experiment Name: Zm_Imbibed_Seeds_P Parameter: Plant Line Value: 35A19
  misc_feature: MA Experiment 108547 PARAMETER Experiment Name: Zm_Imbibed_Seeds_P Parameter: Tissue Value: Aerial vs. Embryo
  misc_feature: MA Experiment ID: 108556 Result: Down-regulated in Transcription
  misc_feature: MA Experiment 108556 PARAMETER Experiment Name: Zm_Drought_P Parameter: Age (day) Value: 9
  misc_feature: MA Experiment 108556 PARAMETER Experiment Name: Zm_Drought_P Parameter: Organism Value: Zea mays
  misc_feature: MA Experiment 108556 PARAMETER Experiment Name: Zm_Drought_P Parameter: Plant Line Value: 35A19
  misc_feature: MA Experiment 108556 PARAMETER Experiment Name: Zm_Drought_P Parameter: Timepoint (hr) Value: 24
  misc_feature: MA Experiment 108556 PARAMETER Experiment Name: Zm_Drought_P Parameter: Tissue Value: Aerial
  misc_feature: MA Experiment 108556 PARAMETER Experiment Name: Zm_Drought_P Parameter: Treatment Value: Drought vs. No Drought
  misc_feature: MA Experiment ID: 108559 Result: Down-regulated in Transcription
  misc_feature: MA Experiment 108559 PARAMETER Experiment Name: Zm_5mM_NO_P Parameter: Age (day) Value: 8
  misc_feature: MA Experiment 108559 PARAMETER Experiment Name: Zm_5mM_NO_P Parameter: Organism Value: Zea mays
  misc_feature: MA Experiment 108559 PARAMETER Experiment Name: Zm_5mM_NO_P Parameter: Plant Line Value: 35A19
  misc_feature: MA Experiment 108559 PARAMETER Experiment Name: Zm_5mM_NO_P Parameter: Timepoint (hr) Value: 12
  misc_feature: MA Experiment 108559 PARAMETER Experiment Name: Zm_5mM_NO_P Parameter: Tissue Value: Aerial
  misc_feature: MA Experiment 108559 PARAMETER Experiment Name: Zm_5mM_NO_P Parameter: Treatment Value: 5mM NO vs. No Treatment
  misc_feature: MA Experiment ID: 20000478 Result: Down-regulated in Transcription
  misc_feature: MA Experiment 20000478 PARAMETER Experiment Name: Zm_5mM_SA_P Parameter: Age (day) Value: 11
  misc_feature: MA Experiment 20000478 PARAMETER Experiment Name: Zm_5mM_SA_P Parameter: Organism Value: Zea mays
  misc_feature: MA Experiment 20000478 PARAMETER Experiment Name: Zm_5mM_SA_P Parameter: Plant Line Value: 35A19
  misc_feature: MA Experiment 20000478 PARAMETER Experiment Name: Zm_5mM_SA_P Parameter: Timepoint (hr) Value: 72
  misc_feature: MA Experiment 20000478 PARAMETER Experiment Name: Zm_5mM_SA_P Parameter: Tissue Value: Aerial
  misc_feature: MA Experiment 20000478 PARAMETER Experiment Name: Zm_5mM_SA_P Parameter: Treatment Value: 5mM SA vs. No Treatment
  misc_feature: MA Experiment ID: 20000480 Result: Down-regulated in Transcription
  misc_feature: MA Experiment 20000480 PARAMETER Experiment Name: Zm_Drought_P Parameter: Age (day) Value: 11
  misc_feature: MA Experiment 20000480 PARAMETER Experiment Name: Zm_Drought_P Parameter: Organism Value: Zea mays
  misc_feature: MA Experiment 20000480 PARAMETER Experiment Name: Zm_Drought_P Parameter: Plant Line Value: 35A19
  misc_feature: MA Experiment 20000480 PARAMETER Experiment Name: Zm_Drought_P Parameter: Timepoint (hr) Value: 72
  misc_feature: MA Experiment 20000480 PARAMETER Experiment Name: Zm_Drought_P Parameter: Tissue Value: Aerial
  misc_feature: MA Experiment 20000480 PARAMETER Experiment Name: Zm_Drought_P Parameter: Treatment Value: Drought vs. No Drought
  misc_feature: MA Experiment ID: 20000626 Result: Down-regulated in Transcription
  misc_feature: MA Experiment 20000626 PARAMETER Experiment Name: Zm_Herbicide-Treatments_P Parameter: Timepoint (hr) Value: 12
  misc_feature: MA Experiment 20000626 PARAMETER Experiment Name: Zm_Herbicide-Treatments_P Parameter: Tissue Value: Aerial
  misc_feature: MA Experiment 20000626 PARAMETER Experiment Name: Zm_Herbicide-Treatments_P Parameter: Treatment Value: Roundup vs. No Treatment
cgcacgggtgacagactgacaggtccgtccgcaaatctgcaacgttgcctcgtcacctctatcctccggtctctcaccgcctaacacggccgccatggccgccgcctccacctcccttccccttggcttctcctctcaccaccgcccaactcccagaatccggccgcagccccagtcccagtcgcaaccactgaaggcaaaaccccttaacccccttcgcttcagcctagccctcaccccggcgaccgcgaagccccgcctcgctgcgatgcccgacgatgtcgctgtcgccaacttcgtggagaaggactggtcgttcctcgagtccgcgggcgcaaacctccagcgcgctctcgcgtcgggggcgctctcgccggcgtcgcgggtgttggcattgacgcccacggcgtccttcgtgaggtcgctcctcgcgtcctcgccctgcgagctactggtggccgcgcatgagtcgatgtacgtgctggcaggggtcaaggaggcgcacgacgaggtgaggtgcttccacctcgagggtgggggcggcggcagaggcggcggcgtggtggaggccgtgccagagaggttcgacgacttcgatgttgtgttcgtgtgctacttccctggaatgggagtctccgcgggggcgctcctcaaatcgctggccaagaggtgctcaaaaggtgcaagagttgtcatgttcttagatcaaggcagacagaattttgagcaacaacggagagagcatcctgatgttgtaacttcggatttgcccagtatagccttcctggagaaggctgcatctgggaacaagtatgaaataacagagttcgttgacgagcctagcttttaccttgctgttttgcagtttcaaggatgatttgttccttttttgcaatatttgtgaagcaaattgtgactgtctgtaaatttgcaatatttgtgaagcaaattgtgactgtctgtaaattctgatggacgtagtttgtgggtggcttatgtcgt

SEQ ID NO: 11435 - protein, 260 aa, Zea mays subsp. mays
  peptide (1)..(260): Ceres Seq. ID no. 12414762
  misc_feature (1)..(259): Homolog of NCBI NO: 34902316 NR Description: Unknown protein [Oryza sativa (japonica
  misc_feature (63)..(257): Homolog of NCBI NO: 15227474 NR Description: hypothetical protein; protein id: At2g41950.1, by cDNA: gi_18491232 [Arabidopsis thaliana]
  misc_feature (63)..(257): Homolog of NCBI NO: 28207164 NR Description: hypothetical protein [Arabidopsis thaliana]
  misc_feature (63)..(196): Homolog of NCBI NO: 28207166 NR Description: hypothetical protein [Arabidopsis thaliana]
MAAASTSLPLGFSSHHRPTPRIRPQPQSQSQPLKAKPLNPLRFSLALTPATAKPRLAAMPDDVAVANFVEKDWSFLESAGANLQRALASGALSPASRVLALTPTASFVRSLLASSPCELLVAAHESMYVLAGVKEAHDEVRCFHLEGGGGGRGGGVVEAVPERFDDFDVVFVCYFPGMGVSAGALLKSLAKRCSKGARVVMFLDQGRQNFEQQRREHPDVVTSDLPSIAFLEKAASGNKYEITEFVDEPSFYLAVLQFQG

SEQ ID NO: 11436 - protein, 202 aa, Zea mays subsp. mays
  peptide (1)..(202): Ceres Seq. ID no. 12414763
  misc_feature (1)..(201): Homolog of NCBI NO: 34902316 NR Description: Unknown protein [Oryza sativa (japonica
  misc_feature (5)..(199): Homolog of NCBI NO: 15227474 NR Description: hypothetical protein; protein id: At2g41950.1, by cDNA: gi_18491232 [Arabidopsis thaliana]
  misc_feature (5)..(199): Homolog of NCBI NO: 28207164 NR Description: hypothetical protein [Arabidopsis thaliana]
  misc_feature (5)..(138): Homolog of NCBI NO: 28207166 NR Description: hypothetical protein [Arabidopsis thaliana]
MPDDVAVANFVEKDWSFLESAGANLQRALASGALSPASRVLALTPTASFVRSLLASSPCELLVAAHESMYVLAGVKEAHDEVRCFHLEGGGGGRGGGVVEAVPERFDDFDVVFVCYFPGMGVSAGALLKSLAKRCSKGARVVMFLDQGRQNFEQQRREHPDVVTSDLPSIAFLEKAASGNKYEITEFVDEPSFYLAVLQFQG

SEQ ID NO: 11437 - protein, 134 aa, Zea mays subsp. mays
  peptide (1)..(134): Ceres Seq. ID no. 12414764
  misc_feature (1)..(133): Homolog of NCBI NO: 34902316 NR Description: Unknown protein [Oryza sativa (japonica
  misc_feature (1)..(131): Homolog of NCBI NO: 15227474 NR Description: hypothetical protein; protein id: At2g41950.1, by cDNA: gi_18491232 [Arabidopsis thaliana]
  misc_feature (1)..(131): Homolog of NCBI NO: 28207164 NR Description: hypothetical protein [Arabidopsis thaliana]
  misc_feature (1)..(70): Homolog of NCBI NO: 28207166 NR Description: hypothetical protein [Arabidopsis thaliana]
MYVLAGVKEAHDEVRCFHLEGGGGGRGGGVVEAVPERFDDFDVVFVCYFPGMGVSAGALLKSLAKRCSKGARVVMFLDQGRQNFEQQRREHPDVVTSDLPSIAFLEKAASGNKYEITEFVDEPSFYLAVLQFQG

SEQ ID NO: 11438 - DNA, 2790 bp, Zea mays subsp. mays
  misc_feature (1)..(2790): Ceres Seq. ID no. 12414791
  misc_feature: MA Experiment ID: 108522 Result: Down-regulated in Transcription
  misc_feature: MA Experiment 108522 PARAMETER Experiment Name: Zm_42deg_Heat_P Parameter: Age (day) Value: 8
  misc_feature: MA Experiment 108522 PARAMETER Experiment Name: Zm_42deg_Heat_P Parameter: Organism Value: Zea mays
  misc_feature: MA Experiment 108522 PARAMETER Experiment Name: Zm_42deg_Heat_P Parameter: Plant Line Value: 35A19
  misc_feature: MA Experiment 108522 PARAMETER Experiment Name: Zm_42deg_Heat_P Parameter: Temperature (deg C) Value: 42 vs. 22
  misc_feature: MA Experiment 108522 PARAMETER Experiment Name: Zm_42deg_Heat_P Parameter: Timepoint (hr) Value: 1
  misc_feature: MA Experiment 108522 PARAMETER Experiment Name: Zm_42deg_Heat_P Parameter: Tissue Value: Aerial
  misc_feature: MA Experiment ID: 108523 Result: Down-regulated in Transcription
  misc_feature: MA Experiment 108523 PARAMETER Experiment Name: Zm_42deg_Heat_P Parameter: Age (day) Value: 8
  misc_feature: MA Experiment 108523 PARAMETER Experiment Name: Zm_42deg_Heat_P Parameter: Organism Value: Zea mays
  misc_feature: MA Experiment 108523 PARAMETER Experiment Name: Zm_42deg_Heat_P Parameter: Plant Line Value: 35A19
  misc_feature: MA Experiment 108523 PARAMETER Experiment Name: Zm_42deg_Heat_P Parameter: Temperature (deg C) Value: 42 vs. 22
  misc_feature: MA Experiment 108523 PARAMETER Experiment Name: Zm_42deg_Heat_P Parameter: Timepoint (hr) Value: 6
  misc_feature: MA Experiment 108523 PARAMETER Experiment Name: Zm_42deg_Heat_P Parameter: Tissue Value: Aerial
  misc_feature: MA Experiment ID: 108527 Result: Down-regulated in Transcription
  misc_feature: MA Experiment 108527 PARAMETER Experiment Name: Zm_5mM_NO_P Parameter: Age (day) Value: 8
  misc_feature: MA Experiment 108527 PARAMETER Experiment Name: Zm_5mM_NO_P Parameter: Organism Value: Zea mays
  misc_feature: MA Experiment 108527 PARAMETER Experiment Name: Zm_5mM_NO_P Parameter: Plant Line Value: 35A19
  misc_feature: MA Experiment 108527 PARAMETER Experiment Name: Zm_5mM_NO_P Parameter: Timepoint (hr) Value: 6
  misc_feature: MA Experiment 108527 PARAMETER Experiment Name: Zm_5mM_NO_P Parameter: Tissue Value: Aerial
  misc_feature: MA Experiment 108527 PARAMETER Experiment Name: Zm_5mM_NO_P Parameter: Treatment Value: 5mM NO vs. No Treatment
  misc_feature: MA Experiment ID: 108529 Result: Down-regulated in Transcription
  misc_feature: MA Experiment 108529 PARAMETER Experiment Name: Zm_Imbibed_Seeds_P Parameter: Age (day) Value: 5 vs. 2
  misc_feature: MA Experiment 108529 PARAMETER Experiment Name: Zm_Imbibed_Seeds_P Parameter: Organism Value: Zea mays
  misc_feature: MA Experiment 108529 PARAMETER Experiment Name: Zm_Imbibed_Seeds_P Parameter: Plant Line Value: 35A19
  misc_feature: MA Experiment 108529 PARAMETER Experiment Name: Zm_Imbibed_Seeds_P Parameter: Tissue Value: Roots vs. Embryo
  misc_feature: MA Experiment ID: 108543 Result: Up-regulated in Transcription
  misc_feature: MA Experiment ID: 108546 Result: Down-regulated in Transcription
  misc_feature: MA Experiment 108546 PARAMETER Experiment Name: Zm_Imbibed_Seeds_P Parameter: Age (day) Value: 3 vs. 2
  misc_feature: MA Experiment 108546 PARAMETER Experiment Name: Zm_Imbibed_Seeds_P Parameter: Organism Value: Zea mays
  misc_feature: MA Experiment 108546 PARAMETER Experiment Name: Zm_Imbibed_Seeds_P Parameter: Plant Line Value: 35A19
  misc_feature: MA Experiment 108546 PARAMETER Experiment Name: Zm_Imbibed_Seeds_P Parameter: Tissue Value: Roots vs. Embryo
  misc_feature: MA Experiment ID: 20000492 Result: Up-regulated in Transcription
  misc_feature: MA Experiment 20000492 PARAMETER Experiment Name: Zm_Hybrid_Seed_Dev_P Parameter: DAP Value: 12
  misc_feature: MA Experiment 20000492 PARAMETER Experiment Name: Zm_Hybrid_Seed_Dev_P Parameter: Organism Value: Zea mays
  misc_feature: MA Experiment 20000492 PARAMETER Experiment Name: Zm_Hybrid_Seed_Dev_P Parameter: Plant Line Value: 35A19
  misc_feature: MA Experiment 20000492 PARAMETER Experiment Name: Zm_Hybrid_Seed_Dev_P Parameter: Tissue Value: Fert Kernel vs. Unfert Floret
  misc_feature: MA Experiment ID: 20000535 Result: Up-regulated in Transcription
  misc_feature: MA Experiment 20000535 PARAMETER Experiment Name: Zm_Hybrid_Seed_Dev_P Parameter: DAP Value: 30 vs. 12
  misc_feature: MA Experiment 20000535 PARAMETER Experiment Name: Zm_Hybrid_Seed_Dev_P Parameter: Organism Value: Zea mays
  misc_feature: MA Experiment 20000535 PARAMETER Experiment Name: Zm_Hybrid_Seed_Dev_P Parameter: Plant Line Value: 35A19
  misc_feature: MA Experiment 20000535 PARAMETER Experiment Name: Zm_Hybrid_Seed_Dev_P Parameter: Tissue Value: Embryo vs. Unfert Floret
gagatgggactcacacgccgtcacaatgctgtgcctcgtgtcgccctcttcctcgccgactccgcttccgccgccgcggcgctctcgctcgcatgctgatcgggcggcaccgccggggatcgcgggtggcggcaatgtgcgcctgagtgtgttgtctgtccagtgcaaggctcgccggtcaggggtgcggaaggtcaagagcaaattcgccactgcagctactgtgcaagaagataaaactatggcaactgccaaaggcgatgtcgaccatctccccatatacgacctggaccccaagctggagatattcaaggaccatttcaggtaccggatgaaaagattcctagagcagaaaggatcaattgaagaaaatgagggaagtcttgaatctttttctaaaggctatttgaaatttgggattaatacaaatgaggatggaactgtatatcgtgaatgggcacctgctgcgcaggaggcagagcttattggtgacttcaatgactggaatggtgcaaaccataagatggagaaggataaatttggtgtttggtcgatcaaaattgaccatgtcaaagggaaacctgccatccctcacaattccaaggttaaatttcgctttctacatggtggagtatgggttgatcgtattccagcattgattcgttatgcgactgttgatgcctctaaatttggagctccctatgatggtgttcattgggatcctcctgcttctgaaaggtacacatttaagcatcctcggccttcaaagcctgctgctccacgtatctatgaagcccatgtaggtatgagtggtgaaaagccagcagtaagcacatatagggaatttgcagacaatgtgttgccacgcatacgagcaaataactacaacacagttcagttgatggcagttatggagcattcgtactatgcttctttcgggtaccatgtgacaaatttctttgcggttagcagcagatcaggcacaccagaggacctcaaatatcttgttgataaggcacacagtttgggtttgcgagttctgatggatgttgtccatagccatgcaagtaataatgtcacagatggtttaaatggctatgatgttggacaaagcacccaagagtcctattttcatgcgggagatagaggttatcataaactttgggatagtcggctgttcaactatgctaactgggaggtattaaggtttcttctttctaacctgagatattggttggatgaattcatgtttgatggcttccgatttgatggagttacatcaatgctgtatcatcaccatggtatcaatgtggggtttactggaaactaccaggaatatttcagtttggacacagctgtggatgcagttgtttacatgatgcttgcaaaccatttaatgcacaaactcttgccagaagcaactgttgttgctgaagatgtttcaggcatgccggtcctttgccggccagttgatgaaggtggggttgggtttgactatcgcctggcaatggctatccctgatagatggattgactacctgaagaataaagatgactctgagtggtcgatgggtgaaatagcgcatactttgactaacaggagatatactgaaaaatgcatcgcatatgctgagagccatgatcagtctattgttggcgacaaaactattgcatttctcctgatggacaaggaaatgtacactggcatgtcagacttgcagcctgcttcacctacaattgatcgagggattgcactccaaaagatgattcacttcatcacaatggcccttggaggtgatggctacttgaattttatgggaaatgagtttggtcacccagaatggattgactttccaagagaagggaacaactggagctatgataaatgcagacgacagtggagccttgtggacactgatcacttgcggtacaagtacatgaatgcgtttgaccaagcgatgaatgcgctcgatgagagattttccttcctttcgtcgtcaaagcagatcgtcagcgacatgaacgatgaggaaaaggttattgtctttgaacgtggagatttagtttttgttttcaatttccatcccaagaaaacttacgagggctacaaagtgggatgcgatttgcctgggaaatacagagtagccctggactctgatgctctggtcttcggtggacatggaagagttggccacgacgtggatcacttcacgtcgcctgaaggggtgccaggggtgcccgaaacgaacttcaacaaccggccgaactcgttcaaagtcctttctccgccccgcacctgtgtggcttattaccgtgtagacgaagcaggggctggacgacgtcttcacgcgaaagcagagacaggaaagacgtctccagcagagagcatcgacgtcaaagcttccagagctagtagcaaagaagacaaggaggcaacggctggtggcaagaagggatggaagtttgcgcggcagccatccgatcaagataccaaatgaagccaggagtccttggtgaggactggactggctgccggcgccctgttagtagtcctgctctactggactagccgccgctggcgcccttggaacggtcctttcctgtagcttgcaggcgactggtgtctcatcaccgagcaggcaggcactgcttgtatagcttttctagaataataatcagggatggatggatggtgtgtattggctatctggctagacgtgcatgtgcccagtttgtatgtacaggagcagttcccgtccagaataaaaaaaaacttgttggggggtttttc

SEQ ID NO: 11439 - protein, 831 aa, Zea mays subsp. mays
  peptide (1)..(831): Ceres Seq. ID no. 12414792
  misc_feature (63)..(774): Homolog of NCBI NO: 7433856 NR Description: 1,4-alpha-glucan branching enzyme (EC 2.4.1.18) - garden pea (fragment) >gi|1345571|emb|CAA56320.1| starch
  misc_feature (15)..(753): Homolog of NCBI NO: 1169912 NR Description: 1,4-alpha-glucan branching enzyme (Starch
  misc_feature (60)..(769): Homolog of NCBI NO: 477282 NR Description: starch branching enzyme isoform RBE3 - rice
  misc_feature (93)..(769): Homolog of NCBI NO: 15553091 NR Description: starch branching enzyme II [Ipomoea batatas]
  misc_feature (68)..(769): Homolog of NCBI NO: 5689138 NR Description: starch branching enzyme rbe4 [Oryza sativa]
  misc_feature (42)..(774): Homolog of NCBI NO: 5441246 NR Description: branching enzyme 1 [Phaseolus vulgaris]
  misc_feature (89)..(769): Homolog of NCBI NO: 11037534 NR Description: starch branching enzyme 2 [Triticum aestivum]
  misc_feature (89)..(769): Homolog of NCBI NO: 13447952 NR Description: starch branching enzyme IIa variant [Triticum
  misc_feature (70)..(769): Homolog of NCBI NO: 7433848 NR Description: 1,4-alpha-glucan branching enzyme (EC 2.4.1.18) - maize (fragment) >gi|2340108|gb|AAB67316.1| starch branching
  misc_feature (89)..(769): Homolog of NCBI NO: 7433853 NR Description: probable 1,4-alpha-glucan branching enzyme (EC
RWDSHAVTMLCLVSPSSSPTPLPPPRRSRSHADRAAPPGIAGGGNVRLSVLSVQCKARRSGVRKVKSKFATAATVQEDKTMATAKGDVDHLPIYDLDPKLEIFKDHFRYRMKRFLEQKGSIEENEGSLESFSKGYLKFGINTNEDGTVYREWAPAAQEAELIGDFNDWNGANHKMEKDKFGVWSIKIDHVKGKPAIPHNSKVKFRFLHGGVWVDRIPALIRYATVDASKFGAPYDGVHWDPPASERYTFKHPRPSKPAAPRIYEAHVGMSGEKPAVSTYREFADNVLPRIRANNYNTVQLMAVMEHSYYASFGYHVTNFFAVSSRSGTPEDLKYLVDKAHSLGLRVLMDVVHSHASNNVTDGLNGYDVGQSTQESYFHAGDRGYHKLWDSRLFNYANWEVLRFLLSNLRYWLDEFMFDGFRFDGVTSMLYHHHGINVGFTGNYQEYFSLDTAVDAVVYMMLANHLMHKLLPEATVVAEDVSGMPVLCRPVDEGGVGFDYRLAMAIPDRWIDYLKNKDDSEWSMGEIAHTLTNRRYTEKCIAYAESHDQSIVGDKTIAFLLMDKEMYTGMSDLQPASPTIDRGIALQKMIHFITMALGGDGYLNFMGNEFGHPEWIDFPREGNNWSYDKCRRQWSLVDTDHLRYKYMNAFDQAMNALDERFSFLSSSKQIVSDMNDEEKVIVFERGDLVFVFNFHPKKTYEGYKVGCDLPGKYRVALDSDALVFGGHGRVGHDVDHFTSPEGVPGVPETNFNNRPNSFKVLSPPRTCVAYYRVDEAGAGRRLHAKAETGKTSPAESIDVKASRASSKEDKEATAGGKKGWKFARQPSDQDTK

SEQ ID NO: 11440 - protein, 823 aa, Zea mays subsp. mays
  peptide (1)..(823): Ceres Seq. ID no. 12414793
  misc_feature (55)..(766): Homolog of NCBI NO: 7433856 NR Description: 1,4-alpha-glucan branching enzyme (EC 2.4.1.18) - garden pea (fragment) >gi|1345571|emb|CAA56320.1| starch
  misc_feature (7)..(745): Homolog of NCBI NO: 1169912 NR Description: 1,4-alpha-glucan branching enzyme (Starch
  misc_feature (52)..(761): Homolog of NCBI NO: 477282 NR Description: starch branching enzyme isoform RBE3 - rice
  misc_feature (85)..(761): Homolog of NCBI NO: 15553091 NR Description: starch branching enzyme II [Ipomoea batatas]
  misc_feature (60)..(761): Homolog of NCBI NO: 5689138 NR Description: starch branching enzyme rbe4 [Oryza sativa]
  misc_feature (34)..(766): Homolog of NCBI NO: 5441246 NR Description: branching enzyme 1 [Phaseolus vulgaris]
  misc_feature (81)..(761): Homolog of NCBI NO: 11037534 NR Description: starch branching enzyme 2 [Triticum aestivum]
  misc_feature (81)..(761): Homolog of NCBI NO: 13447952 NR Description: starch branching enzyme IIa variant [Triticum
  misc_feature (62)..(761): Homolog of NCBI NO: 7433848 NR Description: 1,4-alpha-glucan branching enzyme (EC 2.4.1.18) - maize (fragment) >gi|2340108|gb|AAB67316.1| starch branching
  misc_feature (81)..(761): Homolog of NCBI NO: 7433853 NR Description: probable 1,4-alpha-glucan branching enzyme (EC
MLCLVSPSSSPTPLPPPRRSRSHADRAAPPGIAGGGNVRLSVLSVQCKARRSGVRKVKSKFATAATVQEDKTMATAKGDVDHLPIYDLDPKLEIFKDHFRYRMKRFLEQKGSIEENEGSLESFSKGYLKFGINTNEDGTVYREWAPAAQEAELIGDFNDWNGANHKMEKDKFGVWSIKIDHVKGKPAIPHNSKVKFRFLHGGVWVDRIPALIRYATVDASKFGAPYDGVHWDPPASERYTFKHPRPSKPAAPRIYEAHVGMSGEKPAVSTYREFADNVLPRIRANNYNTVQLMAVMEHSYYASFGYHVTNFFAVSSRSGTPEDLKYLVDKAHSLGLRVLMDVVHSHASNNVTDGLNGYDVGQSTQESYFHAGDRGYHKLWDSRLFNYANWEVLRFLLSNLRYWLDEFMFDGFRFDGVTSMLYHHHGINVGFTGNYQEYFSLDTAVDAVVYMMLANHLMHKLLPEATVVAEDVSGMPVLCRPVDEGGVGFDYRLAMAIPDRWIDYLKNKDDSEWSMGEIAHTLTNRRYTEKCIAYAESHDQSIVGDKTIAFLLMDKEMYTGMSDLQPASPTIDRGIALQKMIHFITMALGGDGYLNFMGNEFGHPEWIDFPREGNNWSYDKCRRQWSLVDTDHLRYKYMNAFDQAMNALDERFSFLSSSKQIVSDMNDEEKVIVFERGDLVFVFNFHPKKTYEGYKVGCDLPGKYRVALDSDALVFGGHGRVGHDVDHFTSPEGVPGVPETNFNNRPNSFKVLSPPRTCVAYYRVDEAGAGRRLHAKAETGKTSPAESIDVKASRASSKEDKEATAGGKKGWKFARQPSDQDTK

SEQ ID NO: 11441 - protein, 751 aa, Zea mays subsp. mays
  peptide (1)..(751): Ceres Seq. ID no. 12414794
  misc_feature (1)..(694): Homolog of NCBI NO: 7433856 NR Description: 1,4-alpha-glucan branching enzyme (EC 2.4.1.18) - garden pea (fragment) >gi|1345571|emb|CAA56320.1| starch
  misc_feature (1)..(673): Homolog of NCBI NO: 1169912 NR Description: 1,4-alpha-glucan branching enzyme (Starch
  misc_feature (1)..(689): Homolog of NCBI NO: 477282 NR Description: starch branching enzyme isoform RBE3 - rice
  misc_feature (13)..(689): Homolog of NCBI NO: 15553091 NR Description: starch branching enzyme II [Ipomoea batatas]
  misc_feature (1)..(689): Homolog of NCBI NO: 5689138 NR Description: starch branching enzyme rbe4 [Oryza sativa]
  misc_feature (1)..(694): Homolog of NCBI NO: 5441246 NR Description: branching enzyme 1 [Phaseolus vulgaris]
  misc_feature (9)..(689): Homolog of NCBI NO: 11037534 NR Description: starch branching enzyme 2 [Triticum aestivum]
  misc_feature (9)..(689): Homolog of NCBI NO: 13447952 NR Description: starch branching enzyme IIa variant [Triticum
  misc_feature (1)..(689): Homolog of NCBI NO: 7433848 NR Description: 1,4-alpha-glucan branching enzyme (EC 2.4.1.18) - maize (fragment) >gi|2340108|gb|AAB67316.1| starch branching
  misc_feature (9)..(689): Homolog of NCBI NO: 7433853 NR Description: probable 1,4-alpha-glucan branching enzyme (EC
MATAKGDVDHLPIYDLDPKLEIFKDHFRYRMKRFLEQKGSIEENEGSLESFSKGYLKFGINTNEDGTVYREWAPAAQEAELIGDFNDWNGANHKMEKDKFGVWSIKIDHVKGKPAIPHNSKVKFRFLHGGVWVDRIPALIRYATVDASKFGAPYDGVHWDPPASERYTFKHPRPSKPAAPRIYEAHVGMSGEKPAVSTYREFADNVLPRIRANNYNTVQLMAVMEHSYYASFGYHVTNFFAVSSRSGTPEDLKYLVDKAHSLGLRVLMDVVHSHASNNVTDGLNGYDVGQSTQESYFHAGDRGYHKLWDSRLFNYANWEVLRFLLSNLRYWLDEFMFDGFRFDGVTSMLYHHHGINVGFTGNYQEYFSLDTAVDAVVYMMLANHLMHKLLPEATVVAEDVSGMPVLCRPVDEGGVGFDYRLAMAIPDRWIDYLKNKDDSEWSMGEIAHTLTNRRYTEKCIAYAESHDQSIVGDKTIAFLLMDKEMYTGMSDLQPASPTIDRGIALQKMIHFITMALGGDGYLNFMGNEFGHPEWIDFPREGNNWSYDKCRRQWSLVDTDHLRYKYMNAFDQAMNALDERFSFLSSSKQIVSDMNDEEKVIVFERGDLVFVFNFHPKKTYEGYKVGCDLPGKYRVALDSDALVFGGHGRVGHDVDHFTSPEGVPGVPETNFNNRPNSFKVLSPPRTCVAYYRVDEAGAGRRLHAKAETGKTSPAESIDVKASRASSKEDKEATAGGKKGWKFARQPSDQDTK

SEQ ID NO: 11442 - DNA, 631 bp, Zea mays subsp. mays; identical to SEQ ID NO: 8139
  misc_feature (1)..(631): Ceres Seq. ID no. 12342153
  misc_feature: MA Experiment ID: 108535 Result: Down-regulated in Transcription
  misc_feature: MA Experiment 108535 PARAMETER Experiment Name: Zm_Meristem_P Parameter: Age (day) Value: 8
  misc_feature: MA Experiment 108535 PARAMETER Experiment Name: Zm_Meristem_P Parameter: Organism Value: Zea mays
  misc_feature: MA Experiment 108535 PARAMETER Experiment Name: Zm_Meristem_P Parameter: Plant Line Value: 35A19
  misc_feature: MA Experiment 108535 PARAMETER Experiment Name: Zm_Meristem_P Parameter: Tissue Value: Root Meristem vs. Above Root Meristem
  misc_feature: MA Experiment ID: 108543 Result: Up-regulated in Transcription
  misc_feature: MA Experiment ID: 108544 Result: Up-regulated in Transcription
  misc_feature: MA Experiment ID: 20000487 Result: Down-regulated in Transcription
  misc_feature: MA Experiment 20000487 PARAMETER Experiment Name: Zm_50mM_NH4NO3_L_to_H_P Parameter: Organism Value: Zea mays
  misc_feature: MA Experiment 20000487 PARAMETER Experiment Name: Zm_50mM_NH4NO3_L_to_H_P Parameter: Timepoint (hr) Value: 4
  misc_feature: MA Experiment 20000487 PARAMETER Experiment Name: Zm_50mM_NH4NO3_L_to_H_P Parameter: Tissue Value: Leaves
  misc_feature: MA Experiment 20000487 PARAMETER Experiment Name: Zm_50mM_NH4NO3_L_to_H_P Parameter: Treatment Value: 50mM NH4NO3 vs. 100mM Mannitol
  misc_feature: MA Experiment ID: 20000488 Result: Down-regulated in Transcription
  misc_feature: MA Experiment 20000488 PARAMETER Experiment Name: Zm_50mM_NH4NO3_L_to_H_P Parameter: Organism Value: Zea mays
  misc_feature: MA Experiment 20000488 PARAMETER Experiment Name: Zm_50mM_NH4NO3_L_to_H_P Parameter: Timepoint (hr) Value: 8
  misc_feature: MA Experiment 20000488 PARAMETER Experiment Name: Zm_50mM_NH4NO3_L_to_H_P Parameter: Tissue Value: Leaves
  misc_feature: MA Experiment 20000488 PARAMETER Experiment Name: Zm_50mM_NH4NO3_L_to_H_P Parameter: Treatment Value: 50mM NH4NO3 vs. 100mM Mannitol
  misc_feature: MA Experiment ID: 20001606 Result: Down-regulated in Transcription
  misc_feature: MA Experiment 20001606 PARAMETER Experiment Name: Zm_50ppm_KNO3_L-to-H_P Parameter: Age (day) Value: 19
  misc_feature: MA Experiment 20001606 PARAMETER Experiment Name: Zm_50ppm_KNO3_L-to-H_P Parameter: Organism Value: Zea mays
  misc_feature: MA Experiment 20001606 PARAMETER Experiment Name: Zm_50ppm_KNO3_L-to-H_P Parameter: Plant Line Value: 35A19
  misc_feature: MA Experiment 20001606 PARAMETER Experiment Name: Zm_50ppm_KNO3_L-to-H_P Parameter: Timepoint (hr) Value: 8
  misc_feature: MA Experiment 20001606 PARAMETER Experiment Name: Zm_50ppm_KNO3_L-to-H_P Parameter: Tissue Value: Shoots
  misc_feature: MA Experiment 20001606 PARAMETER Experiment Name: Zm_50ppm_KNO3_L-to-H_P Parameter: Treatment Value: 50ppm KNO3 vs. 50ppm KCl
  misc_feature: MA Experiment ID: 20001613 Result: Down-regulated in Transcription
  misc_feature: MA Experiment 20001613 PARAMETER Experiment Name: Zm_50ppm_KNO3_L-to-H_P Parameter: Age (day) Value: 20
  misc_feature: MA Experiment 20001613 PARAMETER Experiment Name: Zm_50ppm_KNO3_L-to-H_P Parameter: Organism Value: Zea mays
  misc_feature: MA Experiment 20001613 PARAMETER Experiment Name: Zm_50ppm_KNO3_L-to-H_P Parameter: Plant Line Value: 35A19
  misc_feature: MA Experiment 20001613 PARAMETER Experiment Name: Zm_50ppm_KNO3_L-to-H_P Parameter: Timepoint (hr) Value: 24
  misc_feature: MA Experiment 20001613 PARAMETER Experiment Name: Zm_50ppm_KNO3_L-to-H_P Parameter: Tissue Value: Roots
  misc_feature: MA Experiment 20001613 PARAMETER Experiment Name: Zm_50ppm_KNO3_L-to-H_P Parameter: Treatment Value: 50ppm KNO3 vs. 50ppm KCl

SEQ ID NO: 11443 - protein, 113 aa, Zea mays subsp. mays; identical to SEQ ID NO: 8140
  peptide (1)..(113): Ceres Seq. ID no. 12342154
  misc_feature (1)..(113): Pfam Name: Aminotransferase class-III Pfam Description: Aminotransferase class-III
  misc_feature (1)..(113): Pfam Name: Aminotransferase class-III Pfam Description: Aminotransferase class-III
  misc_feature (1)..(113): Homolog of NCBI NO: 5731259 NR Description: alanine:glyoxylate aminotransferase 2 homolog
  misc_feature (1)..(113): Homolog of NCBI NO: 18420498 NR Description: putative protein; protein id: At4g39660.1, by cDNA: gi_15809991, supported by cDNA: gi_5731258 [Arabidopsis >gi|15809992|gb|AAL06923.1| AT4g39660/T19P19_50 [Arabidopsis
  misc_feature (1)..(103): Homolog of NCBI NO: 7434175 NR Description: hypothetical protein T19P19.50 - Arabidopsis >gi|3080435|emb|CAA18752.1| putative protein [Arabidopsis >gi|7270950|emb|CAB80629.1| putative protein [Arabidopsis
  misc_feature (1)..(113): Homolog of NCBI NO: 15224499 NR Description: putative beta-alanine-pyruvate aminotransferase; id: At2g38400.1, supported by cDNA: 147543., supported by cDNA: supported by cDNA: gi_5731260 [Arabidopsis thaliana]
  misc_feature (1)..(113): Homolog of NCBI NO: 15028237 NR Description: putative beta-alanine-pyruvate aminotransferase
  misc_feature (1)..(113): Homolog of NCBI NO: 18420498 NR Description: putative protein; protein id: At4g39660.1, by cDNA: gi_15809991, supported by cDNA: gi_5731258 [Arabidopsis >gi|15809992|gb|AAL06923.1| AT4g39660/T19P19_50 [Arabidopsis
  misc_feature (1)..(113): Homolog of NCBI NO: 15224499 NR Description: putative beta-alanine-pyruvate aminotransferase; id: At2g38400.1, supported by cDNA: 147543., supported by cDNA: supported by cDNA: gi_5731260 [Arabidopsis thaliana]
  misc_feature (1)..(98): Homolog of NCBI NO: 31239473 NR Description: ENSANGP00000008948 [Anopheles gambiae]
  misc_feature (1)..(104): Homolog of NCBI NO: 39595899 NR Description: Hypothetical protein CBG12888 [Caenorhabditis
  misc_feature (1)..(111): Homolog of NCBI NO: 28574759 NR Description: CG11241-PA [Drosophila melanogaster]
  misc_feature (1)..(111): Homolog of NCBI NO: 16198011 NR Description: LD24726p [Drosophila melanogaster]
  misc_feature (1)..(113): Homolog of NCBI NO: 15231974 NR Description: putative aminotransferase; protein id: supported by cDNA: gi_20466699 [Arabidopsis thaliana] putative aminotransferase [Arabidopsis thaliana]
  misc_feature (1)..(113): Homolog of NCBI NO: 15028237 NR Description: putative beta-alanine-pyruvate aminotransferase
  misc_feature (1)..(103): Homolog of NCBI NO: 7434175 NR Description: hypothetical protein T19P19.50 - Arabidopsis >gi|3080435|emb|CAA18752.1| putative protein [Arabidopsis >gi|7270950|emb|CAB80629.1| putative protein [Arabidopsis
  misc_feature (1)..(113): Homolog of NCBI NO: 5731259 NR Description: alanine:glyoxylate aminotransferase 2 homolog
  misc_feature (1)..(113): Homolog of NCBI NO: 15231974 NR Description: putative aminotransferase; protein id: supported by cDNA: gi_20466699 [Arabidopsis thaliana] putative aminotransferase [Arabidopsis thaliana]
  misc_feature (1)..(111): Homolog of NCBI NO: 16198011 NR Description: LD24726p [Drosophila melanogaster]
  misc_feature (1)..(111): Homolog of NCBI NO: 28574759 NR Description: CG11241-PA [Drosophila melanogaster]
  misc_feature (1)..(104): Homolog of NCBI NO: 39595899 NR Description: Hypothetical protein CBG12888 [Caenorhabditis
  misc_feature (1)..(98): Homolog of NCBI NO: 31239473 NR Description: ENSANGP00000008948 [Anopheles gambiae]

SEQ ID NO: 11444 - protein, 71 aa, Zea mays subsp. mays; identical to SEQ ID NO: 8141
  peptide (1)..(71): Ceres Seq. ID no. 12342155
  misc_feature (1)..(71): Pfam Name: Aminotransferase class-III Pfam Description: Aminotransferase class-III
  misc_feature (1)..(71): Pfam Name: Aminotransferase class-III Pfam Description: Aminotransferase class-III
  misc_feature (1)..(71): Homolog of NCBI NO: 5731259 NR Description: alanine:glyoxylate aminotransferase 2 homolog
  misc_feature (1)..(71): Homolog of NCBI NO: 18420498 NR Description: putative protein; protein id: At4g39660.1, by cDNA: gi_15809991, supported by cDNA: gi_5731258 [Arabidopsis >gi|15809992|gb|AAL06923.1| AT4g39660/T19P19_50 [Arabidopsis
  misc_feature (1)..(61): Homolog of NCBI NO: 7434175 NR Description: hypothetical protein T19P19.50 - Arabidopsis >gi|3080435|emb|CAA18752.1| putative protein [Arabidopsis >gi|7270950|emb|CAB80629.1| putative protein [Arabidopsis
  misc_feature (1)..(71): Homolog of NCBI NO: 15224499 NR Description: putative beta-alanine-pyruvate aminotransferase; id: At2g38400.1, supported by cDNA: 147543., supported by cDNA: supported by cDNA: gi_5731260 [Arabidopsis thaliana]
  misc_feature (1)..(71): Homolog of NCBI NO: 15028237 NR Description: putative beta-alanine-pyruvate aminotransferase
  misc_feature (1)..(71): Homolog of NCBI NO: 18420498 NR Description: putative protein; protein id: At4g39660.1, by cDNA: gi_15809991, supported by cDNA: gi_5731258 [Arabidopsis >gi|15809992|gb|AAL06923.1| AT4g39660/T19P19_50 [Arabidopsis
  misc_feature (1)..(71): Homolog of NCBI NO: 15224499 NR Description: putative beta-alanine-pyruvate aminotransferase; id: At2g38400.1, supported by cDNA: 147543., supported by cDNA: supported by cDNA: gi_5731260 [Arabidopsis thaliana]
  misc_feature (1)..(56): Homolog of NCBI NO: 31239473 NR Description: ENSANGP00000008948 [Anopheles gambiae]
  misc_feature (1)..(62): Homolog of NCBI NO: 39595899 NR Description: Hypothetical protein CBG12888 [Caenorhabditis
  misc_feature (1)..(69): Homolog of NCBI NO: 28574759 NR Description: CG11241-PA [Drosophila melanogaster]
  misc_feature (1)..(69): Homolog of NCBI NO: 16198011 NR Description: LD24726p [Drosophila melanogaster]
  misc_feature (1)..(71): Homolog of NCBI NO: 15231974 NR Description: putative aminotransferase; protein id: supported by cDNA: gi_20466699 [Arabidopsis thaliana] putative aminotransferase [Arabidopsis thaliana]
  misc_feature (1)..(71): Homolog of NCBI NO: 15028237 NR Description: putative beta-alanine-pyruvate aminotransferase
  misc_feature (1)..(61): Homolog of NCBI NO: 7434175 NR Description: hypothetical protein T19P19.50 - Arabidopsis >gi|3080435|emb|CAA18752.1| putative protein [Arabidopsis >gi|7270950|emb|CAB80629.1| putative protein [Arabidopsis
  misc_feature (1)..(71): Homolog of NCBI NO: 5731259 NR Description: alanine:glyoxylate aminotransferase 2 homolog
  misc_feature (1)..(71): Homolog of NCBI NO: 15231974 NR Description: putative aminotransferase; protein id: supported by cDNA: gi_20466699 [Arabidopsis thaliana] putative aminotransferase [Arabidopsis thaliana]
  misc_feature (1)..(69): Homolog of NCBI NO: 16198011 NR Description: LD24726p [Drosophila melanogaster]
  misc_feature (1)..(69): Homolog of NCBI NO: 28574759 NR Description: CG11241-PA [Drosophila melanogaster]
  misc_feature (1)..(62): Homolog of NCBI NO: 39595899 NR Description: Hypothetical protein CBG12888 [Caenorhabditis
  misc_feature (1)..(56): Homolog of NCBI NO: 31239473 NR Description: ENSANGP00000008948 [Anopheles gambiae]

SEQ ID NO: 11445 - DNA, 1374 bp, Zea mays subsp. mays; identical to SEQ ID NO: 4329
  misc_feature (1)..(1374): Ceres Seq. ID no. 12435065
  misc_feature: MA Experiment ID: 108535 Result: Up-regulated in Transcription
  misc_feature: MA Experiment 108535 PARAMETER Experiment Name: Zm_Meristem_P Parameter: Age (day) Value: 8
  misc_feature: MA Experiment 108535 PARAMETER Experiment Name: Zm_Meristem_P Parameter: Organism Value: Zea mays
  misc_feature: MA Experiment 108535 PARAMETER Experiment Name: Zm_Meristem_P Parameter: Plant Line Value: 35A19
  misc_feature: MA Experiment 108535 PARAMETER Experiment Name: Zm_Meristem_P Parameter: Tissue Value: Root Meristem vs. Above Root Meristem

SEQ ID NO: 11446 - protein, 259 aa, Zea mays subsp. mays; identical to SEQ ID NO: 4330
  peptide (1)..(259): Ceres Seq. ID no. 12435066
  misc_feature (162)..(236): Pfam Name: RNA recognition motif. (a.k.a. RRM, RBD, or RNP domain) Pfam Description: RNA recognition motif. (a.k.a. RRM, RBD, or RNP
  misc_feature (24)..(186): Homolog of NCBI NO: 25553563 NR Description: OSJNBa0038F22.13 [Oryza sativa (japonica
  misc_feature (179)..(259): Homolog of NCBI NO: 25553563 NR Description: OSJNBa0038F22.13 [Oryza sativa (japonica
  misc_feature (40)..(256): Homolog of NCBI NO: 23304837 NR Description: RNA-binding protein [Medicago truncatula]
  misc_feature (38)..(259): Homolog of NCBI NO: 30699215 NR Description: expressed protein [Arabidopsis thaliana]
  misc_feature (110)..(259): Homolog of NCBI NO: 26450151 NR Description: unknown protein [Arabidopsis thaliana]
  misc_feature (39)..(162): Homolog of NCBI NO: 15218968 NR Description: hypothetical protein; protein id: At1g21320.1
  misc_feature (201)..(259): Homolog of NCBI NO: 15218968 NR Description: hypothetical protein; protein id: At1g21320.1
  misc_feature (39)..(259): Homolog of NCBI NO: 25513502 NR Description: F16F4.3 protein - Arabidopsis thaliana
  misc_feature (10)..(10): Xaa is any aa, unknown or other
  misc_feature (11)..(11): Xaa is any aa, unknown or other
  misc_feature (16)..(16): Xaa is any aa, unknown or other
  misc_feature (17)..(17): Xaa is any aa, unknown or other
  misc_feature (18)..(18): Xaa is any aa, unknown or other
  misc_feature (19)..(19): Xaa is any aa, unknown or other

SEQ ID NO: 11447 - protein, 240 aa, Zea mays subsp. mays; identical to SEQ ID NO: 4331
  peptide (1)..(240): Ceres Seq. ID no. 12435067
  misc_feature (143)..(217): Pfam Name: RNA recognition motif. (a.k.a. RRM, RBD, or RNP domain) Pfam Description: RNA recognition motif. (a.k.a. RRM, RBD, or RNP
  misc_feature (5)..(167): Homolog of NCBI NO: 25553563 NR Description: OSJNBa0038F22.13 [Oryza sativa (japonica
  misc_feature (160)..(240): Homolog of NCBI NO: 25553563 NR Description: OSJNBa0038F22.13 [Oryza sativa (japonica
  misc_feature (21)..(237): Homolog of NCBI NO: 23304837 NR Description: RNA-binding protein [Medicago truncatula]
  misc_feature (19)..(240): Homolog of NCBI NO: 30699215 NR Description: expressed protein [Arabidopsis thaliana]
  misc_feature (91)..(240): Homolog of NCBI NO: 26450151 NR Description: unknown protein [Arabidopsis thaliana]
  misc_feature (20)..(143): Homolog of NCBI NO: 15218968 NR Description: hypothetical protein; protein id: At1g21320.1
  misc_feature (182)..(240): Homolog of NCBI NO: 15218968 NR Description: hypothetical protein; protein id: At1g21320.1
  misc_feature (20)..(240): Homolog of NCBI NO: 25513502 NR Description: F16F4.3 protein - Arabidopsis thaliana

SEQ ID NO: 11448 - protein, 231 aa, Zea mays subsp. mays; identical to SEQ ID NO: 4332
  peptide (1)..(231): Ceres Seq. ID no. 12435068
  misc_feature (134)..(208): Pfam Name: RNA recognition motif. (a.k.a. RRM, RBD, or RNP domain) Pfam Description: RNA recognition motif. (a.k.a. RRM, RBD, or RNP
  misc_feature (1)..(158): Homolog of NCBI NO: 25553563 NR Description: OSJNBa0038F22.13 [Oryza sativa (japonica
  misc_feature (151)..(231): Homolog of NCBI NO: 25553563 NR Description: OSJNBa0038F22.13 [Oryza sativa (japonica
  misc_feature (12)..(228): Homolog of NCBI NO: 23304837 NR Description: RNA-binding protein [Medicago truncatula]
  misc_feature (10)..(231): Homolog of NCBI NO: 30699215 NR Description: expressed protein [Arabidopsis thaliana]
  misc_feature (82)..(231): Homolog of NCBI NO: 26450151 NR Description: unknown protein [Arabidopsis thaliana]
  misc_feature (11)..(134): Homolog of NCBI NO: 15218968 NR Description: hypothetical protein; protein id: At1g21320.1
  misc_feature (173)..(231): Homolog of NCBI NO: 15218968 NR Description: hypothetical protein; protein id: At1g21320.1
  misc_feature (11)..(231): Homolog of NCBI NO: 25513502 NR Description: F16F4.3 protein - Arabidopsis thaliana

SEQ ID NO: 11449 - DNA, 886 bp, Zea mays subsp. mays
  misc_feature (1)..(886): Ceres Seq. ID no. 12386681
  misc_feature: MA Experiment ID: 108523 Result: Down-regulated in Transcription
  misc_feature: MA Experiment 108523 PARAMETER Experiment Name: Zm_42deg_Heat_P Parameter: Age (day) Value: 8
  misc_feature: MA Experiment 108523 PARAMETER Experiment Name: Zm_42deg_Heat_P Parameter: Organism Value: Zea mays
  misc_feature: MA Experiment 108523 PARAMETER Experiment Name: Zm_42deg_Heat_P Parameter: Plant Line Value: 35A19
  misc_feature: MA Experiment 108523 PARAMETER Experiment Name: Zm_42deg_Heat_P Parameter: Temperature (deg C) Value: 42 vs. 22
  misc_feature: MA Experiment 108523 PARAMETER Experiment Name: Zm_42deg_Heat_P Parameter: Timepoint (hr) Value: 6
  misc_feature: MA Experiment 108523 PARAMETER Experiment Name: Zm_42deg_Heat_P Parameter: Tissue Value: Aerial
  misc_feature: MA Experiment ID: 108536 Result: Down-regulated in Transcription
  misc_feature: MA Experiment 108536 PARAMETER Experiment Name: Zm_Meristem_P Parameter: Age (day) Value: 8
  misc_feature: MA Experiment 108536 PARAMETER Experiment Name: Zm_Meristem_P Parameter: Organism Value: Zea mays
  misc_feature: MA Experiment 108536 PARAMETER Experiment Name: Zm_Meristem_P Parameter: Plant Line Value: 35A19
  misc_feature: MA Experiment 108536 PARAMETER Experiment Name: Zm_Meristem_P Parameter: Tissue Value: Shoot Meristem vs. Above Shoot Meristem
  misc_feature: MA Experiment ID: 108689 Result: Up-regulated in Transcription
  misc_feature: MA Experiment 108689 PARAMETER Experiment Name: Zm_Drought_Roots_P Parameter: Age (day) Value: 9
  misc_feature: MA Experiment 108689 PARAMETER Experiment Name: Zm_Drought_Roots_P Parameter: Organism Value: Zea mays
  misc_feature: MA Experiment 108689 PARAMETER Experiment Name: Zm_Drought_Roots_P Parameter: Plant Line Value: 35A19
  misc_feature: MA Experiment 108689 PARAMETER Experiment Name: Zm_Drought_Roots_P Parameter: Timepoint (hr) Value: 24
  misc_feature: MA Experiment 108689 PARAMETER Experiment Name: Zm_Drought_Roots_P Parameter: Tissue Value: Roots
  misc_feature: MA Experiment 108689 PARAMETER Experiment Name: Zm_Drought_Roots_P Parameter: Treatment Value: Drought vs. No Drought
gaatctctctgcctcattctctctccaccggcgacggcgagtccgaccgcactgctcctctccgtgcggagatctctcgcgtgctggcaggcgcgtcctggtgactgggacacgggagaagagaccttggtgggtggcagcggcaggccatggaggcgctgctggtgacggtgcttcttctcctcctctcctctaccctcgccgcagcacaatggtgcgtgtgcaggcaggacgcgtcgcaggccgcgctgcagaagaccatcgactacgcgtgcggctccggggcggactgcaactccatccatgagaccggggcgtgctacaaccccaacaccgtcccggcgcactgctcctgggccgccaacagctactaccagaacaacaaggccaagggcgccacctgcgacttcgccggcaccgccaccctcaccaccagcgacccgagctccttcgggctgctcttaccccaccaccagtgcaagcgccgcgggaaccgtgaccccgaccaccggcggcacaatgggaggagcgggaggcccagggaccttgacgcccgccgggacaggcgcaggcacagccggcactaccggcatggggactgcaggcactacgggtaccgggttcggcggcctaggaccagcaggcatggacacagcggcggcggcggcggggggcttgctcctcctcccagaggctgggctgtgcgctgccctcgtcgcgctcctcctctccgccatcgtgctcgcgtgacgccttcacatgacctcggaaacaacaacctactgcctgcatgctagtagtagtagaaagcgctgcccttttgggaggtgtatgtagttcaggagtactctgattatctatggagaaagggtgggaattattgggc

SEQ ID NO: 11450 - protein, 215 aa, Zea mays subsp. mays
  peptide (1)..(215): Ceres Seq. ID no. 12386682
  misc_feature (1)..(106): Homolog of NCBI NO: 22775658 NR Description: contains ESTs
  misc_feature (1)..(156): Homolog of NCBI NO: 34909796 NR Description: P0403C05.4 [Oryza sativa (japonica
  misc_feature (3)..(99): Homolog of NCBI NO: 18394637 NR Description: glycosyl hydrolase family 17; protein id: supported by cDNA: 32195. [Arabidopsis thaliana]
  misc_feature (3)..(106): Homolog of NCBI NO: 21592859 NR Description: unknown [Arabidopsis thaliana]
  misc_feature (3)..(106): Homolog of NCBI NO: 15241485 NR Description: glycosyl hydrolase family 17; protein id: supported by cDNA: 33347. [Arabidopsis thaliana]
  misc_feature (9)..(106): Homolog of NCBI NO: 21326118 NR Description: putative expressed protein [Sorghum bicolor]
  misc_feature (3)..(100): Homolog of NCBI NO: 15222715 NR Description: glycosyl hydrolase family 17; protein id: [Arabidopsis thaliana] >gi|25518437|pir||C86391 hypothetical
  misc_feature (3)..(100): Homolog of NCBI NO: 18409239 NR Description: unknown protein; protein id: At1g69295.1, by cDNA: 16467., supported by cDNA: gi_13877780, supported by gi_15724275, supported by cDNA: gi_15912196, supported by cDNA:
  misc_feature (3)..(100): Homolog of NCBI NO: 21553768 NR Description: unknown [Arabidopsis thaliana]
  misc_feature (1)..(106): Homolog of NCBI NO: 30697478 NR Description: glycosyl hydrolase family 17 [Arabidopsis >gi|9759459|dbj|BAB10375.1| to unknown protein [Arabidopsis thaliana]
MEALLVTVLLLLLSSTLAAAQWCVCRQDASQAALQKTIDYACGSGADCNSIHETGACYNPNTVPAHCSWAANSYYQNNKAKGATCDFAGTATLTTSDPSSFGLLLPHHQCKRRGNRDPDHRRHNGRSGRPRDLDARRDRRRHSRHYRHGDCRHYGYRVRRPRTSRHGHSGGGGGGLAPPPRGWAVRCPRRAPPLRHRARVTPSHDLGNNNLLPAC

SEQ ID NO: 11451 - protein, 148 aa, Zea mays subsp. mays
  peptide (1)..(148): Ceres Seq. ID no. 12386683
  misc_feature (1)..(71): Pfam Name: Merozoite Surface Antigen 2 (MSA-2) family Pfam Description: Merozoite Surface Antigen 2 (MSA-2) family
  misc_feature (28)..(148): Homolog of NCBI NO: 22775658 NR Description: contains ESTs
  misc_feature (1)..(94): Homolog of NCBI NO: 30140331 NR Description: putative arabinagalactan protein [Lotus japonicus]
  misc_feature (1)..(123): Homolog of NCBI NO: 29829077 NR Description: hypothetical protein [Streptomyces avermitilis
  misc_feature (1)..(105): Homolog of NCBI NO: 11360318 NR Description: probable mucin DKFZp434C196.1 - human (fragment)
  misc_feature (17)..(143): Homolog of NCBI NO: 30983559 NR Description: exosporium protein [Bacillus cereus]
  misc_feature (16)..(148): Homolog of NCBI NO: 30140331 NR Description: putative arabinagalactan protein [Lotus japonicus]
MRPGRATTPTPSRRTAPGPPTATTRTTRPRAPPATSPAPPPSPPATRAPSGCSYPTTSASAAGTVTPTTGGTMGGAGGPGTLTPAGTGAGTAGTTGMGTAGTTGTGFGGLGPAGMDTAAAAAGGLLLLPEAGLCAALVALLLSAIVLA

SEQ ID NO: 11452 - DNA, 1247 bp, Zea mays subsp. mays
  misc_feature (1)..(1247): Ceres Seq. ID no. 12411831
  misc_feature: MA Experiment ID: 108535 Result: Up-regulated in Transcription
  misc_feature: MA Experiment 108535 PARAMETER Experiment Name: Zm_Meristem_P Parameter: Age (day) Value: 8
  misc_feature: MA Experiment 108535 PARAMETER Experiment Name: Zm_Meristem_P Parameter: Organism Value: Zea mays
  misc_feature: MA Experiment 108535 PARAMETER Experiment Name: Zm_Meristem_P Parameter: Plant Line Value: 35A19
  misc_feature: MA Experiment 108535 PARAMETER Experiment Name: Zm_Meristem_P Parameter: Tissue Value: Root Meristem vs. Above Root Meristem
  misc_feature: MA Experiment ID: 108544 Result: Down-regulated in Transcription
  misc_feature: MA Experiment ID: 108547 Result: Down-regulated in Transcription
  misc_feature: MA Experiment 108547 PARAMETER Experiment Name: Zm_Imbibed_Seeds_P Parameter: Age (day) Value: 4 vs. 2
  misc_feature: MA Experiment 108547 PARAMETER Experiment Name: Zm_Imbibed_Seeds_P Parameter: Organism Value: Zea mays
  misc_feature: MA Experiment 108547 PARAMETER Experiment Name: Zm_Imbibed_Seeds_P Parameter: Plant Line Value: 35A19
  misc_feature: MA Experiment 108547 PARAMETER Experiment Name: Zm_Imbibed_Seeds_P Parameter: Tissue Value: Aerial vs. Embryo
  misc_feature: MA Experiment ID: 20000478 Result: Down-regulated in Transcription
  misc_feature: MA Experiment 20000478 PARAMETER Experiment Name: Zm_5mM_SA_P Parameter: Age (day) Value: 11
  misc_feature: MA Experiment 20000478 PARAMETER Experiment Name: Zm_5mM_SA_P Parameter: Organism Value: Zea mays
  misc_feature: MA Experiment 20000478 PARAMETER Experiment Name: Zm_5mM_SA_P Parameter: Plant Line Value: 35A19
  misc_feature: MA Experiment 20000478 PARAMETER Experiment Name: Zm_5mM_SA_P Parameter: Timepoint (hr) Value: 72
  misc_feature: MA Experiment 20000478 PARAMETER Experiment Name: Zm_5mM_SA_P Parameter: Tissue Value: Aerial
  misc_feature: MA Experiment 20000478 PARAMETER Experiment Name: Zm_5mM_SA_P Parameter: Treatment Value: 5mM SA vs. No Treatment
  misc_feature: MA Experiment ID: 20000479 Result: Down-regulated in Transcription
  misc_feature: MA Experiment 20000479 PARAMETER Experiment Name: Zm_Drought_P Parameter: Age (day) Value: 10
  misc_feature: MA Experiment 20000479 PARAMETER Experiment Name: Zm_Drought_P Parameter: Organism Value: Zea mays
  misc_feature: MA Experiment 20000479 PARAMETER Experiment Name: Zm_Drought_P Parameter: Plant Line Value: 35A19
  misc_feature: MA Experiment 20000479 PARAMETER Experiment Name: Zm_Drought_P Parameter: Timepoint (hr) Value: 48
  misc_feature: MA Experiment 20000479 PARAMETER Experiment Name: Zm_Drought_P Parameter: Tissue Value: Aerial
  misc_feature: MA Experiment 20000479 PARAMETER Experiment Name: Zm_Drought_P Parameter: Treatment Value: Drought vs. No Drought
  misc_feature: MA Experiment ID: 20000480 Result: Down-regulated in Transcription
  misc_feature: MA Experiment 20000480 PARAMETER Experiment Name: Zm_Drought_P Parameter: Age (day) Value: 11
  misc_feature: MA Experiment 20000480 PARAMETER Experiment Name: Zm_Drought_P Parameter: Organism Value: Zea mays
  misc_feature: MA Experiment 20000480 PARAMETER Experiment Name: Zm_Drought_P Parameter: Plant Line Value: 35A19
  misc_feature: MA Experiment 20000480 PARAMETER Experiment Name: Zm_Drought_P Parameter: Timepoint (hr) Value: 72
  misc_feature: MA Experiment 20000480 PARAMETER Experiment Name: Zm_Drought_P Parameter: Tissue Value: Aerial
  misc_feature: MA Experiment 20000480 PARAMETER Experiment Name: Zm_Drought_P Parameter: Treatment Value: Drought vs. No Drought
  misc_feature: MA Experiment ID: 20000492 Result: Down-regulated in Transcription
  misc_feature: MA Experiment 20000492 PARAMETER Experiment Name: Zm_Hybrid_Seed_Dev_P Parameter: DAP Value: 12
  misc_feature: MA Experiment 20000492 PARAMETER Experiment Name: Zm_Hybrid_Seed_Dev_P Parameter: Organism Value: Zea mays
  misc_feature: MA Experiment 20000492 PARAMETER Experiment Name: Zm_Hybrid_Seed_Dev_P Parameter: Plant Line Value: 35A19
  misc_feature: MA Experiment 20000492 PARAMETER Experiment Name: Zm_Hybrid_Seed_Dev_P Parameter: Tissue Value: Fert Kernel vs. Unfert Floret
  misc_feature: MA Experiment ID: 20000626 Result: Down-regulated in Transcription
  misc_feature: MA Experiment 20000626 PARAMETER Experiment Name: Zm_Herbicide-Treatments_P Parameter: Timepoint (hr) Value: 12
  misc_feature: MA Experiment 20000626 PARAMETER Experiment Name: Zm_Herbicide-Treatments_P Parameter: Tissue Value: Aerial
  misc_feature: MA Experiment 20000626 PARAMETER Experiment Name: Zm_Herbicide-Treatments_P Parameter: Treatment Value: Roundup vs. No Treatment
aaaaggtacccaagctgaaagcatcacactcgcagttgcagagttccgcttcatcagtcccacactctccccttcctccccccagtcctgagcttcgccgaggcatacggacaataccggcaccggcagcgagcagtcgggagccatggctccgcggctcctgctcttcctcctcctcctcctcccgctcctcgccgccggacaccagcacccgtcctcctacggctcctccgcgctttccgagtggcgccccgccaaggcatcctactacgccgccgaccccgaagacgccatcggtggggcgtgcgggttcggggatctgggaaagcacgggtacgggatggcgacggtggggctgagcacggcgctgttcgagcgcggcgcggcgtgcggcggctgctacgaggtcaagtgcgtcgaggatctcaagtactgcctccccggcacctccatagtcgtcacggccaccaacttctgcgccccgaactacggccttcccgccgacgccggcggccactgcaacccgcccaaccatcatttcctcctccccatccagtcgtttgagaagattgcgctctggaaggccggcatcatgccaatccagtaccgccgtgttaagtgcctccgtgaaggtggtgtcaggttctctgtcaacggtcggcacttcttctttacagtcctaatcagcaacgttggtggcgcgggtgatgttagatctgtgaagatcaaaggaacagagttgggatggctcccgatgggccgcaactggggccaggtgtggcacatcaactgtgacatgaggggacaacctctatcgtttgagctcagctcgagcgatggcaaggcgctgaccagtttcaacgtcgtccctaaggattgggagtatggcaagacatacacggggaagcaatttcttctgtagagaatgagcgccacaagatcagcttacagtttctcattttttgttctgatcctacgagttgggctgtggtgtacattctctgcacttctgcagaacaagtaatatcattattaggagaaaattacttagtgcaaggcctcagatagttgctcttggtcataaatggttttccatgtccccttcatagttgtactaaagaggcttgatgtatcattcaaaatagaagcctccgttgtattacaatattttacctagcaagcaatgataatgtatttctgcatttctgtattagtaacaagggcagcaactagaactttgatttcct

SEQ ID NO: 11453 - protein, 258 aa, Zea mays subsp. mays
  peptide (1)..(258): Ceres Seq. ID no. 12411832
  misc_feature (165)..(242): Pfam Name: Pollen allergen Pfam Description: Pollen allergen
  misc_feature (24)..(256): Homolog of NCBI NO: 38046730 NR Description: alpha-expansin 3 [Populus tremula x Populus
  misc_feature (1)..(258): Homolog of NCBI NO: 7407665 NR Description: alpha-expansin OsEXP10 [Oryza sativa]
  misc_feature (6)..(256): Homolog of NCBI NO: 18396479 NR Description: expansin, putative; protein id: At3g03220.1, by cDNA: 37211., supported by cDNA: gi_16604574, supported by
  misc_feature (6)..(256): Homolog of NCBI NO: 21618283 NR Description: Alpha-expansin 13 precursor (At-EXP13) (AtEx13)
  misc_feature (6)..(161): Homolog of NCBI NO: 6714416 NR Description: putative expansin precursor [Arabidopsis thaliana]
  misc_feature (156)..(256): Homolog of NCBI NO: 6714416 NR Description: putative expansin precursor [Arabidopsis thaliana]
  misc_feature (5)..(256): Homolog of NCBI NO: 4138912 NR Description: expansin precursor [Lycopersicon esculentum]
  misc_feature (8)..(256): Homolog of NCBI NO: 29467505 NR Description: expansin [Pyrus communis]
  misc_feature (11)..(255): Homolog of NCBI NO: 29467507 NR Description: expansin [Pyrus communis]
  misc_feature (9)..(256): Homolog of NCBI NO: 29466641 NR Description: expansin [Prunus persica]
MAPRLLLFLLLLLPLLAAGHQHPSSYGSSALSEWRPAKASYYAADPEDAIGGACGFGDLGKHGYGMATVGLSTALFERGAACGGCYEVKCVEDLKYCLPGTSIVVTATNFCAPNYGLPADAGGHCNPPNHHFLLPIQSFEKIALWKAGIMPIQYRRVKCLREGGVRFSVNGRHFFFTVLISNVGGAGDVRSVKIKGTELGWLPMGRNWGQVWHINCDMRGQPLSFELSSSDGKALTSFNVVPKDWEYGKTYTGKQFLL

SEQ ID NO: 11454 - protein, 193 aa, Zea mays subsp. mays
  peptide (1)..(193): Ceres Seq. ID no. 12411833
  misc_feature (100)..(177): Pfam Name: Pollen allergen Pfam Description: Pollen allergen
  misc_feature (1)..(193): Homolog of NCBI NO: 7407665 NR Description: alpha-expansin OsEXP10 [Oryza sativa]
  misc_feature (1)..(191): Homolog of NCBI NO: 18396479 NR Description: expansin, putative; protein id: At3g03220.1, by cDNA: 37211., supported by cDNA: gi_16604574, supported by
  misc_feature (1)..(191): Homolog of NCBI NO: 21618283 NR Description: Alpha-expansin 13 precursor (At-EXP13) (AtEx13)
  misc_feature (1)..(96): Homolog of NCBI NO: 6714416 NR Description: putative expansin precursor [Arabidopsis thaliana]
  misc_feature (91)..(191): Homolog of NCBI NO: 6714416 NR Description: putative expansin precursor [Arabidopsis thaliana]
  misc_feature (1)..(191): Homolog of NCBI NO: 4138912 NR Description: expansin precursor [Lycopersicon esculentum]
  misc_feature (1)..(191): Homolog of NCBI NO: 29467505 NR Description: expansin [Pyrus communis]
  misc_feature (1)..(190): Homolog of NCBI NO: 29467507 NR Description: expansin [Pyrus communis]
  misc_feature (1)..(191): Homolog of NCBI NO: 29466641 NR Description: expansin [Prunus persica]
  misc_feature (1)..(191): Homolog of NCBI NO: 38046730 NR Description: alpha-expansin 3 [Populus tremula x Populus
MATVGLSTALFERGAACGGCYEVKCVEDLKYCLPGTSIVVTATNFCAPNYGLPADAGGHCNPPNHHFLLPIQSFEKIALWKAGIMPIQYRRVKCLREGGVRFSVNGRHFFFTVLISNVGGAGDVRSVKIKGTELGWLPMGRNWGQVWHINCDMRGQPLSFELSSSDGKALTSFNVVPKDWEYGKTYTGKQFLL

SEQ ID NO: 11455 - DNA, 782 bp, Zea mays subsp. mays; identical to SEQ ID NO: 8002
  misc_feature (1)..(782): Ceres Seq. ID no. 12358043
  misc_feature: MA Experiment ID: 108504 Result: Down-regulated in Transcription
  misc_feature: MA Experiment 108504 PARAMETER Experiment Name: Zm_Drought_P Parameter: Age (day) Value: 8
  misc_feature: MA Experiment 108504 PARAMETER Experiment Name: Zm_Drought_P Parameter: Organism Value: Zea mays
  misc_feature: MA Experiment 108504 PARAMETER Experiment Name: Zm_Drought_P Parameter: Plant Line Value: 35A19
  misc_feature: MA Experiment 108504 PARAMETER Experiment Name: Zm_Drought_P Parameter: Timepoint (hr) Value: 12
  misc_feature: MA Experiment 108504 PARAMETER Experiment Name: Zm_Drought_P Parameter: Tissue Value: Aerial
  misc_feature: MA Experiment 108504 PARAMETER Experiment Name: Zm_Drought_P Parameter: Treatment Value: Drought vs. No Drought
  misc_feature: MA Experiment ID: 108522 Result: Down-regulated in Transcription
  misc_feature: MA Experiment 108522 PARAMETER Experiment Name: Zm_42deg_Heat_P Parameter: Age (day) Value: 8
  misc_feature: MA Experiment 108522 PARAMETER Experiment Name: Zm_42deg_Heat_P Parameter: Organism Value: Zea mays
  misc_feature: MA Experiment 108522 PARAMETER Experiment Name: Zm_42deg_Heat_P Parameter: Plant Line Value: 35A19
  misc_feature: MA Experiment 108522 PARAMETER Experiment Name: Zm_42deg_Heat_P Parameter: Temperature (deg C) Value: 42 vs. 22
  misc_feature: MA Experiment 108522 PARAMETER Experiment Name: Zm_42deg_Heat_P Parameter: Timepoint (hr) Value: 1
  misc_feature: MA Experiment 108522 PARAMETER Experiment Name: Zm_42deg_Heat_P Parameter: Tissue Value: Aerial
  misc_feature: MA Experiment ID: 108523 Result: Down-regulated in Transcription
  misc_feature: MA Experiment 108523 PARAMETER Experiment Name: Zm_42deg_Heat_P Parameter: Age (day) Value: 8
  misc_feature: MA Experiment 108523 PARAMETER Experiment Name: Zm_42deg_Heat_P Parameter: Organism Value: Zea mays
  misc_feature: MA Experiment 108523 PARAMETER Experiment Name: Zm_42deg_Heat_P Parameter: Plant Line Value: 35A19
  misc_feature: MA Experiment 108523 PARAMETER Experiment Name: Zm_42deg_Heat_P Parameter: Temperature (deg C) Value: 42 vs. 22
  misc_feature: MA Experiment 108523 PARAMETER Experiment Name: Zm_42deg_Heat_P Parameter: Timepoint (hr) Value: 6
  misc_feature: MA Experiment 108523 PARAMETER Experiment Name: Zm_42deg_Heat_P Parameter: Tissue Value: Aerial
  misc_feature: MA Experiment ID: 108535 Result: Up-regulated in Transcription
  misc_feature: MA Experiment 108535 PARAMETER Experiment Name: Zm_Meristem_P Parameter: Age (day) Value: 8
  misc_feature: MA Experiment 108535 PARAMETER Experiment Name: Zm_Meristem_P Parameter: Organism Value: Zea mays
  misc_feature: MA Experiment 108535 PARAMETER Experiment Name: Zm_Meristem_P Parameter: Plant Line Value: 35A19
  misc_feature: MA Experiment 108535 PARAMETER Experiment Name: Zm_Meristem_P Parameter: Tissue Value: Root Meristem vs. Above Root Meristem
  misc_feature: MA Experiment ID: 108543 Result: Up-regulated in Transcription
  misc_feature: MA Experiment ID: 108687 Result: Down-regulated in Transcription
  misc_feature: MA Experiment 108687 PARAMETER Experiment Name: Zm_Embryos-Flowers__P Parameter: Tissue Value: Embryo vs. Aerial+
  misc_feature: MA Experiment ID: 20000478 Result: Down-regulated in Transcription
  misc_feature: MA Experiment 20000478 PARAMETER Experiment Name: Zm_5mM_SA_P Parameter: Age (day) Value: 11
  misc_feature: MA Experiment 20000478 PARAMETER Experiment Name: Zm_5mM_SA_P Parameter: Organism Value: Zea mays
  misc_feature: MA Experiment 20000478 PARAMETER Experiment Name: Zm_5mM_SA_P Parameter: Plant Line Value: 35A19
  misc_feature: MA Experiment 20000478 PARAMETER Experiment Name: Zm_5mM_SA_P Parameter: Timepoint (hr) Value: 72
  misc_feature: MA Experiment 20000478 PARAMETER Experiment Name: Zm_5mM_SA_P Parameter: Tissue Value: Aerial
  misc_feature: MA Experiment 20000478 PARAMETER Experiment Name: Zm_5mM_SA_P Parameter: Treatment Value: 5mM SA vs. No Treatment
  misc_feature: MA Experiment ID: 20000479 Result: Down-regulated in Transcription
  misc_feature: MA Experiment 20000479 PARAMETER Experiment Name: Zm_Drought_P Parameter: Age (day) Value: 10
  misc_feature: MA Experiment 20000479 PARAMETER Experiment Name: Zm_Drought_P Parameter: Organism Value: Zea mays
  misc_feature: MA Experiment 20000479 PARAMETER Experiment Name: Zm_Drought_P Parameter: Plant Line Value: 35A19
  misc_feature: MA Experiment 20000479 PARAMETER Experiment Name: Zm_Drought_P Parameter: Timepoint (hr) Value: 48
  misc_feature: MA Experiment 20000479 PARAMETER Experiment Name: Zm_Drought_P Parameter: Tissue Value: Aerial
  misc_feature: MA Experiment 20000479 PARAMETER Experiment Name: Zm_Drought_P Parameter: Treatment Value: Drought vs. No Drought
  misc_feature: MA Experiment ID: 20000487 Result: Down-regulated in Transcription
  misc_feature: MA Experiment 20000487 PARAMETER Experiment Name: Zm_50mM_NH4NO3_L_to_H_P Parameter: Organism Value: Zea mays
  misc_feature: MA Experiment 20000487 PARAMETER Experiment Name: Zm_50mM_NH4NO3_L_to_H_P Parameter: Timepoint (hr) Value: 4
  misc_feature: MA Experiment 20000487 PARAMETER Experiment Name: Zm_50mM_NH4NO3_L_to_H_P Parameter: Tissue Value: Leaves
  misc_feature: MA Experiment 20000487 PARAMETER Experiment Name: Zm_50mM_NH4NO3_L_to_H_P Parameter: Treatment Value: 50mM NH4NO3 vs. 100mM Mannitol
  misc_feature: MA Experiment ID: 20000626 Result: Down-regulated in Transcription
  misc_feature: MA Experiment 20000626 PARAMETER Experiment Name: Zm_Herbicide-Treatments_P Parameter: Timepoint (hr) Value: 12
  misc_feature: MA Experiment 20000626 PARAMETER Experiment Name: Zm_Herbicide-Treatments_P Parameter: Tissue Value: Aerial
  misc_feature: MA Experiment 20000626 PARAMETER Experiment Name: Zm_Herbicide-Treatments_P Parameter: Treatment Value: Roundup vs. No Treatment
  misc_feature: MA Experiment ID: 20000632 Result: Down-regulated in Transcription
  misc_feature: MA Experiment 20000632 PARAMETER Experiment Name: Zm_Herbicide-Treatments_P Parameter: Timepoint (hr) Value: 4
  misc_feature: MA Experiment 20000632 PARAMETER Experiment Name: Zm_Herbicide-Treatments_P Parameter: Tissue Value: Aerial
  misc_feature: MA Experiment 20000632 PARAMETER Experiment Name: Zm_Herbicide-Treatments_P Parameter: Treatment Value: Glean vs. No Treatment

SEQ ID NO: 11456 - protein, 221 aa, Zea mays subsp. mays; identical to SEQ ID NO: 8003
  peptide (1)..(221): Ceres Seq. ID no. 12358044
  misc_feature (90)..(183): Pfam Name: Cation efflux family Pfam Description: Cation efflux family
  misc_feature (90)..(183): Pfam Name: Cation efflux family Pfam Description: Cation efflux family
  misc_feature (2)..(198): Homolog of NCBI NO: 11359723 NR Description: proteophosphoglycan, membrane-associated - Leishmania major (fragment) >gi|5420389|emb|CAB46680.1|
  misc_feature (47)..(200): Homolog of NCBI NO: 38175466 NR Description: putative high-affinity potassium transporter
  misc_feature (55)..(206): Homolog of NCBI NO: 11359723 NR Description: proteophosphoglycan, membrane-associated - Leishmania major (fragment) >gi|5420389|emb|CAB46680.1|
  misc_feature (2)..(202): Homolog of NCBI NO: 13592175 NR Description: ppg3 [Leishmania major]
  misc_feature (2)..(202): Homolog of NCBI NO: 5420387 NR Description: proteophosphoglycan [Leishmania major]
  misc_feature (47)..(200): Homolog of NCBI NO: 38175466 NR Description: putative high-affinity potassium transporter
  misc_feature (2)..(202): Homolog of NCBI NO: 13592175 NR Description: ppg3 [Leishmania major]
  misc_feature (35)..(196): Homolog of NCBI NO: 5420387 NR Description: proteophosphoglycan [Leishmania major]
  misc_feature (2)..(206): Homolog of NCBI NO: 25143299 NR Description: pre-mRNA splicing SR protein related RSR-1 (68.2
  misc_feature (2)..(208): Homolog of NCBI NO: 13592175 NR Description: ppg3 [Leishmania major]
  misc_feature (2)..(206): Homolog of NCBI NO: 13592175 NR Description: ppg3 [Leishmania major]
  misc_feature (48)..(202): Homolog of NCBI NO: 11359723 NR Description: proteophosphoglycan, membrane-associated - Leishmania major (fragment) >gi|5420389|emb|CAB46680.1|
  misc_feature (2)..(202): Homolog of NCBI NO: 5420387 NR Description: proteophosphoglycan [Leishmania major]
  misc_feature (55)..(206): Homolog of NCBI NO: 11359723 NR Description: proteophosphoglycan, membrane-associated - Leishmania major (fragment) >gi|5420389|emb|CAB46680.1|
  misc_feature (2)..(198): Homolog of NCBI NO: 11359723 NR Description: proteophosphoglycan, membrane-associated - Leishmania major (fragment) >gi|5420389|emb|CAB46680.1|
  misc_feature (48)..(202): Homolog of NCBI NO: 11359723 NR Description: proteophosphoglycan, membrane-associated - Leishmania major (fragment) >gi|5420389|emb|CAB46680.1|
  misc_feature (2)..(206): Homolog of NCBI NO: 13592175 NR Description: ppg3 [Leishmania major]
  misc_feature (2)..(208): Homolog of NCBI NO: 13592175 NR Description: ppg3 [Leishmania major]
  misc_feature (2)..(206): Homolog of NCBI NO: 25143299 NR Description: pre-mRNA splicing SR protein related RSR-1 (68.2
  misc_feature (35)..(196): Homolog of NCBI NO: 5420387 NR Description: proteophosphoglycan [Leishmania major]

SEQ ID NO: 11457 - protein, 206 aa, Zea mays subsp. mays; identical to SEQ ID NO: 8004
  peptide (1)..(206): Ceres Seq. ID no. 12358045
  misc_feature (49)..(206): Homolog of NCBI NO: 34907616 NR Description: contains EST C27797(C52876)~unknown protein
  misc_feature (47)..(204): Homolog of NCBI NO: 15239379 NR Description: putative protein; protein id: At5g36710.1 thaliana] >gi|8885623|dbj|BAA97553.1| to unknown protein [Arabidopsis thaliana]
  misc_feature (47)..(204): Homolog of NCBI NO: 15239407 NR Description: putative protein; protein id: At5g36800.1
  misc_feature (42)..(186): Homolog of NCBI NO: 38345379 NR Description: OSJNBa0067K08.8 [Oryza sativa (japonica
  misc_feature (39)..(186): Homolog of NCBI NO: 21703131 NR Description: AT5g16250/T21H19_170 [Arabidopsis thaliana]
  misc_feature (39)..(186): Homolog of NCBI NO: 15237310 NR Description: putative protein; protein id: At5g16250.1, by cDNA: 18222. [Arabidopsis thaliana] >gi|11346160|pir||T51495
  misc_feature (39)..(186): Homolog of NCBI NO: 21553926 NR Description: unknown [Arabidopsis thaliana]
  misc_feature (50)..(195): Homolog of NCBI NO: 18396262 NR Description: expressed protein; protein id: At3g02640.1, by cDNA: 4861., supported by cDNA: gi_17065095 [Arabidopsis
  misc_feature (49)..(206): Homolog of NCBI NO: 34907616 NR Description: contains EST C27797(C52876)~unknown protein
  misc_feature (47)..(204): Homolog of NCBI NO: 15239379 NR Description: putative protein; protein id: At5g36710.1 thaliana] >gi|8885623|dbj|BAA97553.1| to unknown protein [Arabidopsis thaliana]
  misc_feature (47)..(204): Homolog of NCBI NO: 15239407 NR Description: putative protein; protein id: At5g36800.1
  misc_feature (42)..(186): Homolog of NCBI NO: 38345379 NR Description: OSJNBa0067K08.8 [Oryza sativa (japonica
  misc_feature (39)..(186): Homolog of NCBI NO: 21703131 NR Description: AT5g16250/T21H19_170 [Arabidopsis thaliana]
  misc_feature (39)..(186): Homolog of NCBI NO: 15237310 NR Description: putative protein; protein id: At5g16250.1, by cDNA: 18222. [Arabidopsis thaliana] >gi|11346160|pir||T51495
  misc_feature (39)..(186): Homolog of NCBI NO: 21553926 NR Description: unknown [Arabidopsis thaliana]
  misc_feature (50)..(195): Homolog of NCBI NO: 18396262 NR Description: expressed protein; protein id: At3g02640.1, by cDNA: 4861., supported by cDNA: gi_17065095 [Arabidopsis

SEQ ID NO: 11458 - protein, 190 aa, Zea mays subsp. mays; identical to SEQ ID NO: 8005
  peptide (1)..(190): Ceres Seq. ID no. 12358046

SEQ ID NO: 11459 - protein, 162 aa, Zea mays subsp. mays; identical to SEQ ID NO: 8006
  peptide (1)..(162): Ceres Seq. ID no. 12358047
  misc_feature (5)..(162): Homolog of NCBI NO: 34907616 NR Description: contains EST C27797(C52876)~unknown protein
  misc_feature (3)..(160): Homolog of NCBI NO: 15239379 NR Description: putative protein; protein id: At5g36710.1 thaliana] >gi|8885623|dbj|BAA97553.1| to unknown protein [Arabidopsis thaliana]
  misc_feature (3)..(160): Homolog of NCBI NO: 15239407 NR Description: putative protein; protein id: At5g36800.1
  misc_feature (1)..(142): Homolog of NCBI NO: 38345379 NR Description: OSJNBa0067K08.8 [Oryza sativa (japonica
  misc_feature (1)..(142): Homolog of NCBI NO: 21703131 NR Description: AT5g16250/T21H19_170 [Arabidopsis thaliana]
  misc_feature (1)..(142): Homolog of NCBI NO: 15237310 NR Description: putative protein; protein id: At5g16250.1, by cDNA: 18222. [Arabidopsis thaliana] >gi|11346160|pir||T51495
  misc_feature (1)..(142): Homolog of NCBI NO: 21553926 NR Description: unknown [Arabidopsis thaliana]
  misc_feature (6)..(151): Homolog of NCBI NO: 18396262 NR Description: expressed protein; protein id: At3g02640.1, by cDNA: 4861., supported by cDNA: gi_17065095 [Arabidopsis
  misc_feature (5)..(162): Homolog of NCBI NO: 34907616 NR Description: contains EST C27797(C52876)~unknown protein
  misc_feature (3)..(160): Homolog of NCBI NO: 15239379 NR Description: putative protein; protein id: At5g36710.1 thaliana] >gi|8885623|dbj|BAA97553.1| to unknown protein [Arabidopsis thaliana]
  misc_feature (3)..(160): Homolog of NCBI NO: 15239407 NR Description: putative protein; protein id: At5g36800.1
  misc_feature (1)..(142): Homolog of NCBI NO: 38345379 NR Description: OSJNBa0067K08.8 [Oryza sativa (japonica
  misc_feature (1)..(142): Homolog of NCBI NO: 21703131 NR Description: AT5g16250/T21H19_170 [Arabidopsis thaliana]
  misc_feature (1)..(142): Homolog of NCBI NO: 15237310 NR Description: putative protein; protein id: At5g16250.1, by cDNA: 18222. [Arabidopsis thaliana] >gi|11346160|pir||T51495
  misc_feature (1)..(142): Homolog of NCBI NO: 21553926 NR Description: unknown [Arabidopsis thaliana]
  misc_feature (6)..(151): Homolog of NCBI NO: 18396262 NR Description: expressed protein; protein id: At3g02640.1, by cDNA: 4861., supported by cDNA: gi_17065095 [Arabidopsis

SEQ ID NO: 11460 - DNA, 1789 bp, Zea mays subsp. mays
  misc_feature (1)..(1789): Ceres Seq. ID no. 12374390
  misc_feature: MA Experiment ID: 108556 Result: Down-regulated in Transcription
  misc_feature: MA Experiment 108556 PARAMETER Experiment Name: Zm_Drought_P Parameter: Age (day) Value: 9
  misc_feature: MA Experiment 108556 PARAMETER Experiment Name: Zm_Drought_P Parameter: Organism Value: Zea mays
  misc_feature: MA Experiment 108556 PARAMETER Experiment Name: Zm_Drought_P Parameter: Plant Line Value: 35A19
  misc_feature: MA Experiment 108556 PARAMETER Experiment Name: Zm_Drought_P Parameter: Timepoint (hr) Value: 24
  misc_feature: MA Experiment 108556 PARAMETER Experiment Name: Zm_Drought_P Parameter: Tissue Value: Aerial
  misc_feature: MA Experiment 108556 PARAMETER Experiment Name: Zm_Drought_P Parameter: Treatment Value: Drought vs. No Drought
  misc_feature: MA Experiment ID: 20000480 Result: Down-regulated in Transcription
  misc_feature: MA Experiment 20000480 PARAMETER Experiment Name: Zm_Drought_P Parameter: Age (day) Value: 11
  misc_feature: MA Experiment 20000480 PARAMETER Experiment Name: Zm_Drought_P Parameter: Organism Value: Zea mays
  misc_feature: MA Experiment 20000480 PARAMETER Experiment Name: Zm_Drought_P Parameter: Plant Line Value: 35A19
  misc_feature: MA Experiment 20000480 PARAMETER Experiment Name: Zm_Drought_P Parameter: Timepoint (hr) Value: 72
  misc_feature: MA Experiment 20000480 PARAMETER Experiment Name: Zm_Drought_P Parameter: Tissue Value: Aerial
  misc_feature: MA Experiment 20000480 PARAMETER Experiment Name: Zm_Drought_P Parameter: Treatment Value: Drought vs. No Drought
  misc_feature: MA Experiment ID: 20000535 Result: Down-regulated in Transcription
  misc_feature: MA Experiment 20000535 PARAMETER Experiment Name: Zm_Hybrid_Seed_Dev_P Parameter: DAP Value: 30 vs. 12
  misc_feature: MA Experiment 20000535 PARAMETER Experiment Name: Zm_Hybrid_Seed_Dev_P Parameter: Organism Value: Zea mays
  misc_feature: MA Experiment 20000535 PARAMETER Experiment Name: Zm_Hybrid_Seed_Dev_P Parameter: Plant Line Value: 35A19
  misc_feature: MA Experiment 20000535 PARAMETER Experiment Name: Zm_Hybrid_Seed_Dev_P Parameter: Tissue Value: Embryo vs. Unfert Floret
ccttccctccgcctccgcctccgcccccgcccccgcccacgcccactcctcgctgccaccactcctgtcacctcttcccgcgccgacgcagccgccatggaccccgtcgccacatgggggctaaccccgctcgcgggcgccgacccggagatctacgacctcctggagcgcgagaagcggcgccagcgtcgcggcatcgagctcatcgcctccgagaacttcacctccttcgccgtcatggaggcgctcggctccgcgctcactaacaagtactccgagggcatgcccggcgcccgctactacggcggcaacgacgtcatcgacgagatcgagaacctctgccggtcacgcgcgctcgctgccttccaccttgacgccgcgtcctggggcgtcaacgtgcagccctactcgggctcccccgccaacttcgccgcctacaccgcgctgctcaacccgcacgaccggatcatggggctcgaccttccctccggcggacacctcactcacgggtactacacggccggcggtaagaagatctccgccacctcgatctactttgagagcctgccgtacaaggtgagcgccgcaacggggtacatcgactacgagaagctcgaggagaaggcacttgacttccgccccaagctcatcatctgcggtggcagtgcgtacccgagggactgggattacgccaagctcagggccgtcgccgacaaggtcggggccctgctgctctgcgacatggcgcacatcagcgggctcgtcgccgcgcaggaagctgcaaatccttttgaatattgtgatgtggttaccacaaccacgcacaagtccctcagagggccaagggctggcatgatcttctacaggaaaggccctaagccccccaagaagggccagcctgagggtgctgtttatgattacgaagacaagatcaactttgcagtgttcccatctctccaaggtggccctcacaaccaccagattgctgcacttgctgttgctctacagcaaactatgtcgcctggcttcaaggcctatgcaaagcaagtgaaggccaatgctgttgcaattggaaactatctcatgagcaagggctacaagatggtgactgatggaactgagaaccaccttgttctctgggatctccgcccccttggcttgactggaaacaaggtcgaaaagctatgtgatctttgccacatcacattgaacaagaatgctgtcttcggtgacagcagtgcattgtctccgggtggtgtccgcattggcgcgccagcaatgacctcgaggggtctactggagaaggatttcgagcagattggggagttcctccaccaggcagtgaccatctgcctgaacatccagaaggagtacggcaagctcctcaaggacttcaacaagggcctggtgaacaacaaggacatcgagaacctcaaggtccaggtggagaagtttgccgactccttcgacatgcctgggttcacgcttgagagcatgaaatacaaggagtagatatgcctctttcatgcgcggcaaggtcctcctgtaccgatgtctttccttgtggtggcgcagggtgccatggcactgcattgccgccacacttacgatgatgatgatgggttatggattttgtctacaatgtcagcaggataggctcacaattgccccctgccctccggtttggtcgcctctcaggttttcatttggtagttgttcgcagggaaccatatgagaattgcaatgtcaatcaggtgtttgccaataataattgggtggtttctgctct

SEQ ID NO: 11461 - protein, 503 aa, Zea mays subsp. mays
  peptide (1)..(503): Ceres Seq. ID no. 12374391
  misc_feature (44)..(444): Pfam Name: Serine hydroxymethyltransferase Pfam Description: Serine hydroxymethyltransferase
  misc_feature (33)..(503): Homolog of NCBI NO: 15236375 NR Description: hydroxymethyltransferase; protein id: supported by cDNA: 29662., supported by cDNA: gi_13358183, by cDNA: gi_13605526, supported by cDNA: gi_20334773 [Arabidopsis
  misc_feature (33)..(503): Homolog of NCBI NO: 21592544 NR Description: hydroxymethyltransferase [Arabidopsis thaliana]
  misc_feature (33)..(503): Homolog of NCBI NO: 11762130 NR Description: AT4g13930 [Arabidopsis thaliana]
  misc_feature (33)..(500): Homolog of NCBI NO: 15236371 NR Description: glycine hydroxymethyltransferase - like protein; id: At4g13890.1 [Arabidopsis thaliana] >gi|7433549|pir||T05258
  misc_feature (10)..(492): Homolog of NCBI NO: 18400090 NR Description: putative hydroxymethyltransferase; protein id: supported by cDNA: 122515. [Arabidopsis thaliana]
  misc_feature (10)..(492): Homolog of NCBI NO: 25286207 NR Description: probable hydroxymethyltransferase, 49598-47322 - Arabidopsis thaliana >gi|12324475|gb|AAG52195.1|AC021199_1
  misc_feature (10)..(492): Homolog of NCBI NO: 21537165 NR Description: putative hydroxymethyltransferase [Arabidopsis
  misc_feature (36)..(496): Homolog of NCBI NO: 15219182 NR Description: glycine hydroxymethyltransferase, putative; id: At1g22020.1 [Arabidopsis thaliana] F2E2.7 [Arabidopsis thaliana] >gi|21928157|gb|AAM78106.1|
  misc_feature (44)..(502): Homolog of NCBI NO: 17066746 NR Description: serine hydroxymethyltransferase [Chlamydomonas
  misc_feature (44)..(493): Homolog of NCBI NO: 18418028 NR Description: glycine hydroxymethyltransferase (EC 2.1.2.1) - protein; protein id: At4g32520.1, supported by cDNA: gi_14030718
PSLRLRLRPRPRPRPLLAATTPVTSSRADAAAMDPVATWGLTPLAGADPEIYDLLEREKRRQRRGIELIASENFTSFAVMEALGSALTNKYSEGMPGARYYGGNDVIDEIENLCRSRALAAFHLDAASWGVNVQPYSGSPANFAAYTALLNPHDRIMGLDLPSGGHLTHGYYTAGGKKISATSIYFESLPYKVSAATGYIDYEKLEEKALDFRPKLIICGGSAYPRDWDYAKLRAVADKVGALLLCDMAHISGLVAAQEAANPFEYCDVVTTTTHKSLRGPRAGMIFYRKGPKPPKKGQPEGAVYDYEDKINFAVFPSLQGGPHNHQIAALAVALQQTMSPGFKAYAKQVKANAVAIGNYLMSKGYKMVTDGTENHLVLWDLRPLGLTGNKVEKLCDLCHITLNKNAVFGDSSALSPGGVRIGAPAMTSRGLLEKDFEQIGEFLHQAVTICLNIQKEYGKLLKDFNKGLVNNKDIENLKVQVEKFADSFDMPGFTLESMKYKE

SEQ ID NO: 11462 - protein, 471 aa, Zea mays subsp. mays; identical to SEQ ID NO: 1931
  peptide (1)..(471): Ceres Seq. ID no. 12374392
  misc_feature (12)..(412): Pfam Name: Serine hydroxymethyltransferase Pfam Description: Serine hydroxymethyltransferase
  misc_feature (1)..(471): Homolog of NCBI NO: 15236375 NR Description: hydroxymethyltransferase; protein id: supported by cDNA: 29662., supported by cDNA: gi_13358183, by cDNA: gi_13605526, supported by cDNA: gi_20334773 [Arabidopsis
  misc_feature (1)..(471): Homolog of NCBI NO: 21592544 NR Description: hydroxymethyltransferase [Arabidopsis thaliana]
  misc_feature (1)..(471): Homolog of NCBI NO: 11762130 NR Description: AT4g13930 [Arabidopsis thaliana]
  misc_feature (1)..(468): Homolog of NCBI NO: 15236371 NR Description: glycine hydroxymethyltransferase - like protein; id: At4g13890.1 [Arabidopsis thaliana] >gi|7433549|pir||T05258
  misc_feature (1)..(460): Homolog of NCBI NO: 18400090 NR Description: putative hydroxymethyltransferase; protein id: supported by cDNA: 122515. [Arabidopsis thaliana]
  misc_feature (1)..(460): Homolog of NCBI NO: 25286207 NR Description: probable hydroxymethyltransferase, 49598-47322 - Arabidopsis thaliana >gi|12324475|gb|AAG52195.1|AC021199_1
  misc_feature (1)..(460): Homolog of NCBI NO: 21537165 NR Description: putative hydroxymethyltransferase [Arabidopsis
  misc_feature (4)..(464): Homolog of NCBI NO: 15219182 NR Description: glycine hydroxymethyltransferase, putative; id: At1g22020.1 [Arabidopsis thaliana] F2E2.7 [Arabidopsis thaliana] >gi|21928157|gb|AAM78106.1|
  misc_feature (12)..(470): Homolog of NCBI NO: 17066746 NR Description: serine hydroxymethyltransferase [Chlamydomonas
  misc_feature (12)..(461): Homolog of NCBI NO: 18418028 NR Description: glycine hydroxymethyltransferase (EC 2.1.2.1) - protein; protein id: At4g32520.1, supported by cDNA: gi_14030718

SEQ ID NO: 11463 - protein, 424 aa, Zea mays subsp. mays; identical to SEQ ID NO: 1932
  peptide (1)..(424): Ceres Seq. ID no. 12374393
  misc_feature (1)..(365): Pfam Name: Serine hydroxymethyltransferase Pfam Description: Serine hydroxymethyltransferase
  misc_feature (1)..(424): Homolog of NCBI NO: 15236375 NR Description: hydroxymethyltransferase; protein id: supported by cDNA: 29662., supported by cDNA: gi_13358183, by cDNA: gi_13605526, supported by cDNA: gi_20334773 [Arabidopsis
  misc_feature (1)..(424): Homolog of NCBI NO: 21592544 NR Description: hydroxymethyltransferase [Arabidopsis thaliana]
  misc_feature (1)..(424): Homolog of NCBI NO: 11762130 NR Description: AT4g13930 [Arabidopsis thaliana]
  misc_feature (1)..(421): Homolog of NCBI NO: 15236371 NR Description: glycine hydroxymethyltransferase - like protein; id: At4g13890.1 [Arabidopsis thaliana] >gi|7433549|pir||T05258
  misc_feature (1)..(413): Homolog of NCBI NO: 18400090 NR Description: putative hydroxymethyltransferase; protein id: supported by cDNA: 122515. [Arabidopsis thaliana]
  misc_feature (1)..(413): Homolog of NCBI NO: 25286207 NR Description: probable hydroxymethyltransferase, 49598-47322 - Arabidopsis thaliana >gi|12324475|gb|AAG52195.1|AC021199_1
  misc_feature (1)..(413): Homolog of NCBI NO: 21537165 NR Description: putative hydroxymethyltransferase [Arabidopsis
  misc_feature (1)..(417): Homolog of NCBI NO: 15219182 NR Description: glycine hydroxymethyltransferase, putative; id: At1g22020.1 [Arabidopsis thaliana] F2E2.7 [Arabidopsis thaliana] >gi|21928157|gb|AAM78106.1|
  misc_feature (1)..(423): Homolog of NCBI NO: 17066746 NR Description: serine hydroxymethyltransferase [Chlamydomonas
  misc_feature (1)..(414): Homolog of NCBI NO: 18418028 NR Description: glycine hydroxymethyltransferase (EC 2.1.2.1) - protein; protein id: At4g32520.1, supported by cDNA: gi_14030718

SEQ ID NO: 11464 - DNA, 1600 bp, Zea mays subsp. mays
  misc_feature (1)..(1600): Ceres Seq. ID no. 12349840
  misc_feature: MA Experiment ID: 108523 Result: Down-regulated in Transcription
  misc_feature: MA Experiment 108523 PARAMETER Experiment Name: Zm_42deg_Heat_P Parameter: Age (day) Value: 8
  misc_feature: MA Experiment 108523 PARAMETER Experiment Name: Zm_42deg_Heat_P Parameter: Organism Value: Zea mays
  misc_feature: MA Experiment 108523 PARAMETER Experiment Name: Zm_42deg_Heat_P Parameter: Plant Line Value: 35A19
  misc_feature: MA Experiment 108523 PARAMETER Experiment Name: Zm_42deg_Heat_P Parameter: Temperature (deg C) Value: 42 vs. 22
  misc_feature: MA Experiment 108523 PARAMETER Experiment Name: Zm_42deg_Heat_P Parameter: Timepoint (hr) Value: 6
  misc_feature: MA Experiment 108523 PARAMETER Experiment Name: Zm_42deg_Heat_P Parameter: Tissue Value: Aerial
  misc_feature: MA Experiment ID: 108527 Result: Down-regulated in Transcription
  misc_feature: MA Experiment 108527 PARAMETER Experiment Name: Zm_5mM_NO_P Parameter: Age (day) Value: 8
  misc_feature: MA Experiment 108527 PARAMETER Experiment Name: Zm_5mM_NO_P Parameter: Organism Value: Zea mays
  misc_feature: MA Experiment 108527 PARAMETER Experiment Name: Zm_5mM_NO_P Parameter: Plant Line Value: 35A19
  misc_feature: MA Experiment 108527 PARAMETER Experiment Name: Zm_5mM_NO_P Parameter: Timepoint (hr) Value: 6
  misc_feature: MA Experiment 108527 PARAMETER Experiment Name: Zm_5mM_NO_P Parameter: Tissue Value: Aerial
  misc_feature: MA Experiment 108527 PARAMETER Experiment Name: Zm_5mM_NO_P Parameter: Treatment Value: 5mM NO vs. No Treatment
  misc_feature: MA Experiment ID: 108536 Result: Down-regulated in Transcription
  misc_feature: MA Experiment 108536 PARAMETER Experiment Name: Zm_Meristem_P Parameter: Age (day) Value: 8
  misc_feature: MA Experiment 108536 PARAMETER Experiment Name: Zm_Meristem_P Parameter: Organism Value: Zea mays
  misc_feature: MA Experiment 108536 PARAMETER Experiment Name: Zm_Meristem_P Parameter: Plant Line Value: 35A19
  misc_feature: MA Experiment 108536 PARAMETER Experiment Name: Zm_Meristem_P Parameter: Tissue Value: Shoot Meristem vs. Above Shoot Meristem
  misc_feature: MA Experiment ID: 108556 Result: Down-regulated in Transcription
  misc_feature: MA Experiment 108556 PARAMETER Experiment Name: Zm_Drought_P Parameter: Age (day) Value: 9
  misc_feature: MA Experiment 108556 PARAMETER Experiment Name: Zm_Drought_P Parameter: Organism Value: Zea mays
  misc_feature: MA Experiment 108556 PARAMETER Experiment Name: Zm_Drought_P Parameter: Plant Line Value: 35A19
  misc_feature: MA Experiment 108556 PARAMETER Experiment Name: Zm_Drought_P Parameter: Timepoint (hr) Value: 24
  misc_feature: MA Experiment 108556 PARAMETER Experiment Name: Zm_Drought_P Parameter: Tissue Value: Aerial
  misc_feature: MA Experiment 108556 PARAMETER Experiment Name: Zm_Drought_P Parameter: Treatment Value: Drought vs. No Drought
  misc_feature: MA Experiment ID: 20000488 Result: Down-regulated in Transcription
  misc_feature: MA Experiment 20000488 PARAMETER Experiment Name: Zm_50mM_NH4NO3_L_to_H_P Parameter: Organism Value: Zea mays
  misc_feature: MA Experiment 20000488 PARAMETER Experiment Name: Zm_50mM_NH4NO3_L_to_H_P Parameter: Timepoint (hr) Value: 8
  misc_feature: MA Experiment 20000488 PARAMETER Experiment Name: Zm_50mM_NH4NO3_L_to_H_P Parameter: Tissue Value: Leaves
  misc_feature: MA Experiment 20000488 PARAMETER Experiment Name: Zm_50mM_NH4NO3_L_to_H_P Parameter: Treatment Value: 50mM NH4NO3 vs. 100mM Mannitol
  misc_feature: MA Experiment ID: 20000533 Result: Down-regulated in Transcription
  misc_feature: MA Experiment 20000533 PARAMETER Experiment Name: Zm_0.001percent_MeJA_P Parameter: Age (day) Value: 11
  misc_feature: MA Experiment 20000533 PARAMETER Experiment Name: Zm_0.001percent_MeJA_P Parameter: Organism Value: Zea mays
  misc_feature: MA Experiment 20000533 PARAMETER Experiment Name: Zm_0.001percent_MeJA_P Parameter: Plant Line Value: 35A19
  misc_feature: MA Experiment 20000533 PARAMETER Experiment Name: Zm_0.001percent_MeJA_P Parameter: Timepoint (hr) Value: 72
  misc_feature: MA Experiment 20000533 PARAMETER Experiment Name: Zm_0.001percent_MeJA_P Parameter: Tissue Value: Aerial
  misc_feature: MA Experiment 20000533 PARAMETER Experiment Name: Zm_0.001percent_MeJA_P Parameter: Treatment Value: 0.001percent MeJA vs. No Treatment
  misc_feature: MA Experiment ID: 20000626 Result: Down-regulated in Transcription
  misc_feature: MA Experiment 20000626 PARAMETER Experiment Name: Zm_Herbicide-Treatments_P Parameter: Timepoint (hr) Value: 12
  misc_feature: MA Experiment 20000626 PARAMETER Experiment Name: Zm_Herbicide-Treatments_P Parameter: Tissue Value: Aerial
  misc_feature: MA Experiment 20000626 PARAMETER Experiment Name: Zm_Herbicide-Treatments_P Parameter: Treatment Value: Roundup vs. No Treatment
  misc_feature: MA Experiment ID: 20000632 Result: Down-regulated in Transcription
  misc_feature: MA Experiment 20000632 PARAMETER Experiment Name: Zm_Herbicide-Treatments_P Parameter: Timepoint (hr) Value: 4
  misc_feature: MA Experiment 20000632 PARAMETER Experiment Name: Zm_Herbicide-Treatments_P Parameter: Tissue Value: Aerial
  misc_feature: MA Experiment 20000632 PARAMETER Experiment Name: Zm_Herbicide-Treatments_P Parameter: Treatment Value: Glean vs. No Treatment
aacacatcactcccagactgctccctcatacgtccattatttccgcaaagtgcaaccgagaatgacatgcagtcgtagtatcgtagataaccaccttatgtcgtacttcaccatcctactgctttcttcttttgctgcaacggtagcatatcctgctcgcagtgaattactgccttaccagatgaaaaaccaccattctgtatcgtcacacaacccacaaccgaaggatttcccaactgagcaactctaccgcgcctaccttgtaatccagcgcttcaagagcaccgtcaccagcgaccccaagaacgtcaccgccacctggattggtcatgatctctgcggagaaacgacctacgtggggttctactgcggatcgccggcaggaggagataagttgacagtcataggggtcattttgaatggctatagactacatgcaccaacgttggaaggtttcgttaatcagctccctgatctatctcttttccatgctgcttccaacaattttggtggcgatataccccaattaaccggcctagggtacatgtaccagctcagtgtcgccgataaagatctgcaattacaggctcaacaaaaaagggatgtccctaatgattctatagtggggggcggcggcaacattcacgcgactggtggtggctgtctatttgcagattttaacttctcgtttaatgttggaattaataagggtcacaaatttcctggttttacgcaatccaaagctctccttctcaaccacaacaatttgtccggtccacttccgtcaaacctcggtttctcaaagctgagctaccttgccctcgccaacaacaaactcaccgggccaatcccgccgtcaatcagtaacctggaagactctctcttcgaggtactccttctcaacaaccagctctccggctgcctcccccacgagctcggcatgctcaccaaggcggccgtgattgacgccggcatgaaccagctcaccggcccaatcccgtcatctttctcctgcctaagcagcgtcgagcagctcaacctggccggaaaccgcctctacggccaggtacccgacgcgctctgcaagcttgctgggcccgctggccgcctcgccaacctcacgctgtccggcaactacttcacatccgccgggccggcatgcgcggcgctgatcaaagacggagtgctggacgtgaagaacaactgcatcccggggctcaccaaccagaggcgccccgcggagtgcgcagcgttccagagccaaccaaagacatgcccggcagcgagcactcaggtgacatgccccgccgccgcagcttccaggaacgcggcggcgccaggggagaggaaggtcaaggattactccagctacgtgacgtacgctactctgcatgactgagccacactggcatgcagtaagagacagagtgccttgctggctatgtgtctcttgtattcagcatgagtgtaccctagcgtgtgttggtgtgattgtgattgctgtctatttgcattattgtacgtttgttgctgtcacatctagatcatcccattatttgtacgtccaaatccattttatggaaagtactgttggtgtttc

SEQ ID NO: 11465 - protein, 465 aa, Zea mays subsp. mays
  peptide (1)..(465): Ceres Seq. ID no. 12349841
  misc_feature (73)..(464): Homolog of NCBI NO: 32490271 NR Description: OSJNBb0116K07.13 [Oryza sativa (japonica
  misc_feature (77)..(426): Homolog of NCBI NO: 30680322 NR Description: extensin-related protein [Arabidopsis thaliana]
  misc_feature (72)..(448): Homolog of NCBI NO: 32488397 NR Description: OSJNBa0043A12.27 [Oryza sativa (japonica
  misc_feature (72)..(426): Homolog of NCBI NO: 15230349 NR Description: unknown protein; protein id: At3g19320.1 thaliana] >gi|11994454|dbj|BAB02456.1| contains similarity to
  misc_feature (72)..(464): Homolog of NCBI NO: 15222811 NR Description: unknown protein; protein id: At1g49750.1
  misc_feature (37)..(435): Homolog of NCBI NO: 37718858 NR Description: putative leucine-rich receptor-like protein
  misc_feature (186)..(422): Homolog of NCBI NO: 15230120 NR Description: disease resistance protein, putative; protein id:
  misc_feature (77)..(189): Homolog of NCBI NO: 15230120 NR Description: disease resistance protein, putative; protein id:
  misc_feature (193)..(425): Homolog of NCBI NO: 15226640 NR Description: unknown protein; protein id: At2g15880.1
  misc_feature (77)..(189): Homolog of NCBI NO: 15226640 NR Description: unknown protein; protein id: At2g15880.1
THHSQTAPSYVHYFRKVQPRMTCSRSIVDNHLMSYFTILLLSSFAATVAYPARSELLPYQMKNHHSVSSHNPQPKDFPTEQLYRAYLVIQRFKSTVTSDPKNVTATWIGHDLCGETTYVGFYCGSPAGGDKLTVIGVILNGYRLHAPTLEGFVNQLPDLSLFHAASNNFGGDIPQLTGLGYMYQLSVADKDLQLQAQQKRDVPNDSIVGGGGNIHATGGGCLFADFNFSFNVGINKGHKFPGFTQSKALLLNHNNLSGPLPSNLGFSKLSYLALANNKLTGPIPPSISNLEDSLFEVLLLNNQLSGCLPHELGMLTKAAVIDAGMNQLTGPIPSSFSCLSSVEQLNLAGNRLYGQVPDALCKLAGPAGRLANLTLSGNYFTSAGPACAALIKDGVLDVKNNCIPGLTNQRRPAECAAFQSQPKTCPAASTQVTCPAAAASRNAAAPGERKVKDYSSYVTYATLHD

SEQ ID NO: 11466 - protein, 445 aa, Zea mays subsp. mays
  peptide (1)..(445): Ceres Seq. ID no. 12349842
  misc_feature (53)..(444): Homolog of NCBI NO: 32490271 NR Description: OSJNBb0116K07.13 [Oryza sativa (japonica
  misc_feature (57)..(406): Homolog of NCBI NO: 30680322 NR Description: extensin-related protein [Arabidopsis thaliana]
  misc_feature (52)..(428): Homolog of NCBI NO: 32488397 NR Description: OSJNBa0043A12.27 [Oryza sativa (japonica
  misc_feature (52)..(406): Homolog of NCBI NO: 15230349 NR Description: unknown protein; protein id: At3g19320.1 thaliana] >gi|11994454|dbj|BAB02456.1| contains similarity to
  misc_feature (52)..(444): Homolog of NCBI NO: 15222811 NR Description: unknown protein; protein id: At1g49750.1
  misc_feature (17)..(415): Homolog of NCBI NO: 37718858 NR Description: putative leucine-rich receptor-like protein
  misc_feature (166)..(402): Homolog of NCBI NO: 15230120 NR Description: disease resistance protein, putative; protein id:
  misc_feature (57)..(169): Homolog of NCBI NO: 15230120 NR Description: disease resistance protein, putative; protein id:
  misc_feature (173)..(405): Homolog of NCBI NO: 15226640 NR Description: unknown protein; protein id: At2g15880.1
  misc_feature (57)..(169): Homolog of NCBI NO: 15226640 NR Description: unknown protein; protein id: At2g15880.1
MTCSRSIVDNHLMSYFTILLLSSFAATVAYPARSELLPYQMKNHHSVSSHNPQPKDFPTEQLYRAYLVIQRFKSTVTSDPKNVTATWIGHDLCGETTYVGFYCGSPAGGDKLTVIGVILNGYRLHAPTLEGFVNQLPDLSLFHAASNNFGGDIPQLTGLGYMYQLSVADKDLQLQAQQKRDVPNDSIVGGGGNIHATGGGCLFADFNFSFNVGINKGHKFPGFTQSKALLLNHNNLSGPLPSNLGFSKLSYLALANNKLTGPIPPSISNLEDSLFEVLLLNNQLSGCLPHELGMLTKAAVIDAGMNQLTGPIPSSFSCLSSVEQLNLAGNRLYGQVPDALCKLAGPAGRLANLTLSGNYFTSAGPACAALIKDGVLDVKNNCIPGLTNQRRPAECAAFQSQPKTCPAASTQVTCPAAAASRNAAAPGERKVKDYSSYVTYATLHD

SEQ ID NO: 11467 - protein, 433 aa, Zea mays subsp. mays
  peptide (1)..(433): Ceres Seq. ID no. 12349843
  misc_feature (41)..(432): Homolog of NCBI NO: 32490271 NR Description: OSJNBb0116K07.13 [Oryza sativa (japonica
  misc_feature (45)..(394): Homolog of NCBI NO: 30680322 NR Description: extensin-related protein [Arabidopsis thaliana]
  misc_feature (40)..(416): Homolog of NCBI NO: 32488397 NR Description: OSJNBa0043A12.27 [Oryza sativa (japonica
  misc_feature (40)..(394): Homolog of NCBI NO: 15230349 NR Description: unknown protein; protein id: At3g19320.1 thaliana] >gi|11994454|dbj|BAB02456.1| contains similarity to
  misc_feature (40)..(432): Homolog of NCBI NO: 15222811 NR Description: unknown protein; protein id: At1g49750.1
  misc_feature (5)..(403): Homolog of NCBI NO: 37718858 NR Description: putative leucine-rich receptor-like protein
  misc_feature (154)..(390): Homolog of NCBI NO: 15230120 NR Description: disease resistance protein, putative; protein id:
  misc_feature (45)..(157): Homolog of NCBI NO: 15230120 NR Description: disease resistance protein, putative; protein id:
  misc_feature (161)..(393): Homolog of NCBI NO: 15226640 NR Description: unknown protein; protein id: At2g15880.1
  misc_feature (45)..(157): Homolog of NCBI NO: 15226640 NR Description: unknown protein; protein id: At2g15880.1
MSYFTILLLSSFAATVAYPARSELLPYQMKNHHSVSSHNPQPKDFPTEQLYRAYLVIQRFKSTVTSDPKNVTATWIGHDLCGETTYVGFYCGSPAGGDKLTVIGVILNGYRLHAPTLEGFVNQLPDLSLFHAASNNFGGDIPQLTGLGYMYQLSVADKDLQLQAQQKRDVPNDSIVGGGGNIHATGGGCLFADFNFSFNVGINKGHKFPGFTQSKALLLNHNNLSGPLPSNLGFSKLSYLALANNKLTGPIPPSISNLEDSLFEVLLLNNQLSGCLPHELGMLTKAAVIDAGMNQLTGPIPSSFSCLSSVEQLNLAGNRLYGQVPDALCKLAGPAGRLANLTLSGNYFTSAGPACAALIKDGVLDVKNNCIPGLTNQRRPAECAAFQSQPKTCPAASTQVTCPAAAASRNAAAPGERKVKDYSSYVTYATLHD

SEQ ID NO: 11468 - DNA, 958 bp, Zea mays subsp. mays
  misc_feature (1)..(958): Ceres Seq. ID no. 12345616
  misc_feature: MA Experiment ID: 108530 Result: Down-regulated in Transcription
  misc_feature: MA Experiment 108530 PARAMETER Experiment Name: Zm_Imbibed_Seeds_P Parameter: Age (day) Value: 6 vs. 2
  misc_feature: MA Experiment 108530 PARAMETER Experiment Name: Zm_Imbibed_Seeds_P Parameter: Organism Value: Zea mays
  misc_feature: MA Experiment 108530 PARAMETER Experiment Name: Zm_Imbibed_Seeds_P Parameter: Plant Line Value: 35A19
  misc_feature: MA Experiment 108530 PARAMETER Experiment Name: Zm_Imbibed_Seeds_P Parameter: Tissue Value: Aerial vs. Embryo
  misc_feature: MA Experiment ID: 108535 Result: Up-regulated in Transcription
  misc_feature: MA Experiment 108535 PARAMETER Experiment Name: Zm_Meristem_P Parameter: Age (day) Value: 8
  misc_feature: MA Experiment 108535 PARAMETER Experiment Name: Zm_Meristem_P Parameter: Organism Value: Zea mays
  misc_feature: MA Experiment 108535 PARAMETER Experiment Name: Zm_Meristem_P Parameter: Plant Line Value: 35A19
  misc_feature: MA Experiment 108535 PARAMETER Experiment Name: Zm_Meristem_P Parameter: Tissue Value: Root Meristem vs. Above Root Meristem
  misc_feature: MA Experiment ID: 108544 Result: Down-regulated in Transcription
  misc_feature: MA Experiment ID: 20000534 Result: Down-regulated in Transcription
  misc_feature: MA Experiment 20000534 PARAMETER Experiment Name: Zm_Hybrid_Pollen_P Parameter: Age (day) Value: 8
  misc_feature: MA Experiment 20000534 PARAMETER Experiment Name: Zm_Hybrid_Pollen_P Parameter: Organism Value: Zea mays
  misc_feature: MA Experiment 20000534 PARAMETER Experiment Name: Zm_Hybrid_Pollen_P Parameter: Plant Line Value: 35A19
  misc_feature: MA Experiment 20000534 PARAMETER Experiment Name: Zm_Hybrid_Pollen_P Parameter: Tissue Value: Pollen vs. Aerial
  misc_feature: MA Experiment ID: 20001612 Result: Up-regulated in Transcription
  misc_feature: MA Experiment 20001612 PARAMETER Experiment Name: Zm_50ppm_KNO3_L-to-H_P Parameter: Age (day) Value: 19
  misc_feature: MA Experiment 20001612 PARAMETER Experiment Name: Zm_50ppm_KNO3_L-to-H_P Parameter: Organism Value: Zea mays
  misc_feature: MA Experiment 20001612 PARAMETER Experiment Name: Zm_50ppm_KNO3_L-to-H_P Parameter: Plant Line Value: 35A19
  misc_feature: MA Experiment 20001612 PARAMETER Experiment Name: Zm_50ppm_KNO3_L-to-H_P Parameter: Timepoint (hr) Value: 8
  misc_feature: MA Experiment 20001612 PARAMETER Experiment Name: Zm_50ppm_KNO3_L-to-H_P Parameter: Tissue Value: Roots
  misc_feature: MA Experiment 20001612 PARAMETER Experiment Name: Zm_50ppm_KNO3_L-to-H_P Parameter: Treatment Value: 50ppm KNO3 vs. 50ppm KCl
agggttcgcggatcccccacgacacctataagcaccaaccctagcccaaaaccccgcttccacttcacagcctctccgcctccgctcctcgcgccgccgccgcgtctcctcctgtacaggtaaggagaggaagagggcgaaatggtgaagcacaacaacgtcatccccaacgggcacttcaagaagcactggcagaactatgtcaagacatggttcaaccagcccgcccgcaagcagaggcgccgcatcgctcgtcaaaagaaggctgtgaagatattcccccgcccgactgctggtcctctacgccccattgttcaatgccagactttaaagtacaacatgaagtcaagggctgggagaggctttacccttgaggagctgaaggctgctggcatcccaaagaagcttgctccaaccattggtatttctgttgatcaccgccgcaagaacaaatcccttgagggactgcaggccaatgtccagaggcttaagacatacaaggccaagctggttatcttcccaaggcgtgcacacaaggttaaggctggtgactctactccagaggagcttgccaccgctacccaggtccagggtgactacatgccatttactcgtggtgagaaacgttcagttgaggttgtgaaggtcacagatgagatgaagtcatttgctgcctatggcaagctccgccttgagcggatgaacaagaaacatcttggtgcccgccagaagaaggcagctgaggcagagaaggaagataagaagtgaagcggttgaagatagtaccctgttttgttctattcagtcattagtgaatgctactacttaaagtgcttgttctatgttttttttgcggtaatggaaatagagcccagacaaacattttggtgtcctactgtttgatgccttgtacttgtttgcgaactcagctatctaatgggttattggattcttgccc

SEQ ID NO: 11469 - protein, 208 aa, Zea mays subsp. mays; identical to SEQ ID NO: 3536
  peptide (1)..(208): Ceres Seq. ID no. 12345617
  misc_feature (6)..(185): Pfam Name: Ribosomal protein L13e Pfam Description: Ribosomal protein L13e
  misc_feature (1)..(208): Homolog of NCBI NO: 34897952 NR Description: ESTs AU077873(S1878),D40121(S1878) correspond to region of the predicted gene.~Similar to Arabidopsis thaliana 60S
  misc_feature (1)..(208): Homolog of NCBI NO: 18873677 NR Description: putative cold-induced protein [Oryza sativa
  misc_feature (2)..(208): Homolog of NCBI NO: 15229064 NR Description: 60S ribosomal protein L13, BBC1 protein; protein At3g49010.2, supported by cDNA: 12182., supported by cDNA: supported by cDNA: gi_16226380, supported by cDNA: gi_17473729,
  misc_feature (2)..(208): Homolog of NCBI NO: 21537149 NR Description: 60S ribosomal protein L13, BBC1 protein
  misc_feature (2)..(208): Homolog of NCBI NO: 730450 NR Description: 60S RIBOSOMAL PROTEIN L13-2 (COLD INDUCED PROTEIN >gi|398922|emb|CAA80343.1| cold induced protein (BnC24B)
  misc_feature (1)..(208): Homolog of NCBI NO: 12580867 NR Description: 60S ribosomal protein L13E [Picea abies]
  misc_feature (2)..(208): Homolog of NCBI NO: 7441103 NR Description: ribosomal protein L13.B, cytosolic - rape
  misc_feature (2)..(208): Homolog of NCBI NO: 730449 NR Description: 60S RIBOSOMAL PROTEIN L13-1 (COLD INDUCED PROTEIN >gi|398918|emb|CAA80341.1| cold induced protein (BnC24A)
  misc_feature (2)..(208): Homolog of NCBI NO: 7441102 NR Description: ribosomal protein L13.A, cytosolic - rape
  misc_feature (2)..(208): Homolog of NCBI NO: 15237847 NR Description: 60S ribosomal protein L13; protein id: supported by cDNA: gi_14190434, supported by cDNA: gi_15450564 thaliana] >gi|10176857|dbj|BAB10063.1| 60S ribosomal protein L13

SEQ ID NO: 11470 - protein, 142 aa, Zea mays subsp. mays; identical to SEQ ID NO: 3537
  peptide (1)..(142): Ceres Seq. ID no. 12345618
  misc_feature (1)..(119): Pfam Name: Ribosomal protein L13e Pfam Description: Ribosomal protein L13e
  misc_feature (1)..(142): Homolog of NCBI NO: 34897952 NR Description: ESTs AU077873(S1878),D40121(S1878) correspond to region of the predicted gene.~Similar to Arabidopsis thaliana 60S
  misc_feature (1)..(142): Homolog of NCBI NO: 18873677 NR Description: putative cold-induced protein [Oryza sativa
  misc_feature (1)..(142): Homolog of NCBI NO: 15229064 NR Description: 60S ribosomal protein L13, BBC1 protein; protein At3g49010.2, supported by cDNA: 12182., supported by cDNA: supported by cDNA: gi_16226380, supported by cDNA: gi_17473729,
  misc_feature (1)..(142): Homolog of NCBI NO: 21537149 NR Description: 60S ribosomal protein L13, BBC1 protein
  misc_feature (1)..(142): Homolog of NCBI NO: 730450 NR Description: 60S RIBOSOMAL PROTEIN L13-2 (COLD INDUCED PROTEIN >gi|398922|emb|CAA80343.1| cold induced protein (BnC24B)
  misc_feature (1)..(142): Homolog of NCBI NO: 12580867 NR Description: 60S ribosomal protein L13E [Picea abies]
  misc_feature (1)..(142): Homolog of NCBI NO: 7441103 NR Description: ribosomal protein L13.B, cytosolic - rape
  misc_feature (1)..(142): Homolog of NCBI NO: 730449 NR Description: 60S RIBOSOMAL PROTEIN L13-1 (COLD INDUCED PROTEIN >gi|398918|emb|CAA80341.1| cold induced protein (BnC24A)
  misc_feature (1)..(142): Homolog of NCBI NO: 7441102 NR Description: ribosomal protein L13.A, cytosolic - rape
  misc_feature (1)..(142): Homolog of NCBI NO: 15237847 NR Description: 60S ribosomal protein L13; protein id: supported by cDNA: gi_14190434, supported by cDNA: gi_15450564 thaliana] >gi|10176857|dbj|BAB10063.1| 60S ribosomal protein L13

SEQ ID NO: 11471 - DNA, 668 bp, Zea mays subsp. mays
  misc_feature (1)..(668): Ceres Seq. ID no. 12344404
  misc_feature: MA Experiment ID: 108522 Result: Down-regulated in Transcription
  misc_feature: MA Experiment 108522 PARAMETER Experiment Name: Zm_42deg_Heat_P Parameter: Age (day) Value: 8
  misc_feature: MA Experiment 108522 PARAMETER Experiment Name: Zm_42deg_Heat_P Parameter: Organism Value: Zea mays
  misc_feature: MA Experiment 108522 PARAMETER Experiment Name: Zm_42deg_Heat_P Parameter: Plant Line Value: 35A19
  misc_feature: MA Experiment 108522 PARAMETER Experiment Name: Zm_42deg_Heat_P Parameter: Temperature (deg C) Value: 42 vs. 22
  misc_feature: MA Experiment 108522 PARAMETER Experiment Name: Zm_42deg_Heat_P Parameter: Timepoint (hr) Value: 1
  misc_feature: MA Experiment 108522 PARAMETER Experiment Name: Zm_42deg_Heat_P Parameter: Tissue Value: Aerial
  misc_feature: MA Experiment ID: 108529 Result: Up-regulated in Transcription
  misc_feature: MA Experiment 108529 PARAMETER Experiment Name: Zm_Imbibed_Seeds_P Parameter: Age (day) Value: 5 vs. 2
  misc_feature: MA Experiment 108529 PARAMETER Experiment Name: Zm_Imbibed_Seeds_P Parameter: Organism Value: Zea mays
  misc_feature: MA Experiment 108529 PARAMETER Experiment Name: Zm_Imbibed_Seeds_P Parameter: Plant Line Value: 35A19
  misc_feature: MA Experiment 108529 PARAMETER Experiment Name: Zm_Imbibed_Seeds_P Parameter: Tissue Value: Roots vs. Embryo
  misc_feature: MA Experiment ID: 108535 Result: Down-regulated in Transcription
  misc_feature: MA Experiment 108535 PARAMETER Experiment Name: Zm_Meristem_P Parameter: Age (day) Value: 8
  misc_feature: MA Experiment 108535 PARAMETER Experiment Name: Zm_Meristem_P Parameter: Organism Value: Zea mays
  misc_feature: MA Experiment 108535 PARAMETER Experiment Name: Zm_Meristem_P Parameter: Plant Line Value: 35A19
  misc_feature: MA Experiment 108535 PARAMETER Experiment Name: Zm_Meristem_P Parameter: Tissue Value: Root Meristem vs. Above Root Meristem
  misc_feature: MA Experiment ID: 108546 Result: Up-regulated in Transcription
  misc_feature: MA Experiment 108546 PARAMETER Experiment Name: Zm_Imbibed_Seeds_P Parameter: Age (day) Value: 3 vs. 2
  misc_feature: MA Experiment 108546 PARAMETER Experiment Name: Zm_Imbibed_Seeds_P Parameter: Organism Value: Zea mays
  misc_feature: MA Experiment 108546 PARAMETER Experiment Name: Zm_Imbibed_Seeds_P Parameter: Plant Line Value: 35A19
  misc_feature: MA Experiment 108546 PARAMETER Experiment Name: Zm_Imbibed_Seeds_P Parameter: Tissue Value: Roots vs. Embryo
  misc_feature: MA Experiment ID: 108599 Result: Down-regulated in Transcription
  misc_feature: MA Experiment 108599 PARAMETER Experiment Name: Zm_RT1_P Parameter: Age (day) Value: 11
  misc_feature: MA Experiment 108599 PARAMETER Experiment Name: Zm_RT1_P Parameter: Organism Value: Zea mays
  misc_feature: MA Experiment 108599 PARAMETER Experiment Name: Zm_RT1_P Parameter: Plant Line Value: rt1 mut vs. rt1 wt
  misc_feature: MA Experiment 108599 PARAMETER Experiment Name: Zm_RT1_P Parameter: Tissue Value: Roots
  misc_feature: MA Experiment ID: 20000535 Result: Down-regulated in Transcription
  misc_feature: MA Experiment 20000535 PARAMETER Experiment Name: Zm_Hybrid_Seed_Dev_P Parameter: DAP Value: 30 vs. 12
  misc_feature: MA Experiment 20000535 PARAMETER Experiment Name: Zm_Hybrid_Seed_Dev_P Parameter: Organism Value: Zea mays
  misc_feature: MA Experiment 20000535 PARAMETER Experiment Name: Zm_Hybrid_Seed_Dev_P Parameter: Plant Line Value: 35A19
  misc_feature: MA Experiment 20000535 PARAMETER Experiment Name: Zm_Hybrid_Seed_Dev_P Parameter: Tissue Value: Embryo vs. Unfert Floret
tattgctgaaaagacagccctagaatacggagagagaaatggattaaatgttgttacagtttgccctactatggctttaggaccgctcttgcggcctatgctcaatgtcagccatgaattcctcatgtacattattaaaggaggtcctactatgatgaagaacattccatggcacatagttgatgtccgagatgtggttgatgctttgcttatggtatacaagaaagaggaatcgacagggagatacatctgtgcaccaaattgcatcagtgcaaaagatctggtgaacatgctgaagagggattatcctaattacaattatgtaaactgcgacaatgatatggtgcttaactctatagttacaccacttatgtcggagaaactgaagaatttgggctggaaaccaatgaagacactagaggaaacattattggatagtgttgaatgctataagaagatggggcttctaaaagatgctgagggatgcccttgtcgtcttcctcacctttttcatatggctatagaaaaatgaagaatactcaccattgcttcttgtgttacctaattactctttgaacattgttgggtatgtgttctaatcacacaccaataatgttgacattcaatgggttgtggttgatttgaaataaatgtttggtttcttatgg

SEQ ID NO: 11472 - protein, 176 aa, Zea mays subsp. mays
  peptide (1)..(176): Ceres Seq. ID no. 12344405
  misc_feature (1)..(159): Homolog of NCBI NO: 6554472 NR Description: putative cinnamoyl-CoA reductase; 14056-15506
  misc_feature (1)..(159): Homolog of NCBI NO: 15223068 NR Description: putative cinnamoyl-CoA reductase; protein id:
  misc_feature (2)..(156): Homolog of NCBI NO: 15226134 NR Description: putative cinnamoyl-CoA reductase; protein id: supported by cDNA: 11254. [Arabidopsis thaliana]
  misc_feature (2)..(156): Homolog of NCBI NO: 15226135 NR Description: putative cinnamoyl-CoA reductase; protein id: supported by cDNA: gi_20260487 [Arabidopsis thaliana]
  misc_feature (1)..(157): Homolog of NCBI NO: 7431406 NR Description: probable cinnamyl-alcohol dehydrogenase (EC
  misc_feature (1)..(163): Homolog of NCBI NO: 9964087 NR Description: cinnamoyl CoA reductase [Lolium perenne]
  misc_feature (1)..(156): Homolog of NCBI NO: 28544959 NR Description: cinnamoyl-CoA reductase [Zea mays]
  misc_feature (1)..(156): Homolog of NCBI NO: 3668115 NR Description: cinnamoyl-CoA reductase [Zea mays]
  misc_feature (1)..(156): Homolog of NCBI NO: 28544965 NR Description: cinnamoyl-CoA reductase [Zea mays]
  misc_feature (1)..(156): Homolog of NCBI NO: 28544976 NR Description: cinnamoyl-CoA reductase [Zea mays]
IAEKTALEYGERNGLNVVTVCPTMALGPLLRPMLNVSHEFLMYIIKGGPTMMKNIPWHIVDVRDVVDALLMVYKKEESTGRYICAPNCISAKDLVNMLKRDYPNYNYVNCDNDMVLNSIVTPLMSEKLKNLGWKPMKTLEETLLDSVECYKKMGLLKDAEGCPCRLPHLFHMAIEK

SEQ ID NO: 11473 - protein, 153 aa, Zea mays subsp. mays
  peptide (1)..(153): Ceres Seq. ID no. 12344406
  misc_feature (1)..(136): Homolog of NCBI NO: 6554472 NR Description: putative cinnamoyl-CoA reductase; 14056-15506
  misc_feature (1)..(136): Homolog of NCBI NO: 15223068 NR Description: putative cinnamoyl-CoA reductase; protein id:
  misc_feature (1)..(133): Homolog of NCBI NO: 15226134 NR Description: putative cinnamoyl-CoA reductase; protein id: supported by cDNA: 11254. [Arabidopsis thaliana]
  misc_feature (1)..(133): Homolog of NCBI NO: 15226135 NR Description: putative cinnamoyl-CoA reductase; protein id: supported by cDNA: gi_20260487 [Arabidopsis thaliana]
  misc_feature (1)..(134): Homolog of NCBI NO: 7431406 NR Description: probable cinnamyl-alcohol dehydrogenase (EC
  misc_feature (1)..(140): Homolog of NCBI NO: 9964087 NR Description: cinnamoyl CoA reductase [Lolium perenne]
  misc_feature (1)..(133): Homolog of NCBI NO: 28544959 NR Description: cinnamoyl-CoA reductase [Zea mays]
  misc_feature (1)..(133): Homolog of NCBI NO: 3668115 NR Description: cinnamoyl-CoA reductase [Zea mays]
  misc_feature (1)..(133): Homolog of NCBI NO: 28544965 NR Description: cinnamoyl-CoA reductase [Zea mays]
  misc_feature (1)..(133): Homolog of NCBI NO: 28544976 NR Description: cinnamoyl-CoA reductase [Zea mays]
MALGPLLRPMLNVSHEFLMYIIKGGPTMMKNIPWHIVDVRDVVDALLMVYKKEESTGRYICAPNCISAKDLVNMLKRDYPNYNYVNCDNDMVLNSIVTPLMSEKLKNLGWKPMKTLEETLLDSVECYKKMGLLKDAEGCPCRLPHLFHMAIEK

SEQ ID NO: 11474 - protein, 144 aa, Zea mays subsp. mays
  peptide (1)..(144): Ceres Seq. ID no. 12344407
  misc_feature (1)..(127): Homolog of NCBI NO: 6554472 NR Description: putative cinnamoyl-CoA reductase; 14056-15506
  misc_feature (1)..(127): Homolog of NCBI NO: 15223068 NR Description: putative cinnamoyl-CoA reductase; protein id:
  misc_feature (1)..(124): Homolog of NCBI NO: 15226134 NR Description: putative cinnamoyl-CoA reductase; protein id: supported by cDNA: 11254. [Arabidopsis thaliana]
  misc_feature (1)..(124): Homolog of NCBI NO: 15226135 NR Description: putative cinnamoyl-CoA reductase; protein id: supported by cDNA: gi_20260487 [Arabidopsis thaliana]
  misc_feature (1)..(125): Homolog of NCBI NO: 7431406 NR Description: probable cinnamyl-alcohol dehydrogenase (EC
  misc_feature (1)..(131): Homolog of NCBI NO: 9964087 NR Description: cinnamoyl CoA reductase [Lolium perenne]
  misc_feature (1)..(124): Homolog of NCBI NO: 28544959 NR Description: cinnamoyl-CoA reductase [Zea mays]
  misc_feature (1)..(124): Homolog of NCBI NO: 3668115 NR Description: cinnamoyl-CoA reductase [Zea mays]
  misc_feature (1)..(124): Homolog of NCBI NO: 28544965 NR Description: cinnamoyl-CoA reductase [Zea mays]
  misc_feature (1)..(124): Homolog of NCBI NO: 28544976 NR Description: cinnamoyl-CoA reductase [Zea mays]
MLNVSHEFLMYIIKGGPTMMKNIPWHIVDVRDVVDALLMVYKKEESTGRYICAPNCISAKDLVNMLKRDYPNYNYVNCDNDMVLNSIVTPLMSEKLKNLGWKPMKTLEETLLDSVECYKKMGLLKDAEGCPCRLPHLFHMAIEK

SEQ ID NO: 11475 - DNA, 1401 bp, Zea mays subsp. mays
  misc_feature (1)..(1401): Ceres Seq. ID no. 13636633
  misc_feature: MA Experiment ID: 108504 Result: Down-regulated in Transcription
  misc_feature: MA Experiment 108504 PARAMETER Experiment Name: Zm_Drought_P Parameter: Age (day) Value: 8
  misc_feature: MA Experiment 108504 PARAMETER Experiment Name: Zm_Drought_P Parameter: Organism Value: Zea mays
  misc_feature: MA Experiment 108504 PARAMETER Experiment Name: Zm_Drought_P Parameter: Plant Line Value: 35A19
  misc_feature: MA Experiment 108504 PARAMETER Experiment Name: Zm_Drought_P Parameter: Timepoint (hr) Value: 12
  misc_feature: MA Experiment 108504 PARAMETER Experiment Name: Zm_Drought_P Parameter: Tissue Value: Aerial
  misc_feature: MA Experiment 108504 PARAMETER Experiment Name: Zm_Drought_P Parameter: Treatment Value: Drought vs. No Drought
  misc_feature: MA Experiment ID: 108515 Result: Up-regulated in Transcription
  misc_feature: MA Experiment 108515 PARAMETER Experiment Name: Zm_2mM_SA_P Parameter: Age (day) Value: 8
  misc_feature: MA Experiment 108515 PARAMETER Experiment Name: Zm_2mM_SA_P Parameter: Organism Value: Zea mays
  misc_feature: MA Experiment 108515 PARAMETER Experiment Name: Zm_2mM_SA_P Parameter: Plant Line Value: 35A19
  misc_feature: MA Experiment 108515 PARAMETER Experiment Name: Zm_2mM_SA_P Parameter: Timepoint (hr) Value: 12
  misc_feature: MA Experiment 108515 PARAMETER Experiment Name: Zm_2mM_SA_P Parameter: Tissue Value: Aerial
  misc_feature: MA Experiment 108515 PARAMETER Experiment Name: Zm_2mM_SA_P Parameter: Treatment Value: 2mM SA vs. No Treatment
  misc_feature: MA Experiment ID: 108523 Result: Down-regulated in Transcription
  misc_feature: MA Experiment 108523 PARAMETER Experiment Name: Zm_42deg_Heat_P Parameter: Age (day) Value: 8
  misc_feature: MA Experiment 108523 PARAMETER Experiment Name: Zm_42deg_Heat_P Parameter: Organism Value: Zea mays
  misc_feature: MA Experiment 108523 PARAMETER Experiment Name: Zm_42deg_Heat_P Parameter: Plant Line Value: 35A19
  misc_feature: MA Experiment 108523 PARAMETER Experiment Name: Zm_42deg_Heat_P Parameter: Temperature (deg C) Value: 42 vs. 22
  misc_feature: MA Experiment 108523 PARAMETER Experiment Name: Zm_42deg_Heat_P Parameter: Timepoint (hr) Value: 6
  misc_feature: MA Experiment 108523 PARAMETER Experiment Name: Zm_42deg_Heat_P Parameter: Tissue Value: Aerial
  misc_feature: MA Experiment ID: 108529 Result: Down-regulated in Transcription
  misc_feature: MA Experiment 108529 PARAMETER Experiment Name: Zm_Imbibed_Seeds_P Parameter: Age (day) Value: 5 vs. 2
  misc_feature: MA Experiment 108529 PARAMETER Experiment Name: Zm_Imbibed_Seeds_P Parameter: Organism Value: Zea mays
  misc_feature: MA Experiment 108529 PARAMETER Experiment Name: Zm_Imbibed_Seeds_P Parameter: Plant Line Value: 35A19
  misc_feature: MA Experiment 108529 PARAMETER Experiment Name: Zm_Imbibed_Seeds_P Parameter: Tissue Value: Roots vs. Embryo
  misc_feature: MA Experiment ID: 108530 Result: Down-regulated in Transcription
  misc_feature: MA Experiment 108530 PARAMETER Experiment Name: Zm_Imbibed_Seeds_P Parameter: Age (day) Value: 6 vs. 2
  misc_feature: MA Experiment 108530 PARAMETER Experiment Name: Zm_Imbibed_Seeds_P Parameter: Organism Value: Zea mays
  misc_feature: MA Experiment 108530 PARAMETER Experiment Name: Zm_Imbibed_Seeds_P Parameter: Plant Line Value: 35A19
  misc_feature: MA Experiment 108530 PARAMETER Experiment Name: Zm_Imbibed_Seeds_P Parameter: Tissue Value: Aerial vs. Embryo
  misc_feature: MA Experiment ID: 108556 Result: Down-regulated in Transcription
  misc_feature: MA Experiment 108556 PARAMETER Experiment Name: Zm_Drought_P Parameter: Age (day) Value: 9
  misc_feature: MA Experiment 108556 PARAMETER Experiment Name: Zm_Drought_P Parameter: Organism Value: Zea mays
  misc_feature: MA Experiment 108556 PARAMETER Experiment Name: Zm_Drought_P Parameter: Plant Line Value: 35A19
  misc_feature: MA Experiment 108556 PARAMETER Experiment Name: Zm_Drought_P Parameter: Timepoint (hr) Value: 24
  misc_feature: MA Experiment 108556 PARAMETER Experiment Name: Zm_Drought_P Parameter: Tissue Value: Aerial
  misc_feature: MA Experiment 108556 PARAMETER Experiment Name: Zm_Drought_P Parameter: Treatment Value: Drought vs. No Drought
  misc_feature: MA Experiment ID: 108559 Result: Down-regulated in Transcription
  misc_feature: MA Experiment 108559 PARAMETER Experiment Name: Zm_5mM_NO_P Parameter: Age (day) Value: 8
  misc_feature: MA Experiment 108559 PARAMETER Experiment Name: Zm_5mM_NO_P Parameter: Organism Value: Zea mays
  misc_feature: MA Experiment 108559 PARAMETER Experiment Name: Zm_5mM_NO_P Parameter: Plant Line Value: 35A19
  misc_feature: MA Experiment 108559 PARAMETER Experiment Name: Zm_5mM_NO_P Parameter: Timepoint (hr) Value: 12
  misc_feature: MA Experiment 108559 PARAMETER Experiment Name: Zm_5mM_NO_P Parameter: Tissue Value: Aerial
  misc_feature: MA Experiment 108559 PARAMETER Experiment Name: Zm_5mM_NO_P Parameter: Treatment Value: 5mM NO vs. No Treatment
  misc_feature: MA Experiment ID: 108597 Result: Down-regulated in Transcription
  misc_feature: MA Experiment 108597 PARAMETER Experiment Name: Zm_100uM_ABA_P Parameter: Age (day) Value: 9
  misc_feature: MA Experiment 108597 PARAMETER Experiment Name: Zm_100uM_ABA_P Parameter: Organism Value: Zea mays
  misc_feature: MA Experiment 108597 PARAMETER Experiment Name: Zm_100uM_ABA_P Parameter: Plant Line Value: 35A19
  misc_feature: MA Experiment 108597 PARAMETER Experiment Name: Zm_100uM_ABA_P Parameter: Timepoint (hr) Value: 24
  misc_feature: MA Experiment 108597 PARAMETER Experiment Name: Zm_100uM_ABA_P Parameter: Tissue Value: Aerial
  misc_feature: MA Experiment 108597 PARAMETER Experiment Name: Zm_100uM_ABA_P Parameter: Treatment Value: 100uM ABA vs. No Treatment
  misc_feature: MA Experiment ID: 20000478 Result: Down-regulated in Transcription
  misc_feature: MA Experiment 20000478 PARAMETER Experiment Name: Zm_5mM_SA_P Parameter: Age (day) Value: 11
  misc_feature: MA Experiment 20000478 PARAMETER Experiment Name: Zm_5mM_SA_P Parameter: Organism Value: Zea mays
  misc_feature: MA Experiment 20000478 PARAMETER Experiment Name: Zm_5mM_SA_P Parameter: Plant Line Value: 35A19
  misc_feature: MA Experiment 20000478 PARAMETER Experiment Name: Zm_5mM_SA_P Parameter: Timepoint (hr) Value: 72
  misc_feature: MA Experiment 20000478 PARAMETER Experiment Name: Zm_5mM_SA_P Parameter: Tissue Value: Aerial
  misc_feature: MA Experiment 20000478 PARAMETER Experiment Name: Zm_5mM_SA_P Parameter: Treatment Value: 5mM SA vs. No Treatment
  misc_feature: MA Experiment ID: 20000480 Result: Down-regulated in Transcription
  misc_feature: MA Experiment 20000480 PARAMETER Experiment Name: Zm_Drought_P Parameter: Age (day) Value: 11
  misc_feature: MA Experiment 20000480 PARAMETER Experiment Name: Zm_Drought_P Parameter: Organism Value: Zea mays
  misc_feature: MA Experiment 20000480 PARAMETER Experiment Name: Zm_Drought_P Parameter: Plant Line Value: 35A19
  misc_feature: MA Experiment 20000480 PARAMETER Experiment Name: Zm_Drought_P Parameter: Timepoint (hr) Value: 72
  misc_feature: MA Experiment 20000480 PARAMETER Experiment Name: Zm_Drought_P Parameter: Tissue Value: Aerial
  misc_feature: MA Experiment 20000480 PARAMETER Experiment Name: Zm_Drought_P Parameter: Treatment Value: Drought vs. No Drought
  misc_feature: MA Experiment ID: 20000487 Result: Down-regulated in Transcription
  misc_feature: MA Experiment 20000487 PARAMETER Experiment Name: Zm_50mM_NH4NO3_L_to_H_P Parameter: Organism Value: Zea mays
  misc_feature: MA Experiment 20000487 PARAMETER Experiment Name: Zm_50mM_NH4NO3_L_to_H_P Parameter: Timepoint (hr) Value: 4
  misc_feature: MA Experiment 20000487 PARAMETER Experiment Name: Zm_50mM_NH4NO3_L_to_H_P Parameter: Tissue Value: Leaves
  misc_feature: MA Experiment 20000487 PARAMETER Experiment Name: Zm_50mM_NH4NO3_L_to_H_P Parameter: Treatment Value: 50mM NH4NO3 vs. 100mM Mannitol
  misc_feature: MA Experiment ID: 20000535 Result: Up-regulated in Transcription
  misc_feature: MA Experiment 20000535 PARAMETER Experiment Name: Zm_Hybrid_Seed_Dev_P Parameter: DAP Value: 30 vs. 12
  misc_feature: MA Experiment 20000535 PARAMETER Experiment Name: Zm_Hybrid_Seed_Dev_P Parameter: Organism Value: Zea mays
  misc_feature: MA Experiment 20000535 PARAMETER Experiment Name: Zm_Hybrid_Seed_Dev_P Parameter: Plant Line Value: 35A19
  misc_feature: MA Experiment 20000535 PARAMETER Experiment Name: Zm_Hybrid_Seed_Dev_P Parameter: Tissue Value: Embryo vs. Unfert Floret
  misc_feature: MA Experiment ID: 20000627 Result: Up-regulated in Transcription
  misc_feature: MA Experiment 20000627 PARAMETER Experiment Name: Zm_Herbicide-Treatments_P Parameter: Timepoint (hr) Value: 12
  misc_feature: MA Experiment 20000627 PARAMETER Experiment Name: Zm_Herbicide-Treatments_P Parameter: Tissue Value: Aerial
  misc_feature: MA Experiment 20000627 PARAMETER Experiment Name: Zm_Herbicide-Treatments_P Parameter: Treatment Value: Finale vs. No Treatment
  misc_feature: MA Experiment ID: 20000632 Result: Down-regulated in Transcription
  misc_feature: MA Experiment 20000632 PARAMETER Experiment Name: Zm_Herbicide-Treatments_P Parameter: Timepoint (hr) Value: 4
  misc_feature: MA Experiment 20000632 PARAMETER Experiment Name: Zm_Herbicide-Treatments_P Parameter: Tissue Value: Aerial
  misc_feature: MA Experiment 20000632 PARAMETER Experiment Name: Zm_Herbicide-Treatments_P Parameter: Treatment Value: Glean vs. No Treatment
gtcatcaatcaaatactcacacaaccatggggcaccaggcgcagcacggcacggacgacaccgaggagctgctcgcagcccaccggcagctgtggtgccatgccctgggctacgtcaagtccatggcgctcaagtgcgccctggacctgcgcatccccgacaccatcgaccgctgcggcgggagcgccaccctgggcgagctgctcgccgcaagcgagatctcggcgtccaaccacgactacctccgacgggtcatgcgcacgctgacagccatgcgcatcttcgcggccagccacgaccccgccaaggccgacgacgcggccgccatctcctaccagctcaccccggcgtcccggctgctcgtcagcagcagcagcagcgtcgacgacgccgccgggcctcgaaggagaacactactaccccgagcatcctccccaacatcgcccacctggtccgccccaacaccatctccctgctgttcagcatgggcgagtggatgaaggacgagagcgcggcgtccgtgtcgctgtacgagacggtgcaccggcaggggatgtgggcgtgcgtggaggacgacgcggccaacagggccagcttctacgagagcatggacgccgacacccggctcgtgatgcaggccgtggtccgccggtgcccgcacgtgttcgacggcatcaagtcgctcgtcgacgtcggcggcggccgcggcaccgccgccgccgccatcgtcgccgccttcccgcacatccagaggtgcaccgtcatggacctcccccacgtcgtcgccgaggctcccgccggcaccgccggcctgtccttccacggcggcgacatgttcgagcacatcccgtcggctgacgcactcatgctcaagtggatcctgcacgactgggatgaggacaagtgcatcaagataatggagcgctgcaaggaagcgatcggtggcaaggaagcaggggggaaggtgataataatagacacggtgctcggatctcgggcagacgacgacgacgacaagacgtgcagggagacgtatgtgttggatctccacatactgagcttcgtgaacggggcggagcgggaggagcacgagtggaggaggatcttcctggcggctgggttccgtgactacaagatcacgcacacccgaggcatcccgtccatcatcgaggtcttcccgtgatgatcatggatcgagagtcgatcatatatgcatgtttgtacgtgtttgtgtcataataaatcgatcgatcatgttgtttactctttttatttcggtatgtagttgcatctgtgggcgggctaaaataaatcacggccggccgggcttcatcaagcccatgtatccagctgtgtgtaataatgcaatggaaaacgaaccaaaaagaatgcttccattcc

SEQ ID NO: 11476 - protein, 393 aa, Zea mays subsp. mays
  peptide (1)..(393): Ceres Seq. ID no. 15220370
  misc_feature (150)..(379): Pfam Name: O-methyltransferase Pfam Description: O-methyltransferase
  misc_feature (150)..(379): Pfam Name: O-methyltransferase Pfam Description: O-methyltransferase
  misc_feature (150)..(393): Homolog of NCBI NO: 4098238 NR Description: o-methyltransferase [Triticum aestivum]
  misc_feature (145)..(393): Homolog of NCBI NO: 1353193 NR Description: O-METHYLTRANSFERASE ZRP4 (OMT)
  misc_feature (147)..(393): Homolog of NCBI NO: 37530600 NR Description: putative o-methyltransferase ZRP4 [Oryza sativa
  misc_feature (150)..(393): Homolog of NCBI NO: 37530606 NR Description: putative o-methyltransferase ZRP4 [Oryza sativa
  misc_feature (142)..(393): Homolog of NCBI NO: 22093735 NR Description: putative o-methyltransferase [Oryza sativa
  misc_feature (145)..(393): Homolog of NCBI NO: 1353193 NR Description: O-METHYLTRANSFERASE ZRP4 (OMT)
  misc_feature (150)..(393): Homolog of NCBI NO: 37530606 NR Description: putative o-methyltransferase ZRP4 [Oryza sativa
  misc_feature (142)..(393): Homolog of NCBI NO: 16903138 NR Description: chavicol O-methyltransferase [Ocimum basilicum]
  misc_feature (142)..(393): Homolog of NCBI NO: 38175602 NR Description: putative catechol O-methyltransferase [Oryza
  misc_feature (142)..(393): Homolog of NCBI NO: 20514367 NR Description: orcinol O-methyltransferase [Rosa hybrid cultivar]
  misc_feature (138)..(393): Homolog of NCBI NO: 6177792 NR Description: O-methyltransferase [Pyrus pyrifolia]
  misc_feature (150)..(393): Homolog of NCBI NO: 34909608 NR Description: putative o-methyltransferase [Oryza sativa
  misc_feature (142)..(393): Homolog of NCBI NO: 22093735 NR Description: putative o-methyltransferase [Oryza sativa
  misc_feature (147)..(393): Homolog of NCBI NO: 37530600 NR Description: putative o-methyltransferase ZRP4 [Oryza sativa
  misc_feature (150)..(393): Homolog of NCBI NO: 4098238 NR Description: o-methyltransferase [Triticum aestivum]
  misc_feature (150)..(393): Homolog of NCBI NO: 34909608 NR Description: putative o-methyltransferase [Oryza sativa
  misc_feature (138)..(393): Homolog of NCBI NO: 6177792 NR Description: O-methyltransferase [Pyrus pyrifolia]
  misc_feature (142)..(393): Homolog of NCBI NO: 20514367 NR Description: orcinol O-methyltransferase [Rosa hybrid cultivar]
  misc_feature (142)..(393): Homolog of NCBI NO: 38175602 NR Description: putative catechol O-methyltransferase [Oryza
  misc_feature (142)..(393): Homolog of NCBI NO: 16903138 NR Description: chavicol O-methyltransferase [Ocimum basilicum]
SSIKYSHNHGAPGAARHGRHRGAARSPPAAVVPCPGLRQVHGAQVRPGPAHPRHHRPLRRERHPGRAARRKRDLGVQPRLPPTGHAHADSHAHLRGQPRPRQGRRRGRHLLPAHPGVPAARQQQQQRRRRRRASKENTTTPSILPNIAHLVRPNTISLLFSMGEWMKDESAASVSLYETVHRQGMWACVEDDAANRASFYESMDADTRLVMQAVVRRCPHVFDGIKSLVDVGGGRGTAAAAIVAAFPHIQRCTVMDLPHVVAEAPAGTAGLSFHGGDMFEHIPSADALMLKWILHDWDEDKCIKIMERCKEAIGGKEAGGKVIIIDTVLGSRADDDDDKTCRETYVLDLHILSFVNGAEREEHEWRRIFLAAGFRDYKITHTRGIPSIIEVFP

SEQ ID NO: 11477 - protein, 232 aa, Zea mays subsp. mays
  peptide (1)..(232): Ceres Seq. ID no. 15220371
  misc_feature (1)..(218): Pfam Name: O-methyltransferase Pfam Description: O-methyltransferase
  misc_feature (1)..(218): Pfam Name: O-methyltransferase Pfam Description: O-methyltransferase
  misc_feature (1)..(232): Homolog of NCBI NO: 4098238 NR Description: o-methyltransferase [Triticum aestivum]
  misc_feature (1)..(232): Homolog of NCBI NO: 1353193 NR Description: O-METHYLTRANSFERASE ZRP4 (OMT)
  misc_feature (1)..(232): Homolog of NCBI NO: 37530600 NR Description: putative o-methyltransferase ZRP4 [Oryza sativa
  misc_feature (1)..(232): Homolog of NCBI NO: 37530606 NR Description: putative o-methyltransferase ZRP4 [Oryza sativa
  misc_feature (1)..(232): Homolog of NCBI NO: 22093735 NR Description: putative o-methyltransferase [Oryza sativa
  misc_feature (1)..(232): Homolog of NCBI NO: 1353193 NR Description: O-METHYLTRANSFERASE ZRP4 (OMT)
  misc_feature (1)..(232): Homolog of NCBI NO: 37530606 NR Description: putative o-methyltransferase ZRP4 [Oryza sativa
  misc_feature (1)..(232): Homolog of NCBI NO: 16903138 NR Description: chavicol O-methyltransferase [Ocimum basilicum]
  misc_feature (1)..(232): Homolog of NCBI NO: 38175602 NR Description: putative catechol O-methyltransferase [Oryza
  misc_feature (1)..(232): Homolog of NCBI NO: 20514367 NR Description: orcinol O-methyltransferase [Rosa hybrid cultivar]
  misc_feature (1)..(232): Homolog of NCBI NO: 6177792 NR Description: O-methyltransferase [Pyrus pyrifolia]
  misc_feature (1)..(232): Homolog of NCBI NO: 34909608 NR Description: putative o-methyltransferase [Oryza sativa
  misc_feature (1)..(232): Homolog of NCBI NO: 22093735 NR Description: putative o-methyltransferase [Oryza sativa
  misc_feature (1)..(232): Homolog of NCBI NO: 37530600 NR Description: putative o-methyltransferase ZRP4 [Oryza sativa
  misc_feature (1)..(232): Homolog of NCBI NO: 4098238 NR Description: o-methyltransferase [Triticum aestivum]
  misc_feature (1)..(232): Homolog of NCBI NO: 34909608 NR Description: putative o-methyltransferase [Oryza sativa
  misc_feature (1)..(232): Homolog of NCBI NO: 6177792 NR Description: O-methyltransferase [Pyrus pyrifolia]
  misc_feature (1)..(232): Homolog of NCBI NO: 20514367 NR Description: orcinol O-methyltransferase [Rosa hybrid cultivar]
  misc_feature (1)..(232): Homolog of NCBI NO: 38175602 NR Description: putative catechol O-methyltransferase [Oryza
  misc_feature (1)..(232): Homolog of NCBI NO: 16903138 NR Description: chavicol O-methyltransferase [Ocimum basilicum]
MGEWMKDESAASVSLYETVHRQGMWACVEDDAANRASFYESMDADTRLVMQAVVRRCPHVFDGIKSLVDVGGGRGTAAAAIVAAFPHIQRCTVMDLPHVVAEAPAGTAGLSFHGGDMFEHIPSADALMLKWILHDWDEDKCIKIMERCKEAIGGKEAGGKVIIIDTVLGSRADDDDDKTCRETYVLDLHILSFVNGAEREEHEWRRIFLAAGFRDYKITHTRGIPSIIEVFP

SEQ ID NO: 11478 - protein, 228 aa, Zea mays subsp. mays
  peptide (1)..(228): Ceres Seq. ID no. 15220372
  misc_feature (1)..(214): Pfam Name: O-methyltransferase Pfam Description: O-methyltransferase
  misc_feature (1)..(214): Pfam Name: O-methyltransferase Pfam Description: O-methyltransferase
  misc_feature (1)..(228): Homolog of NCBI NO: 4098238 NR Description: o-methyltransferase [Triticum aestivum]
  misc_feature (1)..(228): Homolog of NCBI NO: 1353193 NR Description: O-METHYLTRANSFERASE ZRP4 (OMT)
  misc_feature (1)..(228): Homolog of NCBI NO: 37530600 NR Description: putative o-methyltransferase ZRP4 [Oryza sativa
  misc_feature (1)..(228): Homolog of NCBI NO: 37530606 NR Description: putative o-methyltransferase ZRP4 [Oryza sativa
  misc_feature (1)..(228): Homolog of NCBI NO: 22093735 NR Description: putative o-methyltransferase [Oryza sativa
  misc_feature (1)..(228): Homolog of NCBI NO: 1353193 NR Description: O-METHYLTRANSFERASE ZRP4 (OMT)
  misc_feature (1)..(228): Homolog of NCBI NO: 37530606 NR Description: putative o-methyltransferase ZRP4 [Oryza sativa
  misc_feature (1)..(228): Homolog of NCBI NO: 16903138 NR Description: chavicol O-methyltransferase [Ocimum basilicum]
  misc_feature (1)..(228): Homolog of NCBI NO: 38175602 NR Description: putative catechol O-methyltransferase [Oryza
  misc_feature (1)..(228): Homolog of NCBI NO: 20514367 NR Description: orcinol O-methyltransferase [Rosa hybrid cultivar]
  misc_feature (1)..(228): Homolog of NCBI NO: 6177792 NR Description: O-methyltransferase [Pyrus pyrifolia]
  misc_feature (1)..(228): Homolog of NCBI NO: 34909608 NR Description: putative o-methyltransferase [Oryza sativa
  misc_feature (1)..(228): Homolog of NCBI NO: 22093735 NR Description: putative o-methyltransferase [Oryza sativa
  misc_feature (1)..(228): Homolog of NCBI NO: 37530600 NR Description: putative o-methyltransferase ZRP4 [Oryza sativa
  misc_feature (1)..(228): Homolog of NCBI NO: 4098238 NR Description: o-methyltransferase [Triticum aestivum]
  misc_feature (1)..(228): Homolog of NCBI NO: 34909608 NR Description: putative o-methyltransferase [Oryza sativa
  misc_feature (1)..(228): Homolog of NCBI NO: 6177792 NR Description: O-methyltransferase [Pyrus pyrifolia]
  misc_feature (1)..(228): Homolog of NCBI NO: 20514367 NR Description: orcinol O-methyltransferase [Rosa hybrid cultivar]
  misc_feature (1)..(228): Homolog of NCBI NO: 38175602 NR Description: putative catechol O-methyltransferase [Oryza
  misc_feature (1)..(228): Homolog of NCBI NO: 16903138 NR Description: chavicol O-methyltransferase [Ocimum basilicum]
MKDESAASVSLYETVHRQGMWACVEDDAANRASFYESMDADTRLVMQAVVRRCPHVFDGIKSLVDVGGGRGTAAAAIVAAFPHIQRCTVMDLPHVVAEAPAGTAGLSFHGGDMFEHIPSADALMLKWILHDWDEDKCIKIMERCKEAIGGKEAGGKVIIIDTVLGSRADDDDDKTCRETYVLDLHILSFVNGAEREEHEWRRIFLAAGFRDYKITHTRGIPSIIEVFP

SEQ ID NO: 11479 - DNA, 1106 bp, Zea mays subsp. mays
  misc_feature (1)..(1106): Ceres Seq. ID no. 12411811
  misc_feature: MA Experiment ID: 108523 Result: Down-regulated in Transcription
  misc_feature: MA Experiment 108523 PARAMETER Experiment Name: Zm_42deg_Heat_P Parameter: Age (day) Value: 8
  misc_feature: MA Experiment 108523 PARAMETER Experiment Name: Zm_42deg_Heat_P Parameter: Organism Value: Zea mays
  misc_feature: MA Experiment 108523 PARAMETER Experiment Name: Zm_42deg_Heat_P Parameter: Plant Line Value: 35A19
  misc_feature: MA Experiment 108523 PARAMETER Experiment Name: Zm_42deg_Heat_P Parameter: Temperature (deg C) Value: 42 vs. 22
  misc_feature: MA Experiment 108523 PARAMETER Experiment Name: Zm_42deg_Heat_P Parameter: Timepoint (hr) Value: 6
  misc_feature: MA Experiment 108523 PARAMETER Experiment Name: Zm_42deg_Heat_P Parameter: Tissue Value: Aerial
  misc_feature: MA Experiment ID: 108535 Result: Down-regulated in Transcription
  misc_feature: MA Experiment 108535 PARAMETER Experiment Name: Zm_Meristem_P Parameter: Age (day) Value: 8
  misc_feature: MA Experiment 108535 PARAMETER Experiment Name: Zm_Meristem_P Parameter: Organism Value: Zea mays
  misc_feature: MA Experiment 108535 PARAMETER Experiment Name: Zm_Meristem_P Parameter: Plant Line Value: 35A19
  misc_feature: MA Experiment 108535 PARAMETER Experiment Name: Zm_Meristem_P Parameter: Tissue Value: Root Meristem vs. Above Root Meristem
  misc_feature: MA Experiment ID: 108544 Result: Down-regulated in Transcription
  misc_feature: MA Experiment ID: 108556 Result: Down-regulated in Transcription
  misc_feature: MA Experiment 108556 PARAMETER Experiment Name: Zm_Drought_P Parameter: Age (day) Value: 9
  misc_feature: MA Experiment 108556 PARAMETER Experiment Name: Zm_Drought_P Parameter: Organism Value: Zea mays
  misc_feature: MA Experiment 108556 PARAMETER Experiment Name: Zm_Drought_P Parameter: Plant Line Value: 35A19
  misc_feature: MA Experiment 108556 PARAMETER Experiment Name: Zm_Drought_P Parameter: Timepoint (hr) Value: 24
  misc_feature: MA Experiment 108556 PARAMETER Experiment Name: Zm_Drought_P Parameter: Tissue Value: Aerial
  misc_feature: MA Experiment 108556 PARAMETER Experiment Name: Zm_Drought_P Parameter: Treatment Value: Drought vs. No Drought
  misc_feature: MA Experiment ID: 108597 Result: Down-regulated in Transcription
  misc_feature: MA Experiment 108597 PARAMETER Experiment Name: Zm_100uM_ABA_P Parameter: Age (day) Value: 9
  misc_feature: MA Experiment 108597 PARAMETER Experiment Name: Zm_100uM_ABA_P Parameter: Organism Value: Zea mays
  misc_feature: MA Experiment 108597 PARAMETER Experiment Name: Zm_100uM_ABA_P Parameter: Plant Line Value: 35A19
  misc_feature: MA Experiment 108597 PARAMETER Experiment Name: Zm_100uM_ABA_P Parameter: Timepoint (hr) Value: 24
  misc_feature: MA Experiment 108597 PARAMETER Experiment Name: Zm_100uM_ABA_P Parameter: Tissue Value: Aerial
  misc_feature: MA Experiment 108597 PARAMETER Experiment Name: Zm_100uM_ABA_P Parameter: Treatment Value: 100uM ABA vs. No Treatment
  misc_feature: MA Experiment ID: 20000477 Result: Down-regulated in Transcription
  misc_feature: MA Experiment 20000477 PARAMETER Experiment Name: Zm_5mM_SA_P Parameter: Age (day) Value: 10
  misc_feature: MA Experiment 20000477 PARAMETER Experiment Name: Zm_5mM_SA_P Parameter: Organism Value: Zea mays
  misc_feature: MA Experiment 20000477 PARAMETER Experiment Name: Zm_5mM_SA_P Parameter: Plant Line Value: 35A19
  misc_feature: MA Experiment 20000477 PARAMETER Experiment Name: Zm_5mM_SA_P Parameter: Timepoint (hr) Value: 48
  misc_feature: MA Experiment 20000477 PARAMETER Experiment Name: Zm_5mM_SA_P Parameter: Tissue Value: Aerial
  misc_feature: MA Experiment 20000477 PARAMETER Experiment Name: Zm_5mM_SA_P Parameter: Treatment Value: 5mM SA vs. No Treatment
  misc_feature: MA Experiment ID: 20000478 Result: Down-regulated in Transcription
  misc_feature: MA Experiment 20000478 PARAMETER Experiment Name: Zm_5mM_SA_P Parameter: Age (day) Value: 11
  misc_feature: MA Experiment 20000478 PARAMETER Experiment Name: Zm_5mM_SA_P Parameter: Organism Value: Zea mays
  misc_feature: MA Experiment 20000478 PARAMETER Experiment Name: Zm_5mM_SA_P Parameter: Plant Line Value: 35A19
  misc_feature: MA Experiment 20000478 PARAMETER Experiment Name: Zm_5mM_SA_P Parameter: Timepoint (hr) Value: 72
  misc_feature: MA Experiment 20000478 PARAMETER Experiment Name: Zm_5mM_SA_P Parameter: Tissue Value: Aerial
  misc_feature: MA Experiment 20000478 PARAMETER Experiment Name: Zm_5mM_SA_P Parameter: Treatment Value: 5mM SA vs. No Treatment
  misc_feature: MA Experiment ID: 20000479 Result: Down-regulated in Transcription
  misc_feature: MA Experiment 20000479 PARAMETER Experiment Name: Zm_Drought_P Parameter: Age (day) Value: 10
  misc_feature: MA Experiment 20000479 PARAMETER Experiment Name: Zm_Drought_P Parameter: Organism Value: Zea mays
  misc_feature: MA Experiment 20000479 PARAMETER Experiment Name: Zm_Drought_P Parameter: Plant Line Value: 35A19
  misc_feature: MA Experiment 20000479 PARAMETER Experiment Name: Zm_Drought_P Parameter: Timepoint (hr) Value: 48
  misc_feature: MA Experiment 20000479 PARAMETER Experiment Name: Zm_Drought_P Parameter: Tissue Value: Aerial
  misc_feature: MA Experiment 20000479 PARAMETER Experiment Name: Zm_Drought_P Parameter: Treatment Value: Drought vs. No Drought
  misc_feature: MA Experiment ID: 20000480 Result: Down-regulated in Transcription
  misc_feature: MA Experiment 20000480 PARAMETER Experiment Name: Zm_Drought_P Parameter: Age (day) Value: 11
  misc_feature: MA Experiment 20000480 PARAMETER Experiment Name: Zm_Drought_P Parameter: Organism Value: Zea mays
  misc_feature: MA Experiment 20000480 PARAMETER Experiment Name: Zm_Drought_P Parameter: Plant Line Value: 35A19
  misc_feature: MA Experiment 20000480 PARAMETER Experiment Name: Zm_Drought_P Parameter: Timepoint (hr) Value: 72
  misc_feature: MA Experiment 20000480 PARAMETER Experiment Name: Zm_Drought_P Parameter: Tissue Value: Aerial
  misc_feature: MA Experiment 20000480 PARAMETER Experiment Name: Zm_Drought_P Parameter: Treatment Value: Drought vs. No Drought
  misc_feature: MA Experiment ID: 20000533 Result: Down-regulated in Transcription
  misc_feature: MA Experiment 20000533 PARAMETER Experiment Name: Zm_0.001percent_MeJA_P Parameter: Age (day) Value: 11
  misc_feature: MA Experiment 20000533 PARAMETER Experiment Name: Zm_0.001percent_MeJA_P Parameter: Organism Value: Zea mays
  misc_feature: MA Experiment 20000533 PARAMETER Experiment Name: Zm_0.001percent_MeJA_P Parameter: Plant Line Value: 35A19
  misc_feature: MA Experiment 20000533 PARAMETER Experiment Name: Zm_0.001percent_MeJA_P Parameter: Timepoint (hr) Value: 72
  misc_feature: MA Experiment 20000533 PARAMETER Experiment Name: Zm_0.001percent_MeJA_P Parameter: Tissue Value: Aerial
  misc_feature: MA Experiment 20000533 PARAMETER Experiment Name: Zm_0.001percent_MeJA_P Parameter: Treatment Value: 0.001percent MeJA vs. No Treatment
  misc_feature: MA Experiment ID: 20000534 Result: Down-regulated in Transcription
  misc_feature: MA Experiment 20000534 PARAMETER Experiment Name: Zm_Hybrid_Pollen_P Parameter: Age (day) Value: 8
  misc_feature: MA Experiment 20000534 PARAMETER Experiment Name: Zm_Hybrid_Pollen_P Parameter: Organism Value: Zea mays
  misc_feature: MA Experiment 20000534 PARAMETER Experiment Name: Zm_Hybrid_Pollen_P Parameter: Plant Line Value: 35A19
  misc_feature: MA Experiment 20000534 PARAMETER Experiment Name: Zm_Hybrid_Pollen_P Parameter: Tissue Value: Pollen vs. Aerial
acaaaacatatctatatatctgcaacgtcaaatcaacacaggctgttgtttgcttcttttggtaaaggctttagctgcggcagatccaccggcggcgccccgagaatcgaagatgccggtgaaggtgttcggatcgccgacgtcggcggaggtcgcccgcgtcctggcctgcctgttcgagaaggacgtcgagttccagctcatccgcgtcgactccttccgcggcaccaagcgcctgccccagtacctcaagctccagccgcacggcgaggcgctcaccttcgaggacggcaacgtcaccctcgtcggtacgtacgtacacacgcaagcgacgcgagagagccaactgaccaactgaaaacgtaatggatcatggatggatggatggatgcatgcagagtcgaggaagatcctgcgccacatcgccgacaagtacaagaaccaggggtacagggacctgttcggcccgggcgcgctggagcgggcctccatcgagcagtggctgcagacggaggcgcagagcttcgacgtccccagcgccgacatggtctacagcctcgcctacctgccgcccgacatgcagctcgacggcaggggcgtcggcggcctcccggcggcgacggggacgatgaacccggcgcaccggcagaaggtggaggagatgctgcagctgttcgagaagagccgcaggcagctgggcaagctgctggacatctacgagcagcgccttggcgaggaggccttcctggccggaggcaagttcacgctcgccgacctgtcccacctgcccaacgccgaccgcctcgccggcgacccgcggtccgcacgcctcatggagtcgcgcaggaacgtcagcaagtggtgggacaccgtatcccgccgcgactcttgggtcagggtcaaggagttgcagcgcccgccgtccgcggaggcgcccttctgatgtcgatcgatcgcaaattaaggcggtggcctttgctcaagcctacgtgttcggtttctgcataattttttaataaataaacgccactggcccctctacgtcattggcgattgttcattgtgtaataaatcgttcaagagcatatgatgcttcttgccgtgag

SEQ ID NO: 11480 - protein, 211 aa, Zea mays subsp. mays
  peptide (1)..(211): Ceres Seq. ID no. 12411812
  misc_feature (74)..(126): Pfam Name: Collagen triple helix repeat (20 copies) Pfam Description: Collagen triple helix repeat (20 copies)
  misc_feature (17)..(184): Homolog of NCBI NO: 11385473 NR Description: glutathione S-transferase GST 11 [Zea mays]
  misc_feature (33)..(169): Homolog of NCBI NO: 11385473 NR Description: glutathione S-transferase GST 11 [Zea mays]
MDGWMDACRVEEDPAPHRRQVQEPGVQGPVRPGRAGAGLHRAVAADGGAELRRPQRRHGLQPRLPAARHAARRQGRRRPPGGDGDDEPGAPAEGGGDAAAVREEPQAAGQAAGHLRAAPWRGGLPGRRQVHARRPVPPAQRRPPRRRPAVRTPHGVAQERQQVVGHRIPPRLLGQGQGVAAPAVRGGALLMSIDRKLRRWPLLKPTCSVSA

SEQ ID NO: 11481 - protein, 207 aa, Zea mays subsp. mays
  peptide (1)..(207): Ceres Seq. ID no. 12411813
  misc_feature (70)..(122): Pfam Name: Collagen triple helix repeat (20 copies) Pfam Description: Collagen triple helix repeat (20 copies)
  misc_feature (13)..(180): Homolog of NCBI NO: 11385473 NR Description: glutathione S-transferase GST 11 [Zea mays]
  misc_feature (29)..(165): Homolog of NCBI NO: 11385473 NR Description: glutathione S-transferase GST 11 [Zea mays]
MDACRVEEDPAPHRRQVQEPGVQGPVRPGRAGAGLHRAVAADGGAELRRPQRRHGLQPRLPAARHAARRQGRRRPPGGDGDDEPGAPAEGGGDAAAVREEPQAAGQAAGHLRAAPWRGGLPGRRQVHARRPVPPAQRRPPRRRPAVRTPHGVAQERQQVVGHRIPPRLLGQGQGVAAPAVRGGALLMSIDRKLRRWPLLKPTCSVSA

SEQ ID NO: 11482 - protein, 188 aa, Zea mays subsp. mays
  peptide (1)..(188): Ceres Seq. ID no. 12411814
  misc_feature (8)..(188): Homolog of NCBI NO: 11385479 NR Description: glutathione S-transferase GST 14 [Zea mays]
  misc_feature (77)..(184): Homolog of NCBI NO: 22758271 NR Description: Putative glutathione S-transferase [Oryza sativa
  misc_feature (7)..(76): Homolog of NCBI NO: 22758271 NR Description: Putative glutathione S-transferase [Oryza sativa
  misc_feature (1)..(188): Homolog of NCBI NO: 37536564 NR Description: putative glutathione S-transferase [Oryza sativa
  misc_feature (8)..(102): Homolog of NCBI NO: 11385469 NR Description: glutathione S-transferase GST 9 [Zea mays]
  misc_feature (106)..(184): Homolog of NCBI NO: 11385469 NR Description: glutathione S-transferase GST 9 [Zea mays]
  misc_feature (102)..(184): Homolog of NCBI NO: 11385475 NR Description: glutathione S-transferase GST 12 [Zea mays]
  misc_feature (102)..(184): Homolog of NCBI NO: 11385477 NR Description: glutathione S-transferase GST 13 [Zea mays]
  misc_feature (8)..(65): Homolog of NCBI NO: 11385475 NR Description: glutathione S-transferase GST 12 [Zea mays]
  misc_feature (8)..(65): Homolog of NCBI NO: 11385477 NR Description: glutathione S-transferase GST 13 [Zea mays]
MDGWMHAESRKILRHIADKYKNQGYRDLFGPGALERASIEQWLQTEAQSFDVPSADMVYSLAYLPPDMQLDGRGVGGLPAATGTMNPAHRQKVEEMLQLFEKSRRQLGKLLDIYEQRLGEEAFLAGGKFTLADLSHLPNADRLAGDPRSARLMESRRNVSKWWDTVSRRDSWVRVKELQRPPSAEAPF

SEQ ID NO: 11483 - DNA, 786 bp, Zea mays subsp. mays
  misc_feature (1)..(786): Ceres Seq. ID no. 12337520
  misc_feature: MA Experiment ID: 20000108 Result: Up-regulated in Transcription
  misc_feature: MA Experiment 20000108 PARAMETER Experiment Name: Zm_Root-Tips_P Parameter: Age (day) Value: 12
  misc_feature: MA Experiment 20000108 PARAMETER Experiment Name: Zm_Root-Tips_P Parameter: Organism Value: Zea mays
  misc_feature: MA Experiment 20000108 PARAMETER Experiment Name: Zm_Root-Tips_P Parameter: Tissue Value: Root tips vs. Root mid region    35
  misc_feature: MA Experiment 20000108 PARAMETER Experiment Name: Zm_Root-Tips_P Parameter: Tissue Value: Root tips vs. Root mid region   Sequence Listing-Misc Features (4)
agagattcagcggacgttgatggagctccttaaccaattagatggatttgatgagctaggaaaggtaaaaatgatcatggccacaaatcgacctgatgttctggacccggcgctcctgcgtcctggacgtttagataggaagattgaaattccgctacccaacgagcaatcaagaatggaagttctaaaaatccatgcagccggtatcgccaagcatggggagattgattatgaagcagtcgtgaaactagctgaaggtttcaatggggctgatcttcggaacgtgtgcaccgaagctggcatggctgcaattcgtgcagagagagattacgtagtccacgaagacttcatgaaggctgtgaggaagctaaatgatgcaaaanagctggaatcgagtgcgcattacagtgcagattttggcaaagagtaatgatgctaatgccgatgcaacggacaaatgcatttggcatgtatcatcaggcgagcccagtcagatgcgatgcaaaagcgagaaaggaaccagctatttatgttcaggctacaggcagcttctcttttattccttctttctcgtattcacaattttagtgaggaggattgtcgagctgaccggtgggagaaaccagtcgagaatttagtagctttgcaccagatgccatttgcttctgtaaatcacacattatctgcttccgtgtgtagaatggtaataacttgtcccagctccatgtacttaagacagagtgctcgacttgagaggtaaaaacagagaaaagaacaatttggttc

SEQ ID NO: 11484 - protein, 142 aa, Zea mays subsp. mays
  peptide (1)..(142): Ceres Seq. ID no. 12337521
  misc_feature (1)..(105): Pfam Name: ATPase family associated with various cellular Pfam Description: ATPase family associated with various cellular
  misc_feature (1)..(142): Homolog of NCBI NO: 17298147 NR Description: 26S proteasome regulatory particle triple-A
  misc_feature (1)..(142): Homolog of NCBI NO: 11094192 NR Description: 26S proteasome regulatory particle triple-A
  misc_feature (1)..(142): Homolog of NCBI NO: 24745880 NR Description: 26S proteasome AAA-ATPase subunit RPT4a [Solanum
  misc_feature (1)..(142): Homolog of NCBI NO: 15239140 NR Description: 26S proteasome AAA-ATPase subunit RPT4a; protein At5g43010.1, supported by cDNA: gi_13937182, supported by cDNA: supported by cDNA: gi_6652883 [Arabidopsis thaliana]
  misc_feature (1)..(142): Homolog of NCBI NO: 15219503 NR Description: 26S proteasome regulatory particle triple-A subunit4, putative; protein id: At1g45000.1, supported by cDNA:
  misc_feature (1)..(135): Homolog of NCBI NO: 24640100 NR Description: CG3455-PA [Drosophila melanogaster]
  misc_feature (1)..(135): Homolog of NCBI NO: 31242591 NR Description: ENSANGP00000017473 [Anopheles gambiae]
  misc_feature (1)..(135): Homolog of NCBI NO: 6434958 NR Description: 26S proteasome regulatory complex subunit p42D
  misc_feature (1)..(135): Homolog of NCBI NO: 17945503 NR Description: RE23388p [Drosophila melanogaster]
  misc_feature (1)..(135): Homolog of NCBI NO: 2960216 NR Description: 26S proteasome regulatory ATPase subunit 10b
  misc_feature (128)..(128): Xaa is any aa, unknown or other
EIQRTLMELLNQLDGFDELGKVKMIMATNRPDVLDPALLRPGRLDRKIEIPLPNEQSRMEVLKIHAAGIAKHGEIDYEAVVKLAEGFNGADLRNVCTEAGMAAIRAERDYVVHEDFMKAVRKLNDAKXLESSAHYSADFGKE

SEQ ID NO: 11485 - protein, 136 aa, Zea mays subsp. mays
  peptide (1)..(136): Ceres Seq. ID no. 12337522
  misc_feature (1)..(99): Pfam Name: ATPase family associated with various cellular Pfam Description: ATPase family associated with various cellular
  misc_feature (1)..(136): Homolog of NCBI NO: 17298147 NR Description: 26S proteasome regulatory particle triple-A
  misc_feature (1)..(136): Homolog of NCBI NO: 11094192 NR Description: 26S proteasome regulatory particle triple-A
  misc_feature (1)..(136): Homolog of NCBI NO: 24745880 NR Description: 26S proteasome AAA-ATPase subunit RPT4a [Solanum
  misc_feature (1)..(136): Homolog of NCBI NO: 15239140 NR Description: 26S proteasome AAA-ATPase subunit RPT4a; protein At5g43010.1, supported by cDNA: gi_13937182, supported by cDNA: supported by cDNA: gi_6652883 [Arabidopsis thaliana]
  misc_feature (1)..(136): Homolog of NCBI NO: 15219503 NR Description: 26S proteasome regulatory particle triple-A subunit4, putative; protein id: At1g45000.1, supported by cDNA:
  misc_feature (1)..(129): Homolog of NCBI NO: 24640100 NR Description: CG3455-PA [Drosophila melanogaster]
  misc_feature (1)..(129): Homolog of NCBI NO: 31242591 NR Description: ENSANGP00000017473 [Anopheles gambiae]
  misc_feature (1)..(129): Homolog of NCBI NO: 6434958 NR Description: 26S proteasome regulatory complex subunit p42D
  misc_feature (1)..(129): Homolog of NCBI NO: 17945503 NR Description: RE23388p [Drosophila melanogaster]
  misc_feature (1)..(129): Homolog of NCBI NO: 2960216 NR Description: 26S proteasome regulatory ATPase subunit 10b
  misc_feature (122)..(122): Xaa is any aa, unknown or other
MELLNQLDGFDELGKVKMIMATNRPDVLDPALLRPGRLDRKIEIPLPNEQSRMEVLKIHAAGIAKHGEIDYEAVVKLAEGFNGADLRNVCTEAGMAAIRAERDYVVHEDFMKAVRKLNDAKXLESSAHYSADFGKE

SEQ ID NO: 11486 - protein, 119 aa, Zea mays subsp. mays
  peptide (1)..(119): Ceres Seq. ID no. 12337523
  misc_feature (1)..(82): Pfam Name: ATPase family associated with various cellular Pfam Description: ATPase family associated with various cellular
  misc_feature (1)..(119): Homolog of NCBI NO: 17298147 NR Description: 26S proteasome regulatory particle triple-A
  misc_feature (1)..(119): Homolog of NCBI NO: 11094192 NR Description: 26S proteasome regulatory particle triple-A
  misc_feature (1)..(119): Homolog of NCBI NO: 24745880 NR Description: 26S proteasome AAA-ATPase subunit RPT4a [Solanum
  misc_feature (1)..(119): Homolog of NCBI NO: 15239140 NR Description: 26S proteasome AAA-ATPase subunit RPT4a; protein At5g43010.1, supported by cDNA: gi_13937182, supported by cDNA: supported by cDNA: gi_6652883 [Arabidopsis thaliana]
  misc_feature (1)..(119): Homolog of NCBI NO: 15219503 NR Description: 26S proteasome regulatory particle triple-A subunit4, putative; protein id: At1g45000.1, supported by cDNA:
  misc_feature (1)..(112): Homolog of NCBI NO: 24640100 NR Description: CG3455-PA [Drosophila melanogaster]
  misc_feature (1)..(112): Homolog of NCBI NO: 31242591 NR Description: ENSANGP00000017473 [Anopheles gambiae]
  misc_feature (1)..(112): Homolog of NCBI NO: 6434958 NR Description: 26S proteasome regulatory complex subunit p42D
  misc_feature (1)..(112): Homolog of NCBI NO: 17945503 NR Description: RE23388p [Drosophila melanogaster]
  misc_feature (1)..(112): Homolog of NCBI NO: 2960216 NR Description: 26S proteasome regulatory ATPase subunit 10b
  misc_feature (105)..(105): Xaa is any aa, unknown or other
MIMATNRPDVLDPALLRPGRLDRKIEIPLPNEQSRMEVLKIHAAGIAKHGEIDYEAVVKLAEGFNGADLRNVCTEAGMAAIRAERDYVVHEDFMKAVRKLNDAKXLESSAHYSADFGKE

SEQ ID NO: 11487 - DNA, 656 bp, Zea mays subsp. mays
  misc_feature (1)..(656): Ceres Seq. ID no. 12404694
  misc_feature: MA Experiment ID: 108504 Result: Up-regulated in Transcription
  misc_feature: MA Experiment 108504 PARAMETER Experiment Name: Zm_Drought_P Parameter: Age (day) Value: 8
  misc_feature: MA Experiment 108504 PARAMETER Experiment Name: Zm_Drought_P Parameter: Organism Value: Zea mays
  misc_feature: MA Experiment 108504 PARAMETER Experiment Name: Zm_Drought_P Parameter: Plant Line Value: 35A19
  misc_feature: MA Experiment 108504 PARAMETER Experiment Name: Zm_Drought_P Parameter: Timepoint (hr) Value: 12
  misc_feature: MA Experiment 108504 PARAMETER Experiment Name: Zm_Drought_P Parameter: Tissue Value: Aerial
  misc_feature: MA Experiment 108504 PARAMETER Experiment Name: Zm_Drought_P Parameter: Treatment Value: Drought vs. No Drought
  misc_feature: MA Experiment ID: 108529 Result: Down-regulated in Transcription
  misc_feature: MA Experiment 108529 PARAMETER Experiment Name: Zm_Imbibed_Seeds_P Parameter: Age (day) Value: 5 vs. 2
  misc_feature: MA Experiment 108529 PARAMETER Experiment Name: Zm_Imbibed_Seeds_P Parameter: Organism Value: Zea mays
  misc_feature: MA Experiment 108529 PARAMETER Experiment Name: Zm_Imbibed_Seeds_P Parameter: Plant Line Value: 35A19
  misc_feature: MA Experiment 108529 PARAMETER Experiment Name: Zm_Imbibed_Seeds_P Parameter: Tissue Value: Roots vs. Embryo
  misc_feature: MA Experiment ID: 108534 Result: Up-regulated in Transcription
  misc_feature: MA Experiment 108534 PARAMETER Experiment Name: Zm_4deg_Cold_P Parameter: Age (hr) Value: 8
  misc_feature: MA Experiment 108534 PARAMETER Experiment Name: Zm_4deg_Cold_P Parameter: Organism Value: Zea mays
  misc_feature: MA Experiment 108534 PARAMETER Experiment Name: Zm_4deg_Cold_P Parameter: Plant Line Value: 35A19
  misc_feature: MA Experiment 108534 PARAMETER Experiment Name: Zm_4deg_Cold_P Parameter: Temperature (deg C) Value: 4 vs. 22
  misc_feature: MA Experiment 108534 PARAMETER Experiment Name: Zm_4deg_Cold_P Parameter: Timepoint (hr) Value: 6
  misc_feature: MA Experiment 108534 PARAMETER Experiment Name: Zm_4deg_Cold_P Parameter: Tissue Value: Aerial
  misc_feature: MA Experiment ID: 108543 Result: Up-regulated in Transcription
  misc_feature: MA Experiment ID: 108546 Result: Down-regulated in Transcription
  misc_feature: MA Experiment 108546 PARAMETER Experiment Name: Zm_Imbibed_Seeds_P Parameter: Age (day) Value: 3 vs. 2
  misc_feature: MA Experiment 108546 PARAMETER Experiment Name: Zm_Imbibed_Seeds_P Parameter: Organism Value: Zea mays
  misc_feature: MA Experiment 108546 PARAMETER Experiment Name: Zm_Imbibed_Seeds_P Parameter: Plant Line Value: 35A19
  misc_feature: MA Experiment 108546 PARAMETER Experiment Name: Zm_Imbibed_Seeds_P Parameter: Tissue Value: Roots vs. Embryo
  misc_feature: MA Experiment ID: 20000633 Result: Up-regulated in Transcription
  misc_feature: MA Experiment 20000633 PARAMETER Experiment Name: Zm_Herbicide-Treatments_P Parameter: Timepoint (hr) Value: 4
  misc_feature: MA Experiment 20000633 PARAMETER Experiment Name: Zm_Herbicide-Treatments_P Parameter: Tissue Value: Aerial
  misc_feature: MA Experiment 20000633 PARAMETER Experiment Name: Zm_Herbicide-Treatments_P Parameter: Treatment Value: Trimec vs. No Treatment
atcaccaatctcaactcagcgagctctccaccagttttacagccaagaaagaaccaaccatgatcagcaccaagaggatcgctcagctggccaagaagtggcagaggatggaagcgctcgggaggaagcgccgcctcgcctgggggacggcggcggcggcaaagaaagccgacaggtgctgcgcctccgtggcgagcaagggccactgcgcggtgtacacgactgacggggcacggttcgaggtgccattggcgtgcctcgggacggaagtcttcgccgagctcctgcacatgtccagagaggagttcggcttcgcgggcggccacggcaggatcttgctgccctgcgacgccatggtcatggagtacgccctgtgcttgctgcggaggggcgcctctgcggacctggagaaggcgttcctcagcaccatggcgatgtcgtgccactctgcagaccacgcggcggcgccatatgtggcggcttgctgttagtttgcagctgtataagtagtggcagagagttcatcactgtatatagtaggacaaagagaggtgttgttcagatcctgcgacccattaaggaaggtagcgattagcaagttagcgccagtgctcttgtttgagcagtgagcatattacagcttaatttcacgcccg

SEQ ID NO: 11488 - protein, 162 aa, Zea mays subsp. mays
  peptide (1)..(162): Ceres Seq. ID no. 12404695
  misc_feature (20)..(128): Pfam Name: Auxin responsive protein Pfam Description: Auxin responsive protein
  misc_feature (20)..(149): Homolog of NCBI NO: 21592571 NR Description: auxin-induced protein, putative [Arabidopsis
  misc_feature (20)..(149): Homolog of NCBI NO: 20149052 NR Description: auxin-induced SAUR-like protein [Capsicum annuum]
  misc_feature (20)..(149): Homolog of NCBI NO: 18397101 NR Description: auxin-induced protein, putative; protein id:
  misc_feature (20)..(144): Homolog of NCBI NO: 21553494 NR Description: auxin-induced protein, putative [Arabidopsis
  misc_feature (20)..(144): Homolog of NCBI NO: 18397103 NR Description: auxin-induced protein, putative; protein id:
  misc_feature (29)..(149): Homolog of NCBI NO: 25403067 NR Description: probable auxin-induced protein, 48806-48408
  misc_feature (20)..(144): Homolog of NCBI NO: 38603942 NR Description: At1g29420 [Arabidopsis thaliana]
  misc_feature (20)..(144): Homolog of NCBI NO: 15218951 NR Description: auxin-induced protein, putative; protein id: supported by cDNA: gi_18700092, supported by cDNA: gi_20453356
  misc_feature (20)..(155): Homolog of NCBI NO: 26452075 NR Description: putative auxin-induced protein [Arabidopsis
  misc_feature (20)..(155): Homolog of NCBI NO: 15218924 NR Description: auxin-induced protein, putative; protein id: supported by cDNA: 4119. [Arabidopsis thaliana]
HQSQLSELSTSFTAKKEPTMISTKRIAQLAKKWQRMEALGRKRRLAWGTAAAAKKADRCCASVASKGHCAVYTTDGARFEVPLACLGTEVFAELLHMSREEFGFAGGHGRILLPCDAMVMEYALCLLRRGASADLEKAFLSTMAMSCHSADHAAAPYVAACC

SEQ ID NO: 11489 - protein, 143 aa, Zea mays subsp. mays
  peptide (1)..(143): Ceres Seq. ID no. 12404696
  misc_feature (1)..(109): Pfam Name: Auxin responsive protein Pfam Description: Auxin responsive protein
  misc_feature (1)..(130): Homolog of NCBI NO: 18397101 NR Description: auxin-induced protein, putative; protein id:
  misc_feature (1)..(125): Homolog of NCBI NO: 21553494 NR Description: auxin-induced protein, putative [Arabidopsis
  misc_feature (1)..(125): Homolog of NCBI NO: 18397103 NR Description: auxin-induced protein, putative; protein id:
  misc_feature (10)..(130): Homolog of NCBI NO: 25403067 NR Description: probable auxin-induced protein, 48806-48408
  misc_feature (1)..(130): Homolog of NCBI NO: 21592571 NR Description: auxin-induced protein, putative [Arabidopsis
  misc_feature (1)..(130): Homolog of NCBI NO: 20149052 NR Description: auxin-induced SAUR-like protein [Capsicum annuum]
  misc_feature (1)..(125): Homolog of NCBI NO: 38603942 NR Description: At1g29420 [Arabidopsis thaliana]
  misc_feature (1)..(125): Homolog of NCBI NO: 15218951 NR Description: auxin-induced protein, putative; protein id: supported by cDNA: gi_18700092, supported by cDNA: gi_20453356
  misc_feature (1)..(136): Homolog of NCBI NO: 26452075 NR Description: putative auxin-induced protein [Arabidopsis
  misc_feature (1)..(136): Homolog of NCBI NO: 15218924 NR Description: auxin-induced protein, putative; protein id: supported by cDNA: 4119. [Arabidopsis thaliana]
MISTKRIAQLAKKWQRMEALGRKRRLAWGTAAAAKKADRCCASVASKGHCAVYTTDGARFEVPLACLGTEVFAELLHMSREEFGFAGGHGRILLPCDAMVMEYALCLLRRGASADLEKAFLSTMAMSCHSADHAAAPYVAACC

SEQ ID NO: 11490 - protein, 127 aa, Zea mays subsp. mays
  peptide (1)..(127): Ceres Seq. ID no. 12404697
  misc_feature (1)..(93): Pfam Name: Auxin responsive protein Pfam Description: Auxin responsive protein
  misc_feature (1)..(114): Homolog of NCBI NO: 21592571 NR Description: auxin-induced protein, putative [Arabidopsis
  misc_feature (1)..(114): Homolog of NCBI NO: 20149052 NR Description: auxin-induced SAUR-like protein [Capsicum annuum]
  misc_feature (1)..(114): Homolog of NCBI NO: 18397101 NR Description: auxin-induced protein, putative; protein id:
  misc_feature (1)..(109): Homolog of NCBI NO: 21553494 NR Description: auxin-induced protein, putative [Arabidopsis
  misc_feature (1)..(109): Homolog of NCBI NO: 18397103 NR Description: auxin-induced protein, putative; protein id:
  misc_feature (1)..(114): Homolog of NCBI NO: 25403067 NR Description: probable auxin-induced protein, 48806-48408
  misc_feature (1)..(109): Homolog of NCBI NO: 38603942 NR Description: At1g29420 [Arabidopsis thaliana]
  misc_feature (1)..(109): Homolog of NCBI NO: 15218951 NR Description: auxin-induced protein, putative; protein id: supported by cDNA: gi_18700092, supported by cDNA: gi_20453356
  misc_feature (1)..(120): Homolog of NCBI NO: 26452075 NR Description: putative auxin-induced protein [Arabidopsis
  misc_feature (1)..(120): Homolog of NCBI NO: 15218924 NR Description: auxin-induced protein, putative; protein id: supported by cDNA: 4119. [Arabidopsis thaliana]
MEALGRKRRLAWGTAAAAKKADRCCASVASKGHCAVYTTDGARFEVPLACLGTEVFAELLHMSREEFGFAGGHGRILLPCDAMVMEYALCLLRRGASADLEKAFLSTMAMSCHSADHAAAPYVAACC

SEQ ID NO: 11491 - DNA, 1493 bp, Zea mays subsp. mays
  misc_feature (1)..(1493): Ceres Seq. ID no. 12369010
  misc_feature: MA Experiment ID: 108523 Result: Down-regulated in Transcription
  misc_feature: MA Experiment 108523 PARAMETER Experiment Name: Zm_42deg_Heat_P Parameter: Age (day) Value: 8
  misc_feature: MA Experiment 108523 PARAMETER Experiment Name: Zm_42deg_Heat_P Parameter: Organism Value: Zea mays
  misc_feature: MA Experiment 108523 PARAMETER Experiment Name: Zm_42deg_Heat_P Parameter: Plant Line Value: 35A19
  misc_feature: MA Experiment 108523 PARAMETER Experiment Name: Zm_42deg_Heat_P Parameter: Temperature (deg C) Value: 42 vs. 22
  misc_feature: MA Experiment 108523 PARAMETER Experiment Name: Zm_42deg_Heat_P Parameter: Timepoint (hr) Value: 6
  misc_feature: MA Experiment 108523 PARAMETER Experiment Name: Zm_42deg_Heat_P Parameter: Tissue Value: Aerial
  misc_feature: MA Experiment ID: 108527 Result: Down-regulated in Transcription
  misc_feature: MA Experiment 108527 PARAMETER Experiment Name: Zm_5mM_NO_P Parameter: Age (day) Value: 8
  misc_feature: MA Experiment 108527 PARAMETER Experiment Name: Zm_5mM_NO_P Parameter: Organism Value: Zea mays
  misc_feature: MA Experiment 108527 PARAMETER Experiment Name: Zm_5mM_NO_P Parameter: Plant Line Value: 35A19
  misc_feature: MA Experiment 108527 PARAMETER Experiment Name: Zm_5mM_NO_P Parameter: Timepoint (hr) Value: 6
  misc_feature: MA Experiment 108527 PARAMETER Experiment Name: Zm_5mM_NO_P Parameter: Tissue Value: Aerial
  misc_feature: MA Experiment 108527 PARAMETER Experiment Name: Zm_5mM_NO_P Parameter: Treatment Value: 5mM NO vs. No Treatment
  misc_feature: MA Experiment ID: 108528 Result: Down-regulated in Transcription
  misc_feature: MA Experiment 108528 PARAMETER Experiment Name: Zm_Imbibed_Seeds_P Parameter: Age (day) Value: 5 vs. 2
  misc_feature: MA Experiment 108528 PARAMETER Experiment Name: Zm_Imbibed_Seeds_P Parameter: Organism Value: Zea mays
  misc_feature: MA Experiment 108528 PARAMETER Experiment Name: Zm_Imbibed_Seeds_P Parameter: Plant Line Value: 35A19
  misc_feature: MA Experiment 108528 PARAMETER Experiment Name: Zm_Imbibed_Seeds_P Parameter: Tissue Value: Aerial vs. Embryo
  misc_feature: MA Experiment ID: 108530 Result: Down-regulated in Transcription
  misc_feature: MA Experiment 108530 PARAMETER Experiment Name: Zm_Imbibed_Seeds_P Parameter: Age (day) Value: 6 vs. 2
  misc_feature: MA Experiment 108530 PARAMETER Experiment Name: Zm_Imbibed_Seeds_P Parameter: Organism Value: Zea mays
  misc_feature: MA Experiment 108530 PARAMETER Experiment Name: Zm_Imbibed_Seeds_P Parameter: Plant Line Value: 35A19
  misc_feature: MA Experiment 108530 PARAMETER Experiment Name: Zm_Imbibed_Seeds_P Parameter: Tissue Value: Aerial vs. Embryo
  misc_feature: MA Experiment ID: 108543 Result: Up-regulated in Transcription
  misc_feature: MA Experiment ID: 108544 Result: Up-regulated in Transcription
  misc_feature: MA Experiment ID: 108547 Result: Down-regulated in Transcription
  misc_feature: MA Experiment 108547 PARAMETER Experiment Name: Zm_Imbibed_Seeds_P Parameter: Age (day) Value: 4 vs. 2
  misc_feature: MA Experiment 108547 PARAMETER Experiment Name: Zm_Imbibed_Seeds_P Parameter: Organism Value: Zea mays
  misc_feature: MA Experiment 108547 PARAMETER Experiment Name: Zm_Imbibed_Seeds_P Parameter: Plant Line Value: 35A19
  misc_feature: MA Experiment 108547 PARAMETER Experiment Name: Zm_Imbibed_Seeds_P Parameter: Tissue Value: Aerial vs. Embryo
  misc_feature: MA Experiment ID: 108559 Result: Down-regulated in Transcription
  misc_feature: MA Experiment 108559 PARAMETER Experiment Name: Zm_5mM_NO_P Parameter: Age (day) Value: 8
  misc_feature: MA Experiment 108559 PARAMETER Experiment Name: Zm_5mM_NO_P Parameter: Organism Value: Zea mays
  misc_feature: MA Experiment 108559 PARAMETER Experiment Name: Zm_5mM_NO_P Parameter: Plant Line Value: 35A19
  misc_feature: MA Experiment 108559 PARAMETER Experiment Name: Zm_5mM_NO_P Parameter: Timepoint (hr) Value: 12
  misc_feature: MA Experiment 108559 PARAMETER Experiment Name: Zm_5mM_NO_P Parameter: Tissue Value: Aerial
  misc_feature: MA Experiment 108559 PARAMETER Experiment Name: Zm_5mM_NO_P Parameter: Treatment Value: 5mM NO vs. No Treatment
gagatggtctaacgtgatgtcatagggtgattgtcttctgttctgtctggcagttttttttttttgagaatccgatgcgatcaaggctagaattgtttatcgctcgcgggcgggaagtgtggtgacgcgtctcgatccgcgcaccgcttgggcttctcgtaggagtagtggagtactgctcagcctgtcaccgtcagcgtatgttcttgttccagttcctatttttactccaagtccactagggatcctatccagattcgtggggacactctcttcgagttccaggcttccaaggtccaagggccgtagcatttgtctggttggattgggttgttccgcttgggtagccgggtgggatcggaatctgtgtggcacccatggcggcggtcgaggggacgaagaagaaggtaatcatcgacaccgaccccggaattgatgacgcgatggccatcttcttggcgctgcggtcgccggagctggaggtgctgggcctcaccactaccttcggcaacgtccacaccgccctcgccacgcgcaacgcgctccacctgctggaggctgttggcaggactgacatccccgtggcagagggatcccatctaacgatcaagaaagccaccaaattgaggatcgcaagcttcgtccacggttcagacggcctgggaaatcaggacttccctccaccagctaccaagcctgtaaatcagtctgctgctgccttcctggttgagcaggcaaatctgtaccctggtcaagttaccgttgtcgccctcggcccacttaccaaccttgctctggcagtcgagcttgatcctgcgttcccggagaagatagggcagattattattcttggcggtgcgtattcagttaatggaaacgtgaaccctgcagctgaggcgaacatcttcggggatcctgacgcggcagatatcgtgttcacctgcggtgctgatattttggccgtgggactaaatgtaacccaccaagtcgttctaaccgatgctgaccgggagaagcttgagcagtgtgacagcaaatacgcccgctacttgtgcaagctaatgggcgtttattttgattaccacagggacgcctacttcataaaaggagcgtatcttcacgatccaacgacggttattgctgcggtgaacccatcgctgctgacttacacagaaggcgttgtgagggtacagacggtcgggatcaccaagggccttactgttttcgacaacaccaagaaaaggtacggagagatcacggcctggagtggcatgcccaccgtgaaggtcgctgtcaccgtcgatgcccctgccgtggtagagctgatagtgcagaggctgatgaccgatgactagcaacaacgccaccagctgatccggttgggatcatcatgtggttatgtgcgtgcttggtgtttacgtacagtttatatatgcttgacacgtttgctgatgcttctgagagaacgtgattaaattaaattaaacttgatt

SEQ ID NO: 11492 - protein, 325 aa, Zea mays subsp. mays
  peptide (1)..(325): Ceres Seq. ID no. 12369011
  misc_feature (8)..(318): Pfam Name: Inosine-uridine preferring nucleoside hydrolase Pfam Description: Inosine-uridine preferring nucleoside hydrolase
  misc_feature (7)..(325): Homolog of NCBI NO: 30089728 NR Description: putative inosine-uridine preferring nucleoside
  misc_feature (6)..(322): Homolog of NCBI NO: 18390550 NR Description: expressed protein; protein id: At1g05620.1, by cDNA: 39571. [Arabidopsis thaliana] unknown [Arabidopsis thaliana] >gi|25083300|gb|AAN72060.1|
  misc_feature (6)..(208): Homolog of NCBI NO: 25321071 NR Description: hypothetical protein [imported] - Arabidopsis >gi|4836912|gb|AAD30614.1|AC007153_6 Hypothetical protein
  misc_feature (206)..(322): Homolog of NCBI NO: 25321071 NR Description: hypothetical protein [imported] - Arabidopsis >gi|4836912|gb|AAD30614.1|AC007153_6 Hypothetical protein
  misc_feature (4)..(322): Homolog of NCBI NO: 18404099 NR Description: expressed protein; protein id: At2g36310.1, by cDNA: 2576., supported by cDNA: gi_15809829, supported by gi_17978870 [Arabidopsis thaliana] >gi|15809830|gb|AAL06843.1|
  misc_feature (23)..(268): Homolog of NCBI NO: 25321061 NR Description: hypothetical protein At2g36310 [imported] -
  misc_feature (242)..(297): Homolog of NCBI NO: 25321061 NR Description: hypothetical protein At2g36310 [imported] -
  misc_feature (5)..(317): Homolog of NCBI NO: 15888904 NR Description: AGR_C_2923p [Agrobacterium tumefaciens]
  misc_feature (5)..(317): Homolog of NCBI NO: 17935486 NR Description: inosine-uridine preferring nucleoside hydrolase
  misc_feature (10)..(317): Homolog of NCBI NO: 15966659 NR Description: PUTATIVE NUCLEOSIDE HYDROLASE PROTEIN meliloti] >gi|15075931|emb|CAC47485.1| PUTATIVE NUCLEOSIDE
MAAVEGTKKKVIIDTDPGIDDAMAIFLALRSPELEVLGLTTTFGNVHTALATRNALHLLEAVGRTDIPVAEGSHLTIKKATKLRIASFVHGSDGLGNQDFPPPATKPVNQSAAAFLVEQANLYPGQVTVVALGPLTNLALAVELDPAFPEKIGQIIILGGAYSVNGNVNPAAEANIFGDPDAADIVFTCGADILAVGLNVTHQVVLTDADREKLEQCDSKYARYLCKLMGVYFDYHRDAYFIKGAYLHDPTTVIAAVNPSLLTYTEGVVRVQTVGITKGLTVFDNTKKRYGEITAWSGMPTVKVAVTVDAPAVVELIVQRLMTDD

SEQ ID NO: 11493 - protein, 303 aa, Zea mays subsp. mays
  peptide (1)..(303): Ceres Seq. ID no. 12369012
  misc_feature (1)..(296): Pfam Name: Inosine-uridine preferring nucleoside hydrolase Pfam Description: Inosine-uridine preferring nucleoside hydrolase
  misc_feature (1)..(303): Homolog of NCBI NO: 30089728 NR Description: putative inosine-uridine preferring nucleoside
  misc_feature (1)..(300): Homolog of NCBI NO: 18390550 NR Description: expressed protein; protein id: At1g05620.1, by cDNA: 39571. [Arabidopsis thaliana] unknown [Arabidopsis thaliana] >gi|25083300|gb|AAN72060.1|
  misc_feature (1)..(186): Homolog of NCBI NO: 25321071 NR Description: hypothetical protein [imported] - Arabidopsis >gi|4836912|gb|AAD30614.1|AC007153_6 Hypothetical protein
  misc_feature (184)..(300): Homolog of NCBI NO: 25321071 NR Description: hypothetical protein [imported] - Arabidopsis >gi|4836912|gb|AAD30614.1|AC007153_6 Hypothetical protein
  misc_feature (1)..(300): Homolog of NCBI NO: 18404099 NR Description: expressed protein; protein id: At2g36310.1, by cDNA: 2576., supported by cDNA: gi_15809829, supported by gi_17978870 [Arabidopsis thaliana] >gi|15809830|gb|AAL06843.1|
  misc_feature (1)..(246): Homolog of NCBI NO: 25321061 NR Description: hypothetical protein At2g36310 [imported] -
  misc_feature (220)..(275): Homolog of NCBI NO: 25321061 NR Description: hypothetical protein At2g36310 [imported] -
  misc_feature (1)..(295): Homolog of NCBI NO: 15888904 NR Description: AGR_C_2923p [Agrobacterium tumefaciens]
  misc_feature (1)..(295): Homolog of NCBI NO: 17935486 NR Description: inosine-uridine preferring nucleoside hydrolase
  misc_feature (1)..(295): Homolog of NCBI NO: 15966659 NR Description: PUTATIVE NUCLEOSIDE HYDROLASE PROTEIN meliloti] >gi|15075931|emb|CAC47485.1| PUTATIVE NUCLEOSIDE
MAIFLALRSPELEVLGLTTTFGNVHTALATRNALHLLEAVGRTDIPVAEGSHLTIKKATKLRIASFVHGSDGLGNQDFPPPATKPVNQSAAAFLVEQANLYPGQVTVVALGPLTNLALAVELDPAFPEKIGQIIILGGAYSVNGNVNPAAEANIFGDPDAADIVFTCGADILAVGLNVTHQVVLTDADREKLEQCDSKYARYLCKLMGVYFDYHRDAYFIKGAYLHDPTTVIAAVNPSLLTYTEGVVRVQTVGITKGLTVFDNTKKRYGEITAWSGMPTVKVAVTVDAPAVVELIVQRLMTDD

SEQ ID NO: 11494 - DNA, 1265 bp, Zea mays subsp. mays
  misc_feature (1)..(1265): Ceres Seq. ID no. 12374386
  misc_feature: MA Experiment ID: 108535 Result: Up-regulated in Transcription
  misc_feature: MA Experiment 108535 PARAMETER Experiment Name: Zm_Meristem_P Parameter: Age (day) Value: 8
  misc_feature: MA Experiment 108535 PARAMETER Experiment Name: Zm_Meristem_P Parameter: Organism Value: Zea mays
  misc_feature: MA Experiment 108535 PARAMETER Experiment Name: Zm_Meristem_P Parameter: Plant Line Value: 35A19
  misc_feature: MA Experiment 108535 PARAMETER Experiment Name: Zm_Meristem_P Parameter: Tissue Value: Root Meristem vs. Above Root Meristem
  misc_feature: MA Experiment ID: 108543 Result: Up-regulated in Transcription
  misc_feature: MA Experiment ID: 108544 Result: Up-regulated in Transcription
  misc_feature: MA Experiment ID: 20000479 Result: Up-regulated in Transcription
  misc_feature: MA Experiment 20000479 PARAMETER Experiment Name: Zm_Drought_P Parameter: Age (day) Value: 10
  misc_feature: MA Experiment 20000479 PARAMETER Experiment Name: Zm_Drought_P Parameter: Organism Value: Zea mays
  misc_feature: MA Experiment 20000479 PARAMETER Experiment Name: Zm_Drought_P Parameter: Plant Line Value: 35A19
  misc_feature: MA Experiment 20000479 PARAMETER Experiment Name: Zm_Drought_P Parameter: Timepoint (hr) Value: 48
  misc_feature: MA Experiment 20000479 PARAMETER Experiment Name: Zm_Drought_P Parameter: Tissue Value: Aerial
  misc_feature: MA Experiment 20000479 PARAMETER Experiment Name: Zm_Drought_P Parameter: Treatment Value: Drought vs. No Drought
  misc_feature: MA Experiment ID: 20000480 Result: Up-regulated in Transcription
  misc_feature: MA Experiment 20000480 PARAMETER Experiment Name: Zm_Drought_P Parameter: Age (day) Value: 11
  misc_feature: MA Experiment 20000480 PARAMETER Experiment Name: Zm_Drought_P Parameter: Organism Value: Zea mays
  misc_feature: MA Experiment 20000480 PARAMETER Experiment Name: Zm_Drought_P Parameter: Plant Line Value: 35A19
  misc_feature: MA Experiment 20000480 PARAMETER Experiment Name: Zm_Drought_P Parameter: Timepoint (hr) Value: 72
  misc_feature: MA Experiment 20000480 PARAMETER Experiment Name: Zm_Drought_P Parameter: Tissue Value: Aerial
  misc_feature: MA Experiment 20000480 PARAMETER Experiment Name: Zm_Drought_P Parameter: Treatment Value: Drought vs. No Drought
  misc_feature: MA Experiment ID: 20000488 Result: Down-regulated in Transcription
  misc_feature: MA Experiment 20000488 PARAMETER Experiment Name: Zm_50mM_NH4NO3_L_to_H_P Parameter: Organism Value: Zea mays
  misc_feature: MA Experiment 20000488 PARAMETER Experiment Name: Zm_50mM_NH4NO3_L_to_H_P Parameter: Timepoint (hr) Value: 8
  misc_feature: MA Experiment 20000488 PARAMETER Experiment Name: Zm_50mM_NH4NO3_L_to_H_P Parameter: Tissue Value: Leaves
  misc_feature: MA Experiment 20000488 PARAMETER Experiment Name: Zm_50mM_NH4NO3_L_to_H_P Parameter: Treatment Value: 50mM NH4NO3 vs. 100mM Mannitol
  misc_feature: MA Experiment ID: 20000534 Result: Down-regulated in Transcription
  misc_feature: MA Experiment 20000534 PARAMETER Experiment Name: Zm_Hybrid_Pollen_P Parameter: Age (day) Value: 8
  misc_feature: MA Experiment 20000534 PARAMETER Experiment Name: Zm_Hybrid_Pollen_P Parameter: Organism Value: Zea mays
  misc_feature: MA Experiment 20000534 PARAMETER Experiment Name: Zm_Hybrid_Pollen_P Parameter: Plant Line Value: 35A19
  misc_feature: MA Experiment 20000534 PARAMETER Experiment Name: Zm_Hybrid_Pollen_P Parameter: Tissue Value: Pollen vs. Aerial
  misc_feature: MA Experiment ID: 20000535 Result: Down-regulated in Transcription
  misc_feature: MA Experiment 20000535 PARAMETER Experiment Name: Zm_Hybrid_Seed_Dev_P Parameter: DAP Value: 30 vs. 12
  misc_feature: MA Experiment 20000535 PARAMETER Experiment Name: Zm_Hybrid_Seed_Dev_P Parameter: Organism Value: Zea mays
  misc_feature: MA Experiment 20000535 PARAMETER Experiment Name: Zm_Hybrid_Seed_Dev_P Parameter: Plant Line Value: 35A19
  misc_feature: MA Experiment 20000535 PARAMETER Experiment Name: Zm_Hybrid_Seed_Dev_P Parameter: Tissue Value: Embryo vs. Unfert Floret
gtctgccgagccgagtgttcctttctagccttcacttctcagcgcggcagccttcgatcccccgactgcagccgccagccgcaccatggagcaagccgccatgccgcaggttccccgcgtcaagctcggcatccaggggcttgaggtgtcgaagctggggttcgggtgcatggggctcacgggcacctacaacgcgccgctcggcgacgaggccgtcgccgccgtcgtcgcgcacgccttccgccgcgggatcaccttcttcgacacctccgatgcctacgggccccgcaccaacgagaccctcctggggaaggcgctcaagcagctgccgagggagcaggtgcaggtggccaccaagttcgggataggccagggcgccgctggcatgaccgtgtgcggcacgcccgagtacgtacgcgcctgctgcgaggccagcctgcgccgcctcgacgccggctacatcgacctctactaccagcaccgcgtcgacaccaccgtccccatcgaggatacgattggtgagctcaagaagttggtggaggaggggaaggtcaagtacatcggcttgtcagaggccagcccagacacaatccgccgtgcgcacgccgtgcatcccatcaccgccgtgcagatggagtggtcgctctggtcccgagacatcgagcccgagatcgtgccactctgcagagaattggggattggaattgtggcttacagtccaattggccgtggattttttggtggaagaggagtgacacagcaagtttcttctgaatctagtctgcaaaggcatccaagatttacaacagaaagcttggagaagaacaagcagatttacctgaaaatagaagatttggcgaagaagtaccagtgcagcccagctcagctagctctagcctgggttctgcatcaaggggatgatgtggttcctataccagggacaacaaaaacgaagaacctagatgccaacgttgactccttgaaggtgaagctcacagctgaggacctgaaggaaattggcagccagatacgtgcagaagatgtggctggtggaagacaatacaattcctatgcacatacctcctggaagtacgcagatacaccaaaaaagtgaagttctggtcctggaaaccttgtagcaatcacaggcgtatgcaaatgttgaactatttccctgcatttgagccggaatcgtacgatgatgcatcttgtgaacatgcggcactaataaatcgagacgaagaataatgtgttttccatcagtg

SEQ ID NO: 11495 - protein, 342 aa, Zea mays subsp. mays
  peptide (1)..(342): Ceres Seq. ID no. 12374387
  misc_feature (8)..(340): Homolog of NCBI NO: 37534402 NR Description: putative polyprotein [Oryza sativa (japonica group)] >gi|31432120|gb|AAP53790.1| putative polyprotein [Oryza
  misc_feature (202)..(342): Homolog of NCBI NO: 34912706 NR Description: putative auxin-induced protein [Oryza sativa
  misc_feature (21)..(143): Homolog of NCBI NO: 34912706 NR Description: putative auxin-induced protein [Oryza sativa
  misc_feature (8)..(340): Homolog of NCBI NO: 15219786 NR Description: auxin-induced protein, putative; protein id: [Arabidopsis thaliana] >gi|25316215|pir||C96632 hypothetical
  misc_feature (5)..(340): Homolog of NCBI NO: 38344997 NR Description: OSJNBa0008A08.11 [Oryza sativa (japonica
  misc_feature (9)..(340): Homolog of NCBI NO: 18406861 NR Description: auxin-induced protein, putative; protein id: supported by cDNA: gi_15912324, supported by cDNA: gi_20466377, by cDNA: gi_6562979 [Arabidopsis thaliana]
  misc_feature (9)..(340): Homolog of NCBI NO: 6562980 NR Description: auxin-induced atb2 [Arabidopsis thaliana]
  misc_feature (8)..(340): Homolog of NCBI NO: 30102704 NR Description: At1g60680 [Arabidopsis thaliana]
  misc_feature (9)..(340): Homolog of NCBI NO: 30696459 NR Description: aldo/keto reductase family [Arabidopsis thaliana] At1g60730/F8A5_24 [Arabidopsis thaliana]
  misc_feature (9)..(340): Homolog of NCBI NO: 25316216 NR Description: hypothetical protein F8A5.24 [imported] -
MEQAAMPQVPRVKLGIQGLEVSKLGFGCMGLTGTYNAPLGDEAVAAVVAHAFRRGITFFDTSDAYGPRTNETLLGKALKQLPREQVQVATKFGIGQGAAGMTVCGTPEYVRACCEASLRRLDAGYIDLYYQHRVDTTVPIEDTIGELKKLVEEGKVKYIGLSEASPDTIRRAHAVHPITAVQMEWSLWSRDIEPEIVPLCRELGIGIVAYSPIGRGFFGGRGVTQQVSSESSLQRHPRFTTESLEKNKQIYLKIEDLAKKYQCSPAQLALAWVLHQGDDVVPIPGTTKTKNLDANVDSLKVKLTAEDLKEIGSQIRAEDVAGGRQYNSYAHTSWKYADTPKK

SEQ ID NO: 11496 - protein, 337 aa, Zea mays subsp. mays
  peptide (1)..(337): Ceres Seq. ID no. 12374388
  misc_feature (3)..(335): Homolog of NCBI NO: 37534402 NR Description: putative polyprotein [Oryza sativa (japonica group)] >gi|31432120|gb|AAP53790.1| putative polyprotein [Oryza
  misc_feature (197)..(337): Homolog of NCBI NO: 34912706 NR Description: putative auxin-induced protein [Oryza sativa
  misc_feature (16)..(138): Homolog of NCBI NO: 34912706 NR Description: putative auxin-induced protein [Oryza sativa
  misc_feature (3)..(335): Homolog of NCBI NO: 15219786 NR Description: auxin-induced protein, putative; protein id: [Arabidopsis thaliana] >gi|25316215|pir||C96632 hypothetical
  misc_feature (1)..(335): Homolog of NCBI NO: 38344997 NR Description: OSJNBa0008A08.11 [Oryza sativa (japonica
  misc_feature (4)..(335): Homolog of NCBI NO: 18406861 NR Description: auxin-induced protein, putative; protein id: supported by cDNA: gi_15912324, supported by cDNA: gi_20466377, by cDNA: gi_6562979 [Arabidopsis thaliana]
  misc_feature (4)..(335): Homolog of NCBI NO: 6562980 NR Description: auxin-induced atb2 [Arabidopsis thaliana]
  misc_feature (3)..(335): Homolog of NCBI NO: 30102704 NR Description: At1g60680 [Arabidopsis thaliana]
  misc_feature (4)..(335): Homolog of NCBI NO: 30696459 NR Description: aldo/keto reductase family [Arabidopsis thaliana] At1g60730/F8A5_24 [Arabidopsis thaliana]
  misc_feature (4)..(335): Homolog of NCBI NO: 25316216 NR Description: hypothetical protein F8A5.24 [imported] -
MPQVPRVKLGIQGLEVSKLGFGCMGLTGTYNAPLGDEAVAAVVAHAFRRGITFFDTSDAYGPRTNETLLGKALKQLPREQVQVATKFGIGQGAAGMTVCGTPEYVRACCEASLRRLDAGYIDLYYQHRVDTTVPIEDTIGELKKLVEEGKVKYIGLSEASPDTIRRAHAVHPITAVQMEWSLWSRDIEPEIVPLCRELGIGIVAYSPIGRGFFGGRGVTQQVSSESSLQRHPRFTTESLEKNKQIYLKIEDLAKKYQCSPAQLALAWVLHQGDDVVPIPGTTKTKNLDANVDSLKVKLTAEDLKEIGSQIRAEDVAGGRQYNSYAHTSWKYADTPKK

SEQ ID NO: 11497 - protein, 314 aa, Zea mays subsp. mays
  peptide (1)..(314): Ceres Seq. ID no. 12374389
  misc_feature (1)..(312): Homolog of NCBI NO: 37534402 NR Description: putative polyprotein [Oryza sativa (japonica group)] >gi|31432120|gb|AAP53790.1| putative polyprotein [Oryza
  misc_feature (174)..(314): Homolog of NCBI NO: 34912706 NR Description: putative auxin-induced protein [Oryza sativa
  misc_feature (1)..(115): Homolog of NCBI NO: 34912706 NR Description: putative auxin-induced protein [Oryza sativa
  misc_feature (1)..(312): Homolog of NCBI NO: 15219786 NR Description: auxin-induced protein, putative; protein id: [Arabidopsis thaliana] >gi|25316215|pir||C96632 hypothetical
  misc_feature (1)..(312): Homolog of NCBI NO: 38344997 NR Description: OSJNBa0008A08.11 [Oryza sativa (japonica
  misc_feature (1)..(312): Homolog of NCBI NO: 18406861 NR Description: auxin-induced protein, putative; protein id: supported by cDNA: gi_15912324, supported by cDNA: gi_20466377, by cDNA: gi_6562979 [Arabidopsis thaliana]
  misc_feature (1)..(312): Homolog of NCBI NO: 6562980 NR Description: auxin-induced atb2 [Arabidopsis thaliana]
  misc_feature (1)..(312): Homolog of NCBI NO: 30102704 NR Description: At1g60680 [Arabidopsis thaliana]
  misc_feature (1)..(312): Homolog of NCBI NO: 30696459 NR Description: aldo/keto reductase family [Arabidopsis thaliana] At1g60730/F8A5_24 [Arabidopsis thaliana]
  misc_feature (1)..(312): Homolog of NCBI NO: 25316216 NR Description: hypothetical protein F8A5.24 [imported] -
MGLTGTYNAPLGDEAVAAVVAHAFRRGITFFDTSDAYGPRTNETLLGKALKQLPREQVQVATKFGIGQGAAGMTVCGTPEYVRACCEASLRRLDAGYIDLYYQHRVDTTVPIEDTIGELKKLVEEGKVKYIGLSEASPDTIRRAHAVHPITAVQMEWSLWSRDIEPEIVPLCRELGIGIVAYSPIGRGFFGGRGVTQQVSSESSLQRHPRFTTESLEKNKQIYLKIEDLAKKYQCSPAQLALAWVLHQGDDVVPIPGTTKTKNLDANVDSLKVKLTAEDLKEIGSQIRAEDVAGGRQYNSYAHTSWKYADTPKK

SEQ ID NO: 11498 - DNA, 1754 bp, Zea mays subsp. mays
  misc_feature (1)..(1754): Ceres Seq. ID no. 12412767
  misc_feature: MA Experiment ID: 108522 Result: Down-regulated in Transcription
  misc_feature: MA Experiment 108522 PARAMETER Experiment Name: Zm_42deg_Heat_P Parameter: Age (day) Value: 8
  misc_feature: MA Experiment 108522 PARAMETER Experiment Name: Zm_42deg_Heat_P Parameter: Organism Value: Zea mays
  misc_feature: MA Experiment 108522 PARAMETER Experiment Name: Zm_42deg_Heat_P Parameter: Plant Line Value: 35A19
  misc_feature: MA Experiment 108522 PARAMETER Experiment Name: Zm_42deg_Heat_P Parameter: Temperature (deg C) Value: 42 vs. 22
  misc_feature: MA Experiment 108522 PARAMETER Experiment Name: Zm_42deg_Heat_P Parameter: Timepoint (hr) Value: 1
  misc_feature: MA Experiment 108522 PARAMETER Experiment Name: Zm_42deg_Heat_P Parameter: Tissue Value: Aerial
  misc_feature: MA Experiment ID: 108528 Result: Down-regulated in Transcription
  misc_feature: MA Experiment 108528 PARAMETER Experiment Name: Zm_Imbibed_Seeds_P Parameter: Age (day) Value: 5 vs. 2
  misc_feature: MA Experiment 108528 PARAMETER Experiment Name: Zm_Imbibed_Seeds_P Parameter: Organism Value: Zea mays
  misc_feature: MA Experiment 108528 PARAMETER Experiment Name: Zm_Imbibed_Seeds_P Parameter: Plant Line Value: 35A19
  misc_feature: MA Experiment 108528 PARAMETER Experiment Name: Zm_Imbibed_Seeds_P Parameter: Tissue Value: Aerial vs. Embryo
  misc_feature: MA Experiment ID: 108530 Result: Down-regulated in Transcription
  misc_feature: MA Experiment 108530 PARAMETER Experiment Name: Zm_Imbibed_Seeds_P Parameter: Age (day) Value: 6 vs. 2
  misc_feature: MA Experiment 108530 PARAMETER Experiment Name: Zm_Imbibed_Seeds_P Parameter: Organism Value: Zea mays
  misc_feature: MA Experiment 108530 PARAMETER Experiment Name: Zm_Imbibed_Seeds_P Parameter: Plant Line Value: 35A19
  misc_feature: MA Experiment 108530 PARAMETER Experiment Name: Zm_Imbibed_Seeds_P Parameter: Tissue Value: Aerial vs. Embryo
  misc_feature: MA Experiment ID: 108535 Result: Up-regulated in Transcription
  misc_feature: MA Experiment 108535 PARAMETER Experiment Name: Zm_Meristem_P Parameter: Age (day) Value: 8
  misc_feature: MA Experiment 108535 PARAMETER Experiment Name: Zm_Meristem_P Parameter: Organism Value: Zea mays
  misc_feature: MA Experiment 108535 PARAMETER Experiment Name: Zm_Meristem_P Parameter: Plant Line Value: 35A19
  misc_feature: MA Experiment 108535 PARAMETER Experiment Name: Zm_Meristem_P Parameter: Tissue Value: Root Meristem vs. Above Root Meristem
  misc_feature: MA Experiment ID: 108544 Result: Down-regulated in Transcription
  misc_feature: MA Experiment ID: 20000487 Result: Up-regulated in Transcription
  misc_feature: MA Experiment 20000487 PARAMETER Experiment Name: Zm_50mM_NH4NO3_L_to_H_P Parameter: Organism Value: Zea mays
  misc_feature: MA Experiment 20000487 PARAMETER Experiment Name: Zm_50mM_NH4NO3_L_to_H_P Parameter: Timepoint (hr) Value: 4
  misc_feature: MA Experiment 20000487 PARAMETER Experiment Name: Zm_50mM_NH4NO3_L_to_H_P Parameter: Tissue Value: Leaves
  misc_feature: MA Experiment 20000487 PARAMETER Experiment Name: Zm_50mM_NH4NO3_L_to_H_P Parameter: Treatment Value: 50mM NH4NO3 vs. 100mM Mannitol
  misc_feature: MA Experiment ID: 20000488 Result: Up-regulated in Transcription
  misc_feature: MA Experiment 20000488 PARAMETER Experiment Name: Zm_50mM_NH4NO3_L_to_H_P Parameter: Organism Value: Zea mays
  misc_feature: MA Experiment 20000488 PARAMETER Experiment Name: Zm_50mM_NH4NO3_L_to_H_P Parameter: Timepoint (hr) Value: 8
  misc_feature: MA Experiment 20000488 PARAMETER Experiment Name: Zm_50mM_NH4NO3_L_to_H_P Parameter: Tissue Value: Leaves
  misc_feature: MA Experiment 20000488 PARAMETER Experiment Name: Zm_50mM_NH4NO3_L_to_H_P Parameter: Treatment Value: 50mM NH4NO3 vs. 100mM Mannitol
  misc_feature: MA Experiment ID: 20000626 Result: Up-regulated in Transcription
  misc_feature: MA Experiment 20000626 PARAMETER Experiment Name: Zm_Herbicide-Treatments_P Parameter: Timepoint (hr) Value: 12
  misc_feature: MA Experiment 20000626 PARAMETER Experiment Name: Zm_Herbicide-Treatments_P Parameter: Tissue Value: Aerial
  misc_feature: MA Experiment 20000626 PARAMETER Experiment Name: Zm_Herbicide-Treatments_P Parameter: Treatment Value: Roundup vs. No Treatment
gttggtaatactgtacaaattttcgtctagttgcgtgctctcgctagggttccgccccgccggcatacccgaccataaaccccgcgccgcccgccagcaaccttcagtctcatttctcacgcgtagctcggacaggcagcttgaagctcgcgaaccagccatggcgaatggggacgcggccgtggaggtcggcgggaacggggagcaggaagccgcggcgcgccaggcgtcgacgttcgcggagctgggtatctgcgcggagctggtggaggcgtgcgacgccatggggtggaaggagcccaccaggatccaggccgaggccatcccccacgcgctccaagggaaggacctgatcgctctggcgcagacggggtccgggaagacgggcgcgttcgcgctgcccatcctgcaggagctgctcagcaaccgccaggctgaacagtctttcttcgcttgcgtgctctcgccaacaagagagctggcgattcagatcgcagagcagtttgaggcccttggatcagctattggtttgcgttgctcagtgcttgttggaggagtggatcgggtgcagcaagtgttatccatcggaaaacgtccacatattgtagttggaactcctggccgtcttttggaccatttgacagagactaaaggttttagccttaagaaaatcaagtatttggtattggatgaagctgataaattacttaatgtggagtttgagaaatcccttgatgacattctaagcgagatgcctaaagacaggaggactttccttttttcagcgactatgaccaaaaaggtaaataaactgcaacgtgcttgtctcaggaatcctgctaaggttgaagtgtcctccaaatattctacagtagattcacttaaacaagagttctattttgttcctgcagatgacaaggattgctatcttcttcatgttctgaacgagaggctggagagcatgatcatgatctttgtgcgcacctgtgaatctactagactccttgctcttatgttgaggaatcttggtttgaaagctatgtctatcagtggccagatgagtcaggacaagagattaggtgctttgaacagattcaaagcgaaagattgcaatatccttatttgcactgatgtagcaagtcgcggcctcgacattcaaggagttgatatggtcatcaactatgatattccaatcaattctaaggattatgttcatcgggtgggcaggactgcacgtgcagggcgatcaggatacgctgtatctttggtgaaccaatatgaagcccagtggttcgtgctgatcgagcagctccttggcaagaaaattgaccagtgtaaggtggacagagatgaagtccttatacttaaagggcccatatccgatgcaaagagaattgcgctgacgaaattgaaggattccggtggccacaagaagcggagaaatgtgggagatgacgatgaagaggttgaagatcattcttctcattctagaagaccgaaatccttgaagagatcaaacagacgatgaaggctctggagcatgtctggactgcctcgtttcgtgcaagtcctttgtggttcagcgcagatccaccctgtggtggtttggagtgatgctttgcctatttatactagggccagttaagacgttcacttgacaccattccttgggttgaaagcaagtctcccccaattttgtcatcccgacccaaaccatgcttacataaggaatcattttttgctgatggctgccg

SEQ ID NO: 11499 - protein, 508 aa, Zea mays subsp. mays
  peptide (1)..(508): Ceres Seq. ID no. 12412768
  misc_feature (90)..(297): Pfam Name: DEAD/DEAH box helicase Pfam Description: DEAD/DEAH box helicase
  misc_feature (39)..(508): Homolog of NCBI NO: 31126733 NR Description: putative RNA helicase [Oryza sativa (japonica
  misc_feature (78)..(490): Homolog of NCBI NO: 18424420 NR Description: DEAD/DEAH box RNA helicase protein, putative;
  misc_feature (78)..(490): Homolog of NCBI NO: 21593647 NR Description: replication protein A1-like [Arabidopsis thaliana]
  misc_feature (78)..(490): Homolog of NCBI NO: 26450667 NR Description: putative replication protein A1 [Arabidopsis
  misc_feature (67)..(508): Homolog of NCBI NO: 34899100 NR Description: ATP-dependent helicase pitchoune [Oryza sativa
  misc_feature (43)..(487): Homolog of NCBI NO: 21464402 NR Description: RE27528p [Drosophila melanogaster]
  misc_feature (43)..(487): Homolog of NCBI NO: 24585582 NR Description: CG9253-PA [Drosophila melanogaster]
  misc_feature (66)..(488): Homolog of NCBI NO: 27229058 NR Description: RIKEN cDNA 4930588A18 [Mus musculus] unnamed protein product [Mus musculus]
  misc_feature (143)..(490): Homolog of NCBI NO: 11358794 NR Description: RNA helicase RH10 [imported] - Arabidopsis (fragment) >gi|3775997|emb|CAA09201.1| RNA helicase [Arabidopsis
  misc_feature (75)..(487): Homolog of NCBI NO: 11121196 NR Description: DEAD box protein [Homo sapiens]
LVILYKFSSSCVLSLGFRPAGIPDHKPRAARQQPSVSFLTRSSDRQLEAREPAMANGDAAVEVGGNGEQEAAARQASTFAELGICAELVEACDAMGWKEPTRIQAEAIPHALQGKDLIALAQTGSGKTGAFALPILQELLSNRQAEQSFFACVLSPTRELAIQIAEQFEALGSAIGLRCSVLVGGVDRVQQVLSIGKRPHIVVGTPGRLLDHLTETKGFSLKKIKYLVLDEADKLLNVEFEKSLDDILSEMPKDRRTFLFSATMTKKVNKLQRACLRNPAKVEVSSKYSTVDSLKQEFYFVPADDKDCYLLHVLNERLESMIMIFVRTCESTRLLALMLRNLGLKAMSISGQMSQDKRLGALNRFKAKDCNILICTDVASRGLDIQGVDMVINYDIPINSKDYVHRVGRTARAGRSGYAVSLVNQYEAQWFVLIEQLLGKKIDQCKVDRDEVLILKGPISDAKRIALTKLKDSGGHKKRRNVGDDDEEVEDHSSHSRRPKSLKRSNRR

SEQ ID NO: 11500 - protein, 455 aa, Zea mays subsp. mays
  peptide (1)..(455): Ceres Seq. ID no. 12412769
  misc_feature (37)..(244): Pfam Name: DEAD/DEAH box helicase Pfam Description: DEAD/DEAH box helicase
  misc_feature (1)..(455): Homolog of NCBI NO: 31126733 NR Description: putative RNA helicase [Oryza sativa (japonica
  misc_feature (25)..(437): Homolog of NCBI NO: 18424420 NR Description: DEAD/DEAH box RNA helicase protein, putative;
  misc_feature (25)..(437): Homolog of NCBI NO: 21593647 NR Description: replication protein A1-like [Arabidopsis thaliana]
  misc_feature (25)..(437): Homolog of NCBI NO: 26450667 NR Description: putative replication protein A1 [Arabidopsis
  misc_feature (14)..(455): Homolog of NCBI NO: 34899100 NR Description: ATP-dependent helicase pitchoune [Oryza sativa
  misc_feature (1)..(434): Homolog of NCBI NO: 21464402 NR Description: RE27528p [Drosophila melanogaster]
  misc_feature (1)..(434): Homolog of NCBI NO: 24585582 NR Description: CG9253-PA [Drosophila melanogaster]
  misc_feature (13)..(435): Homolog of NCBI NO: 27229058 NR Description: RIKEN cDNA 4930588A18 [Mus musculus] unnamed protein product [Mus musculus]
  misc_feature (90)..(437): Homolog of NCBI NO: 11358794 NR Description: RNA helicase RH10 [imported] - Arabidopsis (fragment) >gi|3775997|emb|CAA09201.1| RNA helicase [Arabidopsis
  misc_feature (22)..(434): Homolog of NCBI NO: 11121196 NR Description: DEAD box protein [Homo sapiens]
MANGDAAVEVGGNGEQEAAARQASTFAELGICAELVEACDAMGWKEPTRIQAEAIPHALQGKDLIALAQTGSGKTGAFALPILQELLSNRQAEQSFFACVLSPTRELAIQIAEQFEALGSAIGLRCSVLVGGVDRVQQVLSIGKRPHIVVGTPGRLLDHLTETKGFSLKKIKYLVLDEADKLLNVEFEKSLDDILSEMPKDRRTFLFSATMTKKVNKLQRACLRNPAKVEVSSKYSTVDSLKQEFYFVPADDKDCYLLHVLNERLESMIMIFVRTCESTRLLALMLRNLGLKAMSISGQMSQDKRLGALNRFKAKDCNILICTDVASRGLDIQGVDMVINYDIPINSKDYVHRVGRTARAGRSGYAVSLVNQYEAQWFVLIEQLLGKKIDQCKVDRDEVLILKGPISDAKRIALTKLKDSGGHKKRRNVGDDDEEVEDHSSHSRRPKSLKRSNRR

SEQ ID NO: 11501 - protein, 414 aa, Zea mays subsp. mays
  peptide (1)..(414): Ceres Seq. ID no. 12412770
  misc_feature (1)..(203): Pfam Name: DEAD/DEAH box helicase Pfam Description: DEAD/DEAH box helicase
  misc_feature (1)..(414): Homolog of NCBI NO: 31126733 NR Description: putative RNA helicase [Oryza sativa (japonica
  misc_feature (1)..(396): Homolog of NCBI NO: 18424420 NR Description: DEAD/DEAH box RNA helicase protein, putative;
  misc_feature (1)..(396): Homolog of NCBI NO: 21593647 NR Description: replication protein A1-like [Arabidopsis thaliana]
  misc_feature (1)..(396): Homolog of NCBI NO: 26450667 NR Description: putative replication protein A1 [Arabidopsis
  misc_feature (1)..(414): Homolog of NCBI NO: 34899100 NR Description: ATP-dependent helicase pitchoune [Oryza sativa
  misc_feature (1)..(393): Homolog of NCBI NO: 21464402 NR Description: RE27528p [Drosophila melanogaster]
  misc_feature (1)..(393): Homolog of NCBI NO: 24585582 NR Description: CG9253-PA [Drosophila melanogaster]
  misc_feature (1)..(394): Homolog of NCBI NO: 27229058 NR Description: RIKEN cDNA 4930588A18 [Mus musculus] unnamed protein product [Mus musculus]
  misc_feature (49)..(396): Homolog of NCBI NO: 11358794 NR Description: RNA helicase RH10 [imported] - Arabidopsis (fragment) >gi|3775997|emb|CAA09201.1| RNA helicase [Arabidopsis
  misc_feature (1)..(393): Homolog of NCBI NO: 11121196 NR Description: DEAD box protein [Homo sapiens]
MGWKEPTRIQAEAIPHALQGKDLIALAQTGSGKTGAFALPILQELLSNRQAEQSFFACVLSPTRELAIQIAEQFEALGSAIGLRCSVLVGGVDRVQQVLSIGKRPHIVVGTPGRLLDHLTETKGFSLKKIKYLVLDEADKLLNVEFEKSLDDILSEMPKDRRTFLFSATMTKKVNKLQRACLRNPAKVEVSSKYSTVDSLKQEFYFVPADDKDCYLLHVLNERLESMIMIFVRTCESTRLLALMLRNLGLKAMSISGQMSQDKRLGALNRFKAKDCNILICTDVASRGLDIQGVDMVINYDIPINSKDYVHRVGRTARAGRSGYAVSLVNQYEAQWFVLIEQLLGKKIDQCKVDRDEVLILKGPISDAKRIALTKLKDSGGHKKRRNVGDDDEEVEDHSSHSRRPKSLKRSNRR

SEQ ID NO: 11502 - DNA, 1458 bp, Zea mays subsp. mays
  misc_feature (1)..(1458): Ceres Seq. ID no. 12373464
  misc_feature: MA Experiment ID: 108529 Result: Down-regulated in Transcription
  misc_feature: MA Experiment 108529 PARAMETER Experiment Name: Zm_Imbibed_Seeds_P Parameter: Age (day) Value: 5 vs. 2
  misc_feature: MA Experiment 108529 PARAMETER Experiment Name: Zm_Imbibed_Seeds_P Parameter: Organism Value: Zea mays
  misc_feature: MA Experiment 108529 PARAMETER Experiment Name: Zm_Imbibed_Seeds_P Parameter: Plant Line Value: 35A19
  misc_feature: MA Experiment 108529 PARAMETER Experiment Name: Zm_Imbibed_Seeds_P Parameter: Tissue Value: Roots vs. Embryo
  misc_feature: MA Experiment ID: 108536 Result: Down-regulated in Transcription
  misc_feature: MA Experiment 108536 PARAMETER Experiment Name: Zm_Meristem_P Parameter: Age (day) Value: 8
  misc_feature: MA Experiment 108536 PARAMETER Experiment Name: Zm_Meristem_P Parameter: Organism Value: Zea mays
  misc_feature: MA Experiment 108536 PARAMETER Experiment Name: Zm_Meristem_P Parameter: Plant Line Value: 35A19
  misc_feature: MA Experiment 108536 PARAMETER Experiment Name: Zm_Meristem_P Parameter: Tissue Value: Shoot Meristem vs. Above Shoot Meristem
  misc_feature: MA Experiment ID: 108543 Result: Up-regulated in Transcription
  misc_feature: MA Experiment ID: 108546 Result: Down-regulated in Transcription
  misc_feature: MA Experiment 108546 PARAMETER Experiment Name: Zm_Imbibed_Seeds_P Parameter: Age (day) Value: 3 vs. 2
  misc_feature: MA Experiment 108546 PARAMETER Experiment Name: Zm_Imbibed_Seeds_P Parameter: Organism Value: Zea mays
  misc_feature: MA Experiment 108546 PARAMETER Experiment Name: Zm_Imbibed_Seeds_P Parameter: Plant Line Value: 35A19
  misc_feature: MA Experiment 108546 PARAMETER Experiment Name: Zm_Imbibed_Seeds_P Parameter: Tissue Value: Roots vs. Embryo
  misc_feature: MA Experiment ID: 108556 Result: Down-regulated in Transcription
  misc_feature: MA Experiment 108556 PARAMETER Experiment Name: Zm_Drought_P Parameter: Age (day) Value: 9
  misc_feature: MA Experiment 108556 PARAMETER Experiment Name: Zm_Drought_P Parameter: Organism Value: Zea mays
  misc_feature: MA Experiment 108556 PARAMETER Experiment Name: Zm_Drought_P Parameter: Plant Line Value: 35A19
  misc_feature: MA Experiment 108556 PARAMETER Experiment Name: Zm_Drought_P Parameter: Timepoint (hr) Value: 24
  misc_feature: MA Experiment 108556 PARAMETER Experiment Name: Zm_Drought_P Parameter: Tissue Value: Aerial
  misc_feature: MA Experiment 108556 PARAMETER Experiment Name: Zm_Drought_P Parameter: Treatment Value: Drought vs. No Drought
  misc_feature: MA Experiment ID: 108597 Result: Down-regulated in Transcription
  misc_feature: MA Experiment 108597 PARAMETER Experiment Name: Zm_100uM_ABA_P Parameter: Age (day) Value: 9
  misc_feature: MA Experiment 108597 PARAMETER Experiment Name: Zm_100uM_ABA_P Parameter: Organism Value: Zea mays
  misc_feature: MA Experiment 108597 PARAMETER Experiment Name: Zm_100uM_ABA_P Parameter: Plant Line Value: 35A19
  misc_feature: MA Experiment 108597 PARAMETER Experiment Name: Zm_100uM_ABA_P Parameter: Timepoint (hr) Value: 24
  misc_feature: MA Experiment 108597 PARAMETER Experiment Name: Zm_100uM_ABA_P Parameter: Tissue Value: Aerial
  misc_feature: MA Experiment 108597 PARAMETER Experiment Name: Zm_100uM_ABA_P Parameter: Treatment Value: 100uM ABA vs. No Treatment
  misc_feature: MA Experiment ID: 108688 Result: Down-regulated in Transcription
  misc_feature: MA Experiment 108688 PARAMETER Experiment Name: Zm_Embryos-Flowers__P Parameter: Tissue Value: Immature Flowers vs. Aerial+
  misc_feature: MA Experiment ID: 20000477 Result: Down-regulated in Transcription
  misc_feature: MA Experiment 20000477 PARAMETER Experiment Name: Zm_5mM_SA_P Parameter: Age (day) Value: 10
  misc_feature: MA Experiment 20000477 PARAMETER Experiment Name: Zm_5mM_SA_P Parameter: Organism Value: Zea mays
  misc_feature: MA Experiment 20000477 PARAMETER Experiment Name: Zm_5mM_SA_P Parameter: Plant Line Value: 35A19
  misc_feature: MA Experiment 20000477 PARAMETER Experiment Name: Zm_5mM_SA_P Parameter: Timepoint (hr) Value: 48
  misc_feature: MA Experiment 20000477 PARAMETER Experiment Name: Zm_5mM_SA_P Parameter: Tissue Value: Aerial
  misc_feature: MA Experiment 20000477 PARAMETER Experiment Name: Zm_5mM_SA_P Parameter: Treatment Value: 5mM SA vs. No Treatment
  misc_feature: MA Experiment ID: 20000478 Result: Down-regulated in Transcription
  misc_feature: MA Experiment 20000478 PARAMETER Experiment Name: Zm_5mM_SA_P Parameter: Age (day) Value: 11
  misc_feature: MA Experiment 20000478 PARAMETER Experiment Name: Zm_5mM_SA_P Parameter: Organism Value: Zea mays
  misc_feature: MA Experiment 20000478 PARAMETER Experiment Name: Zm_5mM_SA_P Parameter: Plant Line Value: 35A19
  misc_feature: MA Experiment 20000478 PARAMETER Experiment Name: Zm_5mM_SA_P Parameter: Timepoint (hr) Value: 72
  misc_feature: MA Experiment 20000478 PARAMETER Experiment Name: Zm_5mM_SA_P Parameter: Tissue Value: Aerial
  misc_feature: MA Experiment 20000478 PARAMETER Experiment Name: Zm_5mM_SA_P Parameter: Treatment Value: 5mM SA vs. No Treatment
  misc_feature: MA Experiment ID: 20000479 Result: Down-regulated in Transcription
  misc_feature: MA Experiment 20000479 PARAMETER Experiment Name: Zm_Drought_P Parameter: Age (day) Value: 10
  misc_feature: MA Experiment 20000479 PARAMETER Experiment Name: Zm_Drought_P Parameter: Organism Value: Zea mays
  misc_feature: MA Experiment 20000479 PARAMETER Experiment Name: Zm_Drought_P Parameter: Plant Line Value: 35A19
  misc_feature: MA Experiment 20000479 PARAMETER Experiment Name: Zm_Drought_P Parameter: Timepoint (hr) Value: 48
  misc_feature: MA Experiment 20000479 PARAMETER Experiment Name: Zm_Drought_P Parameter: Tissue Value: Aerial
  misc_feature: MA Experiment 20000479 PARAMETER Experiment Name: Zm_Drought_P Parameter: Treatment Value: Drought vs. No Drought
  misc_feature: MA Experiment ID: 20000480 Result: Down-regulated in Transcription
  misc_feature: MA Experiment 20000480 PARAMETER Experiment Name: Zm_Drought_P Parameter: Age (day) Value: 11
  misc_feature: MA Experiment 20000480 PARAMETER Experiment Name: Zm_Drought_P Parameter: Organism Value: Zea mays
  misc_feature: MA Experiment 20000480 PARAMETER Experiment Name: Zm_Drought_P Parameter: Plant Line Value: 35A19
  misc_feature: MA Experiment 20000480 PARAMETER Experiment Name: Zm_Drought_P Parameter: Timepoint (hr) Value: 72
  misc_feature: MA Experiment 20000480 PARAMETER Experiment Name: Zm_Drought_P Parameter: Tissue Value: Aerial
  misc_feature: MA Experiment 20000480 PARAMETER Experiment Name: Zm_Drought_P Parameter: Treatment Value: Drought vs. No Drought
  misc_feature: MA Experiment ID: 20000488 Result: Down-regulated in Transcription
  misc_feature: MA Experiment 20000488 PARAMETER Experiment Name: Zm_50mM_NH4NO3_L_to_H_P Parameter: Organism Value: Zea mays
  misc_feature: MA Experiment 20000488 PARAMETER Experiment Name: Zm_50mM_NH4NO3_L_to_H_P Parameter: Timepoint (hr) Value: 8
  misc_feature: MA Experiment 20000488 PARAMETER Experiment Name: Zm_50mM_NH4NO3_L_to_H_P Parameter: Tissue Value: Leaves
  misc_feature: MA Experiment 20000488 PARAMETER Experiment Name: Zm_50mM_NH4NO3_L_to_H_P Parameter: Treatment Value: 50mM NH4NO3 vs. 100mM Mannitol
  misc_feature: MA Experiment ID: 20000492 Result: Down-regulated in Transcription
  misc_feature: MA Experiment 20000492 PARAMETER Experiment Name: Zm_Hybrid_Seed_Dev_P Parameter: DAP Value: 12
  misc_feature: MA Experiment 20000492 PARAMETER Experiment Name: Zm_Hybrid_Seed_Dev_P Parameter: Organism Value: Zea mays
  misc_feature: MA Experiment 20000492 PARAMETER Experiment Name: Zm_Hybrid_Seed_Dev_P Parameter: Plant Line Value: 35A19
  misc_feature: MA Experiment 20000492 PARAMETER Experiment Name: Zm_Hybrid_Seed_Dev_P Parameter: Tissue Value: Fert Kernel vs. Unfert Floret
aggagtagtagcaaccaagctaccctatctataagtactacggctcgaatgtgtcggccgacggcaatcaccattacatttgatccgccgcgcgcggcccgatcgacgagcgagagcctcattcacaccccgatctagctagctagctagtttacgaaaaaaaaatctggccacagggatgcggtggcggctgcagccggcgccggcgccgacgctgctcctcgtcctgctggtggccaccgtcgccgccgtcgtcgtggtggtgcgggcggagccccaggtgccgtgctacttcgtgttcggggactcgctcgtggacaacggcaacaacaacgacatcgcgtcgctggcgcgggccaactacccgccctacggcatcgacttcgccgccggccccaccggccgtttcagcaatggcctcaccaccgtcgacgctatatctcggcttctgggcttcgacgattacatccccgcgtacgctggcgcgagcggcgatcagctcctcaccggcgtcaacttcgcttccgccgcagccgggatccgtgacgagaccggccagcaactggggcaacggatcagcttcggcgggcagctccagaactaccaggcggcggtgcagcagctggtgagcatcctgggcgacgaggactccgcggccagccacctgagccagtgcatcttcacggtgggcatgggcagcaacgactacctcaacaactacttcatgccggcggtctactccaccagccagcagtacacgccggagcagtacgccgacgtgctcatcaaccagtactcgcagcagctccggaccctgtacagctacggggccaggaaggtggcgctcatgggcgtggggcaggtcgggtgcagccccaacgagctggcgcagcgcagcaccgacggcaccacctgcgtgccgcagatcaacggcgccatcgacatcttcaaccggaagctcgtcgccctcgtcgaccagttcaacgcgctgccgggggcgcacttcacctacataaacgtgtatgggatcttccaggacatcctgagagccccagggtcgcacggtctgacggtgacgaaccaagggtgctgcggcgtcggacggaataacgggcaggtgacgtgcttgccgttccagacgccgtgcgccaacaggaacgagtacctcttctgggacgctttccaccccacggaggcggccaacatcctcgtcggtcggagggcgtacagcgcggcgctgccgtccgacgtccaccccatggatctgcgcacgctcgccaggatctagctgtatggatcatgtgaactcgtgaagagaagcaaagcttacagcgtcttccttttttttgttctttgtttcccctcgtgattgtattgcttaccactcgcaaagggacgtatggtccctccatctaaactatatatataaacatgatatatactccctcgctcccgccc

SEQ ID NO: 11503 - protein, 369 aa, Zea mays subsp. mays
  peptide (1)..(369): Ceres Seq. ID no. 12373465
  misc_feature (38)..(349): Pfam Name: GDSL-like Lipase/Acylhydrolase Pfam Description: GDSL-like Lipase/Acylhydrolase
  misc_feature (38)..(349): Pfam Name: GDSL-like Lipase/Acylhydrolase Pfam Description: GDSL-like Lipase/Acylhydrolase
  misc_feature (11)..(369): Homolog of NCBI NO: 34909504 NR Description: putative GDSL-motif lipase/hydrolase-like protein
  misc_feature (13)..(369): Homolog of NCBI NO: 34910808 NR Description: GDSL-motif lipase/hydrolase-like protein [Oryza
  misc_feature (14)..(369): Homolog of NCBI NO: 15242458 NR Description: GDSL-motif lipase/hydrolase-like protein; protein At5g45670.1, supported by cDNA: 18389., supported by cDNA:
  misc_feature (14)..(369): Homolog of NCBI NO: 21553940 NR Description: GDSL-motif lipase/hydrolase-like protein
  misc_feature (1)..(369): Homolog of NCBI NO: 7485419 NR Description: hypothetical protein F13C5.140 - Arabidopsis >gi|2832625|emb|CAA16754.1| putative protein [Arabidopsis >gi|7268691|emb|CAB78899.1| putative protein [Arabidopsis
  misc_feature (15)..(369): Homolog of NCBI NO: 18415211 NR Description: Expressed protein; protein id: At4g18970.1, by cDNA: 42850., supported by cDNA: gi_16604576, supported by gi_21281049 [Arabidopsis thaliana] >gi|16604577|gb|AAL24090.1|
  misc_feature (29)..(369): Homolog of NCBI NO: 15220512 NR Description: lipase/hydrolase, putative; protein id: supported by cDNA: 6680., supported by cDNA: gi_15215767
  misc_feature (29)..(369): Homolog of NCBI NO: 21594055 NR Description: lipase/hydrolase, putative [Arabidopsis thaliana]
  misc_feature (15)..(369): Homolog of NCBI NO: 21618199 NR Description: GDSL-motif lipase/hydrolase-like protein
  misc_feature (15)..(369): Homolog of NCBI NO: 21592417 NR Description: lipase/hydrolase, putative [Arabidopsis thaliana]
  misc_feature (1)..(369): Homolog of NCBI NO: 7485419 NR Description: hypothetical protein F13C5.140 - Arabidopsis >gi|2832625|emb|CAA16754.1| putative protein [Arabidopsis >gi|7268691|emb|CAB78899.1| putative protein [Arabidopsis
  misc_feature (15)..(369): Homolog of NCBI NO: 18415211 NR Description: Expressed protein; protein id: At4g18970.1, by cDNA: 42850., supported by cDNA: gi_16604576, supported by gi_21281049 [Arabidopsis thaliana] >gi|16604577|gb|AAL24090.1|
  misc_feature (29)..(369): Homolog of NCBI NO: 15220512 NR Description: lipase/hydrolase, putative; protein id: supported by cDNA: 6680., supported by cDNA: gi_15215767
  misc_feature (29)..(369): Homolog of NCBI NO: 21594055 NR Description: lipase/hydrolase, putative [Arabidopsis thaliana]
  misc_feature (15)..(369): Homolog of NCBI NO: 21618199 NR Description: GDSL-motif lipase/hydrolase-like protein
  misc_feature (15)..(369): Homolog of NCBI NO: 21592417 NR Description: lipase/hydrolase, putative [Arabidopsis thaliana]
  misc_feature (11)..(369): Homolog of NCBI NO: 34909504 NR Description: putative GDSL-motif lipase/hydrolase-like protein
  misc_feature (13)..(369): Homolog of NCBI NO: 34910808 NR Description: GDSL-motif lipase/hydrolase-like protein [Oryza
  misc_feature (14)..(369): Homolog of NCBI NO: 15242458 NR Description: GDSL-motif lipase/hydrolase-like protein; protein At5g45670.1, supported by cDNA: 18389., supported by cDNA:
  misc_feature (14)..(369): Homolog of NCBI NO: 21553940 NR Description: GDSL-motif lipase/hydrolase-like protein
MRWRLQPAPAPTLLLVLLVATVAAVVVVVRAEPQVPCYFVFGDSLVDNGNNNDIASLARANYPPYGIDFAAGPTGRFSNGLTTVDAISRLLGFDDYIPAYAGASGDQLLTGVNFASAAAGIRDETGQQLGQRISFGGQLQNYQAAVQQLVSILGDEDSAASHLSQCIFTVGMGSNDYLNNYFMPAVYSTSQQYTPEQYADVLINQYSQQLRTLYSYGARKVALMGVGQVGCSPNELAQRSTDGTTCVPQINGAIDIFNRKLVALVDQFNALPGAHFTYINVYGIFQDILRAPGSHGLTVTNQGCCGVGRNNGQVTCLPFQTPCANRNEYLFWDAFHPTEAANILVGRRAYSAALPSDVHPMDLRTLARI

SEQ ID NO: 11504 - protein, 198 aa, Zea mays subsp. mays
  peptide (1)..(198): Ceres Seq. ID no. 12373466
  misc_feature (1)..(178): Pfam Name: GDSL-like Lipase/Acylhydrolase Pfam Description: GDSL-like Lipase/Acylhydrolase
  misc_feature (1)..(178): Pfam Name: GDSL-like Lipase/Acylhydrolase Pfam Description: GDSL-like Lipase/Acylhydrolase
  misc_feature (1)..(198): Homolog of NCBI NO: 34909504 NR Description: putative GDSL-motif lipase/hydrolase-like protein
  misc_feature (1)..(198): Homolog of NCBI NO: 34910808 NR Description: GDSL-motif lipase/hydrolase-like protein [Oryza
  misc_feature (1)..(198): Homolog of NCBI NO: 15242458 NR Description: GDSL-motif lipase/hydrolase-like protein; protein At5g45670.1, supported by cDNA: 18389., supported by cDNA:
  misc_feature (1)..(198): Homolog of NCBI NO: 21553940 NR Description: GDSL-motif lipase/hydrolase-like protein
  misc_feature (1)..(198): Homolog of NCBI NO: 7485419 NR Description: hypothetical protein F13C5.140 - Arabidopsis >gi|2832625|emb|CAA16754.1| putative protein [Arabidopsis >gi|7268691|emb|CAB78899.1| putative protein [Arabidopsis
  misc_feature (1)..(198): Homolog of NCBI NO: 34910808 NR Description: GDSL-motif lipase/hydrolase-like protein [Oryza
  misc_feature (1)..(198): Homolog of NCBI NO: 21553940 NR Description: GDSL-motif lipase/hydrolase-like protein
  misc_feature (1)..(198): Homolog of NCBI NO: 21592417 NR Description: lipase/hydrolase, putative [Arabidopsis thaliana]
  misc_feature (1)..(198): Homolog of NCBI NO: 21618199 NR Description: GDSL-motif lipase/hydrolase-like protein
  misc_feature (1)..(198): Homolog of NCBI NO: 21594055 NR Description: lipase/hydrolase, putative [Arabidopsis thaliana]
  misc_feature (1)..(198): Homolog of NCBI NO: 15220512 NR Description: lipase/hydrolase, putative; protein id: supported by cDNA: 6680., supported by cDNA: gi_15215767
  misc_feature (1)..(198): Homolog of NCBI NO: 18415211 NR Description: Expressed protein; protein id: At4g18970.1, by cDNA: 42850., supported by cDNA: gi_16604576, supported by gi_21281049 [Arabidopsis thaliana] >gi|16604577|gb|AAL24090.1|
  misc_feature (1)..(198): Homolog of NCBI NO: 7485419 NR Description: hypothetical protein F13C5.140 - Arabidopsis >gi|2832625|emb|CAA16754.1| putative protein [Arabidopsis >gi|7268691|emb|CAB78899.1| putative protein [Arabidopsis
  misc_feature (1)..(198): Homolog of NCBI NO: 15242458 NR Description: GDSL-motif lipase/hydrolase-like protein; protein At5g45670.1, supported by cDNA: 18389., supported by cDNA:
  misc_feature (1)..(198): Homolog of NCBI NO: 34909504 NR Description: putative GDSL-motif lipase/hydrolase-like protein
  misc_feature (1)..(198): Homolog of NCBI NO: 18415211 NR Description: Expressed protein; protein id: At4g18970.1, by cDNA: 42850., supported by cDNA: gi_16604576, supported by gi_21281049 [Arabidopsis thaliana] >gi|16604577|gb|AAL24090.1|
  misc_feature (1)..(198): Homolog of NCBI NO: 15220512 NR Description: lipase/hydrolase, putative; protein id: supported by cDNA: 6680., supported by cDNA: gi_15215767
  misc_feature (1)..(198): Homolog of NCBI NO: 21594055 NR Description: lipase/hydrolase, putative [Arabidopsis thaliana]
  misc_feature (1)..(198): Homolog of NCBI NO: 21618199 NR Description: GDSL-motif lipase/hydrolase-like protein
  misc_feature (1)..(198): Homolog of NCBI NO: 21592417 NR Description: lipase/hydrolase, putative [Arabidopsis thaliana]
MGSNDYLNNYFMPAVYSTSQQYTPEQYADVLINQYSQQLRTLYSYGARKVALMGVGQVGCSPNELAQRSTDGTTCVPQINGAIDIFNRKLVALVDQFNALPGAHFTYINVYGIFQDILRAPGSHGLTVTNQGCCGVGRNNGQVTCLPFQTPCANRNEYLFWDAFHPTEAANILVGRRAYSAALPSDVHPMDLRTLARI

SEQ ID NO: 11505 - protein, 187 aa, Zea mays subsp. mays
  peptide (1)..(187): Ceres Seq. ID no. 12373467
  misc_feature (1)..(167): Pfam Name: GDSL-like Lipase/Acylhydrolase Pfam Description: GDSL-like Lipase/Acylhydrolase
  misc_feature (1)..(167): Pfam Name: GDSL-like Lipase/Acylhydrolase Pfam Description: GDSL-like Lipase/Acylhydrolase
  misc_feature (1)..(187): Homolog of NCBI NO: 34909504 NR Description: putative GDSL-motif lipase/hydrolase-like protein
  misc_feature (1)..(187): Homolog of NCBI NO: 34910808 NR Description: GDSL-motif lipase/hydrolase-like protein [Oryza
  misc_feature (1)..(187): Homolog of NCBI NO: 15242458 NR Description: GDSL-motif lipase/hydrolase-like protein; protein At5g45670.1, supported by cDNA: 18389., supported by cDNA:
  misc_feature (1)..(187): Homolog of NCBI NO: 21553940 NR Description: GDSL-motif lipase/hydrolase-like protein
  misc_feature (1)..(187): Homolog of NCBI NO: 7485419 NR Description: hypothetical protein F13C5.140 - Arabidopsis >gi|2832625|emb|CAA16754.1| putative protein [Arabidopsis >gi|7268691|emb|CAB78899.1| putative protein [Arabidopsis
  misc_feature (1)..(187): Homolog of NCBI NO: 34910808 NR Description: GDSL-motif lipase/hydrolase-like protein [Oryza
  misc_feature (1)..(187): Homolog of NCBI NO: 21553940 NR Description: GDSL-motif lipase/hydrolase-like protein
  misc_feature (1)..(187): Homolog of NCBI NO: 21592417 NR Description: lipase/hydrolase, putative [Arabidopsis thaliana]
  misc_feature (1)..(187): Homolog of NCBI NO: 21618199 NR Description: GDSL-motif lipase/hydrolase-like protein
  misc_feature (1)..(187): Homolog of NCBI NO: 21594055 NR Description: lipase/hydrolase, putative [Arabidopsis thaliana]
  misc_feature (1)..(187): Homolog of NCBI NO: 15220512 NR Description: lipase/hydrolase, putative; protein id: supported by cDNA: 6680., supported by cDNA: gi_15215767
  misc_feature (1)..(187): Homolog of NCBI NO: 18415211 NR Description: Expressed protein; protein id: At4g18970.1, by cDNA: 42850., supported by cDNA: gi_16604576, supported by gi_21281049 [Arabidopsis thaliana] >gi|16604577|gb|AAL24090.1|
  misc_feature (1)..(187): Homolog of NCBI NO: 7485419 NR Description: hypothetical protein F13C5.140 - Arabidopsis >gi|2832625|emb|CAA16754.1| putative protein [Arabidopsis >gi|7268691|emb|CAB78899.1| putative protein [Arabidopsis
  misc_feature (1)..(187): Homolog of NCBI NO: 15242458 NR Description: GDSL-motif lipase/hydrolase-like protein; protein At5g45670.1, supported by cDNA: 18389., supported by cDNA:
  misc_feature (1)..(187): Homolog of NCBI NO: 34909504 NR Description: putative GDSL-motif lipase/hydrolase-like protein
  misc_feature (1)..(187): Homolog of NCBI NO: 18415211 NR Description: Expressed protein; protein id: At4g18970.1, by cDNA: 42850., supported by cDNA: gi_16604576, supported by gi_21281049 [Arabidopsis thaliana] >gi|16604577|gb|AAL24090.1|
  misc_feature (1)..(187): Homolog of NCBI NO: 15220512 NR Description: lipase/hydrolase, putative; protein id: supported by cDNA: 6680., supported by cDNA: gi_15215767
  misc_feature (1)..(187): Homolog of NCBI NO: 21594055 NR Description: lipase/hydrolase, putative [Arabidopsis thaliana]
  misc_feature (1)..(187): Homolog of NCBI NO: 21618199 NR Description: GDSL-motif lipase/hydrolase-like protein
  misc_feature (1)..(187): Homolog of NCBI NO: 21592417 NR Description: lipase/hydrolase, putative [Arabidopsis thaliana]
MPAVYSTSQQYTPEQYADVLINQYSQQLRTLYSYGARKVALMGVGQVGCSPNELAQRSTDGTTCVPQINGAIDIFNRKLVALVDQFNALPGAHFTYINVYGIFQDILRAPGSHGLTVTNQGCCGVGRNNGQVTCLPFQTPCANRNEYLFWDAFHPTEAANILVGRRAYSAALPSDVHPMDLRTLARI

SEQ ID NO: 11506 - DNA, 1563 bp, Zea mays subsp. mays
  misc_feature (1)..(1563): Ceres Seq. ID no. 12351717
  misc_feature: MA Experiment ID: 108535 Result: Up-regulated in Transcription
  misc_feature: MA Experiment 108535 PARAMETER Experiment Name: Zm_Meristem_P Parameter: Age (day) Value: 8
  misc_feature: MA Experiment 108535 PARAMETER Experiment Name: Zm_Meristem_P Parameter: Organism Value: Zea mays
  misc_feature: MA Experiment 108535 PARAMETER Experiment Name: Zm_Meristem_P Parameter: Plant Line Value: 35A19
  misc_feature: MA Experiment 108535 PARAMETER Experiment Name: Zm_Meristem_P Parameter: Tissue Value: Root Meristem vs. Above Root Meristem
  misc_feature: MA Experiment ID: 108536 Result: Down-regulated in Transcription
  misc_feature: MA Experiment 108536 PARAMETER Experiment Name: Zm_Meristem_P Parameter: Age (day) Value: 8
  misc_feature: MA Experiment 108536 PARAMETER Experiment Name: Zm_Meristem_P Parameter: Organism Value: Zea mays
  misc_feature: MA Experiment 108536 PARAMETER Experiment Name: Zm_Meristem_P Parameter: Plant Line Value: 35A19
  misc_feature: MA Experiment 108536 PARAMETER Experiment Name: Zm_Meristem_P Parameter: Tissue Value: Shoot Meristem vs. Above Shoot Meristem
  misc_feature: MA Experiment ID: 108543 Result: Up-regulated in Transcription
  misc_feature: MA Experiment ID: 108544 Result: Down-regulated in Transcription
  misc_feature: MA Experiment ID: 108556 Result: Up-regulated in Transcription
  misc_feature: MA Experiment 108556 PARAMETER Experiment Name: Zm_Drought_P Parameter: Age (day) Value: 9
  misc_feature: MA Experiment 108556 PARAMETER Experiment Name: Zm_Drought_P Parameter: Organism Value: Zea mays
  misc_feature: MA Experiment 108556 PARAMETER Experiment Name: Zm_Drought_P Parameter: Plant Line Value: 35A19
  misc_feature: MA Experiment 108556 PARAMETER Experiment Name: Zm_Drought_P Parameter: Timepoint (hr) Value: 24
  misc_feature: MA Experiment 108556 PARAMETER Experiment Name: Zm_Drought_P Parameter: Tissue Value: Aerial
  misc_feature: MA Experiment 108556 PARAMETER Experiment Name: Zm_Drought_P Parameter: Treatment Value: Drought vs. No Drought
  misc_feature: MA Experiment ID: 108688 Result: Down-regulated in Transcription
  misc_feature: MA Experiment 108688 PARAMETER Experiment Name: Zm_Embryos-Flowers__P Parameter: Tissue Value: Immature Flowers vs. Aerial+
  misc_feature: MA Experiment ID: 108689 Result: Up-regulated in Transcription
  misc_feature: MA Experiment 108689 PARAMETER Experiment Name: Zm_Drought_Roots_P Parameter: Age (day) Value: 9
  misc_feature: MA Experiment 108689 PARAMETER Experiment Name: Zm_Drought_Roots_P Parameter: Organism Value: Zea mays
  misc_feature: MA Experiment 108689 PARAMETER Experiment Name: Zm_Drought_Roots_P Parameter: Plant Line Value: 35A19
  misc_feature: MA Experiment 108689 PARAMETER Experiment Name: Zm_Drought_Roots_P Parameter: Timepoint (hr) Value: 24
  misc_feature: MA Experiment 108689 PARAMETER Experiment Name: Zm_Drought_Roots_P Parameter: Tissue Value: Roots
  misc_feature: MA Experiment 108689 PARAMETER Experiment Name: Zm_Drought_Roots_P Parameter: Treatment Value: Drought vs. No Drought
  misc_feature: MA Experiment ID: 20000534 Result: Up-regulated in Transcription
  misc_feature: MA Experiment 20000534 PARAMETER Experiment Name: Zm_Hybrid_Pollen_P Parameter: Age (day) Value: 8
  misc_feature: MA Experiment 20000534 PARAMETER Experiment Name: Zm_Hybrid_Pollen_P Parameter: Organism Value: Zea mays
  misc_feature: MA Experiment 20000534 PARAMETER Experiment Name: Zm_Hybrid_Pollen_P Parameter: Plant Line Value: 35A19
  misc_feature: MA Experiment 20000534 PARAMETER Experiment Name: Zm_Hybrid_Pollen_P Parameter: Tissue Value: Pollen vs. Aerial
  misc_feature: MA Experiment ID: 20000535 Result: Up-regulated in Transcription
  misc_feature: MA Experiment 20000535 PARAMETER Experiment Name: Zm_Hybrid_Seed_Dev_P Parameter: DAP Value: 30 vs. 12
  misc_feature: MA Experiment 20000535 PARAMETER Experiment Name: Zm_Hybrid_Seed_Dev_P Parameter: Organism Value: Zea mays
  misc_feature: MA Experiment 20000535 PARAMETER Experiment Name: Zm_Hybrid_Seed_Dev_P Parameter: Plant Line Value: 35A19
  misc_feature: MA Experiment 20000535 PARAMETER Experiment Name: Zm_Hybrid_Seed_Dev_P Parameter: Tissue Value: Embryo vs. Unfert Floret
  misc_feature: MA Experiment ID: 20000626 Result: Down-regulated in Transcription
  misc_feature: MA Experiment 20000626 PARAMETER Experiment Name: Zm_Herbicide-Treatments_P Parameter: Timepoint (hr) Value: 12
  misc_feature: MA Experiment 20000626 PARAMETER Experiment Name: Zm_Herbicide-Treatments_P Parameter: Tissue Value: Aerial
  misc_feature: MA Experiment 20000626 PARAMETER Experiment Name: Zm_Herbicide-Treatments_P Parameter: Treatment Value: Roundup vs. No Treatment
actcccccgcctcgccgccagtcagattcaccaccggctcccctgcacaaccgcgtccgcgctgcaccaccaccgttcatcgaggaggaggggggacggagaccacggacatggagagatctcaacggcagtctcctccgccaccgtcgccgtcctcctcctcgtcctccgtctccgcggacaccgtcctcgtccctcccggaaagaggcggagggcggcgacggccaaggccggcgccgagcctaataagaggatccgcaaggaccccgccgccgccgccgcggggaagaggagctccgtctacaggggagtcaccaggcacaggtggacgggcaggttcgaggcgcatctctgggacaagcactgcctcgccgcgctccacaacaagaagaaaggcaggcaagtctacctgggggcgtatgacagcgaggaggcagctgctcgtgcctatgacctcgcagctctcaagtactggggtcctgagactctgctcaacttccctgtggaggattactccagcgagatgccggagatggaggccgtttcccgggaggagtacctggcctccctccgccgcaggagcagcggcttctccaggggcgtctccaagtacagaggcgtcgccaggcatcaccacaacgggaggtgggaggcacggattgggcgagtctttgggaacaagtacctctacttgggaacatttgacactcaagaagaggcagccaaggcctatgaccttgcggccattgaataccgtggcgtcaatgctgtaaccaacttcgacatcagctgctacctggaccacccgctgttcctggcacagctccaacaggagccacaggtggtgccggcactcaaccaagaacctcaacctgatcagagcgaaaccggaactacagagcaagagccggagtcaagcgaagccaagacaccggatggcagtgcagaacccgatgagaacgcggtgcctgacgacaccgcggagcccctcagcacagtcgacgacagcatcgaagagggcttatggagcccttgcatggattacgagctagacaccatgtcgagaccaaactttggcagctcaatcaatctgagcgagtggttcgctgacgcagacttcgactgcaacatcgggtgcctgttcgatgggtgttctgcggctgacgaaggaagcaaggatggtgtaggtctggcagatttcagtctgtttgaggcaggtgatgtccagctgaaggatgttctttcggatatggaagaggggatacaacctccagcgatgatcagtgtgtgcaactaattctggaacccgaggaggttttcgctttccaggtgtcctgtcttgggtaatccttgatctgtctaatgccacagtgccactgcaccagagcagctgagaactttcttgtagaaagcccatggcagtttggcgttagacaagtgtgtcgatgttctttaattctttgaatttgcccctaggctgcttggctaacgttaagggtttgtcattgtctcacttagcctagattcaactaatcacatcctgaatctgaagtggttgtgct

SEQ ID NO: 11507 - protein, 431 aa, Zea mays subsp. mays
  peptide (1)..(431): Ceres Seq. ID no. 12351718
  misc_feature (98)..(172): Pfam Name: AP2 domain Pfam Description: AP2 domain
  misc_feature (83)..(338): Homolog of NCBI NO: 18394319 NR Description: ovule development protein, putative; protein id: supported by cDNA: gi_15028184 [Arabidopsis thaliana]
  misc_feature (68)..(325): Homolog of NCBI NO: 15219975 NR Description: ovule development protein, putative; protein id:
  misc_feature (83)..(338): Homolog of NCBI NO: 25518475 NR Description: hypothetical protein T24D18.16 - Arabidopsis >gi|6587812|gb|AAF18503.1|AC010924_16 Similar to gb|U44028 factor CKC from Arabidopsis thaliana and contains two PF|00847
  misc_feature (68)..(325): Homolog of NCBI NO: 34221733 NR Description: putative AP2 domain transcription factor
  misc_feature (47)..(347): Homolog of NCBI NO: 34909212 NR Description: P0425G02.29 [Oryza sativa (japonica
  misc_feature (21)..(291): Homolog of NCBI NO: 38492172 NR Description: ANT-like protein [Nicotiana tabacum]
  misc_feature (95)..(265): Homolog of NCBI NO: 21069057 NR Description: BABY BOOM [Arabidopsis thaliana]
  misc_feature (22)..(265): Homolog of NCBI NO: 21304227 NR Description: ovule development aintegumenta-like protein BNM3
  misc_feature (22)..(265): Homolog of NCBI NO: 34907686 NR Description: putative ovule development protein
  misc_feature (73)..(369): Homolog of NCBI NO: 15242120 NR Description: ovule development protein, putative; protein id: [Arabidopsis thaliana] >gi|9757933|dbj|BAB08476.1| contains to unknown protein~gb|AAD30633.1~gene_id:MSF19.5 [Arabidopsis
SPASPPVRFTTGSPAQPRPRCTTTVHRGGGGTETTDMERSQRQSPPPPSPSSSSSSVSADTVLVPPGKRRRAATAKAGAEPNKRIRKDPAAAAAGKRSSVYRGVTRHRWTGRFEAHLWDKHCLAALHNKKKGRQVYLGAYDSEEAAARAYDLAALKYWGPETLLNFPVEDYSSEMPEMEAVSREEYLASLRRRSSGFSRGVSKYRGVARHHHNGRWEARIGRVFGNKYLYLGTFDTQEEAAKAYDLAAIEYRGVNAVTNFDISCYLDHPLFLAQLQQEPQVVPALNQEPQPDQSETGTTEQEPESSEAKTPDGSAEPDENAVPDDTAEPLSTVDDSIEEGLWSPCMDYELDTMSRPNFGSSINLSEWFADADFDCNIGCLFDGCSAADEGSKDGVGLADFSLFEAGDVQLKDVLSDMEEGIQPPAMISVCN

SEQ ID NO: 11508 - protein, 395 aa, Zea mays subsp. mays
  peptide (1)..(395): Ceres Seq. ID no. 12351719
  misc_feature (62)..(136): Pfam Name: AP2 domain Pfam Description: AP2 domain
  misc_feature (47)..(302): Homolog of NCBI NO: 18394319 NR Description: ovule development protein, putative; protein id: supported by cDNA: gi_15028184 [Arabidopsis thaliana]
  misc_feature (32)..(289): Homolog of NCBI NO: 15219975 NR Description: ovule development protein, putative; protein id:
  misc_feature (47)..(302): Homolog of NCBI NO: 25518475 NR Description: hypothetical protein T24D18.16 - Arabidopsis >gi|6587812|gb|AAF18503.1|AC010924_16 Similar to gb|U44028 factor CKC from Arabidopsis thaliana and contains two PF|00847
  misc_feature (32)..(289): Homolog of NCBI NO: 34221733 NR Description: putative AP2 domain transcription factor
  misc_feature (11)..(311): Homolog of NCBI NO: 34909212 NR Description: P0425G02.29 [Oryza sativa (japonica
  misc_feature (1)..(255): Homolog of NCBI NO: 38492172 NR Description: ANT-like protein [Nicotiana tabacum]
  misc_feature (59)..(229): Homolog of NCBI NO: 21069057 NR Description: BABY BOOM [Arabidopsis thaliana]
  misc_feature (1)..(229): Homolog of NCBI NO: 21304227 NR Description: ovule development aintegumenta-like protein BNM3
  misc_feature (1)..(229): Homolog of NCBI NO: 34907686 NR Description: putative ovule development protein
  misc_feature (37)..(333): Homolog of NCBI NO: 15242120 NR Description: ovule development protein, putative; protein id: [Arabidopsis thaliana] >gi|9757933|dbj|BAB08476.1| contains to unknown protein~gb|AAD30633.1~gene_id:MSF19.5 [Arabidopsis
MERSQRQSPPPPSPSSSSSSVSADTVLVPPGKRRRAATAKAGAEPNKRIRKDPAAAAAGKRSSVYRGVTRHRWTGRFEAHLWDKHCLAALHNKKKGRQVYLGAYDSEEAAARAYDLAALKYWGPETLLNFPVEDYSSEMPEMEAVSREEYLASLRRRSSGFSRGVSKYRGVARHHHNGRWEARIGRVFGNKYLYLGTFDTQEEAAKAYDLAAIEYRGVNAVTNFDISCYLDHPLFLAQLQQEPQVVPALNQEPQPDQSETGTTEQEPESSEAKTPDGSAEPDENAVPDDTAEPLSTVDDSIEEGLWSPCMDYELDTMSRPNFGSSINLSEWFADADFDCNIGCLFDGCSAADEGSKDGVGLADFSLFEAGDVQLKDVLSDMEEGIQPPAMISVCN

SEQ ID NO: 11509 - protein, 257 aa, Zea mays subsp. mays
  peptide (1)..(257): Ceres Seq. ID no. 12351720
  misc_feature (28)..(91): Pfam Name: AP2 domain Pfam Description: AP2 domain
  misc_feature (1)..(164): Homolog of NCBI NO: 18394319 NR Description: ovule development protein, putative; protein id: supported by cDNA: gi_15028184 [Arabidopsis thaliana]
  misc_feature (1)..(151): Homolog of NCBI NO: 15219975 NR Description: ovule development protein, putative; protein id:
  misc_feature (1)..(164): Homolog of NCBI NO: 25518475 NR Description: hypothetical protein T24D18.16 - Arabidopsis >gi|6587812|gb|AAF18503.1|AC010924_16 Similar to gb|U44028 factor CKC from Arabidopsis thaliana and contains two PF|00847
  misc_feature (1)..(151): Homolog of NCBI NO: 34221733 NR Description: putative AP2 domain transcription factor
  misc_feature (1)..(173): Homolog of NCBI NO: 34909212 NR Description: P0425G02.29 [Oryza sativa (japonica
  misc_feature (1)..(117): Homolog of NCBI NO: 38492172 NR Description: ANT-like protein [Nicotiana tabacum]
  misc_feature (1)..(91): Homolog of NCBI NO: 21069057 NR Description: BABY BOOM [Arabidopsis thaliana]
  misc_feature (1)..(91): Homolog of NCBI NO: 21304227 NR Description: ovule development aintegumenta-like protein BNM3
  misc_feature (1)..(91): Homolog of NCBI NO: 34907686 NR Description: putative ovule development protein
  misc_feature (1)..(195): Homolog of NCBI NO: 15242120 NR Description: ovule development protein, putative; protein id: [Arabidopsis thaliana] >gi|9757933|dbj|BAB08476.1| contains to unknown protein~gb|AAD30633.1~gene_id:MSF19.5 [Arabidopsis
MPEMEAVSREEYLASLRRRSSGFSRGVSKYRGVARHHHNGRWEARIGRVFGNKYLYLGTFDTQEEAAKAYDLAAIEYRGVNAVTNFDISCYLDHPLFLAQLQQEPQVVPALNQEPQPDQSETGTTEQEPESSEAKTPDGSAEPDENAVPDDTAEPLSTVDDSIEEGLWSPCMDYELDTMSRPNFGSSINLSEWFADADFDCNIGCLFDGCSAADEGSKDGVGLADFSLFEAGDVQLKDVLSDMEEGIQPPAMISVCN

SEQ ID NO: 11510 - DNA, 1213 bp, Zea mays subsp. mays
  misc_feature (1)..(1213): Ceres Seq. ID no. 12348756
  misc_feature: MA Experiment ID: 108528 Result: Up-regulated in Transcription
  misc_feature: MA Experiment 108528 PARAMETER Experiment Name: Zm_Imbibed_Seeds_P Parameter: Age (day) Value: 5 vs. 2
  misc_feature: MA Experiment 108528 PARAMETER Experiment Name: Zm_Imbibed_Seeds_P Parameter: Organism Value: Zea mays
  misc_feature: MA Experiment 108528 PARAMETER Experiment Name: Zm_Imbibed_Seeds_P Parameter: Plant Line Value: 35A19
  misc_feature: MA Experiment 108528 PARAMETER Experiment Name: Zm_Imbibed_Seeds_P Parameter: Tissue Value: Aerial vs. Embryo
  misc_feature: MA Experiment ID: 108530 Result: Up-regulated in Transcription
  misc_feature: MA Experiment 108530 PARAMETER Experiment Name: Zm_Imbibed_Seeds_P Parameter: Age (day) Value: 6 vs. 2
  misc_feature: MA Experiment 108530 PARAMETER Experiment Name: Zm_Imbibed_Seeds_P Parameter: Organism Value: Zea mays
  misc_feature: MA Experiment 108530 PARAMETER Experiment Name: Zm_Imbibed_Seeds_P Parameter: Plant Line Value: 35A19
  misc_feature: MA Experiment 108530 PARAMETER Experiment Name: Zm_Imbibed_Seeds_P Parameter: Tissue Value: Aerial vs. Embryo
gattggttgctgttgcttcctgctttcgcttcgccttcacccgttcgccgtgcggccgagctctctagttccgccgctcgctagtcgccttcctcccaaatggcgaccgccatgcggggcagcagcctcctgcggttcggtttccgccatccttcctgcctcctgttccagtcccctcggtgtcctgccccgagcctgggtctgaacctggccgttggccgcaccgggcttatacgcctccgatgctcggcggccggggccggcgacgccggtggaaagaaggtgtcggctcggctggctctgacgcagcaggtgctgcggaacgccgaggagcgcgccgcgtcggcgggttcggaccctgcccccaagatcaccctggatcatgttactgttaattttgcaagaagtggtggtcctggtggtcagaatgttaacaaagttaacacaaaggttgacatgcgattcaatgttaaggaagctcactggcttggggagagaatcaaggaacggatattacaagcggagaagaataggataaataaagatggagagcttgttatatcttctacaaaaactagaacacagaagggcaatattgaagatgcattgcagaaaatacaggcaatcattgatgctgcatcatatgttcctccacccccaacagaagaccaaaagaaaaagattgaaaaaattgctgcagttgctgaaaggaagagacttcagaataagaaggtgctttcacagaagaaggaatttagacggaacagaactagctgggattgatgcaaggtatcttgcacagacccgtctttctgttttgtgccattccgcggtgggcattggcaatagtttagagggcttgttctcggggtagcaaaagcattcggctgatccttacagcagtggtgtacagagaccgacgaaaaacaagggtcagacttgctgaaggcatcttggtgaagaagatatagctaagtttcgtaggcatctccagtttttgtttcgtctattagtagggatggattcggatcggatactcatggaaacagatccgaacgtcactatttaccatattttaatccgaatacgaatactatcggatacgaatacaaaacggatagttcgaattcggatttacattcgaatacttacttgatttggaacatagcatcataacaagtattaatttgttttatcgatggatttatagttg

SEQ ID NO: 11511 - protein, 227 aa, Zea mays subsp. mays
  peptide (1)..(227): Ceres Seq. ID no. 12348757
  misc_feature (10)..(227): Homolog of NCBI NO: 27754314 NR Description: unknown protein [Arabidopsis thaliana]
  misc_feature (120)..(227): Homolog of NCBI NO: 15221608 NR Description: hypothetical protein; protein id: At1g62850.1
  misc_feature (94)..(162): Homolog of NCBI NO: 6630453 NR Description: F23N19.20 [Arabidopsis thaliana]
  misc_feature (199)..(227): Homolog of NCBI NO: 6630453 NR Description: F23N19.20 [Arabidopsis thaliana]
  misc_feature (44)..(227): Homolog of NCBI NO: 19921098 NR Description: CG6094-PA [Drosophila melanogaster]
  misc_feature (78)..(221): Homolog of NCBI NO: 27690532 NR Description: similar to immature colon carcinoma transcript 1
  misc_feature (30)..(221): Homolog of NCBI NO: 20306641 NR Description: Similar to immature colon carcinoma transcript 1
  misc_feature (66)..(221): Homolog of NCBI NO: 19387848 NR Description: immature colon carcinoma transcript 1 [Mus >gi|12833706|dbj|BAB22632.1| unnamed protein product [Mus
  misc_feature (80)..(221): Homolog of NCBI NO: 4557657 NR Description: immature colon carcinoma transcript 1 [Homo >gi|6015033|sp|Q14197|ICT1_HUMAN Immature colon carcinoma
  misc_feature (80)..(221): Homolog of NCBI NO: 30585121 NR Description: Homo sapiens immature colon carcinoma transcript
MATAMRGSSLLRFGFRHPSCLLFQSPRCPAPSLGLNLAVGRTGLIRLRCSAAGAGDAGGKKVSARLALTQQVLRNAEERAASAGSDPAPKITLDHVTVNFARSGGPGGQNVNKVNTKVDMRFNVKEAHWLGERIKERILQAEKNRINKDGELVISSTKTRTQKGNIEDALQKIQAIIDAASYVPPPPTEDQKKKIEKIAAVAERKRLQNKKVLSQKKEFRRNRTSWD

SEQ ID NO: 11512 - protein, 223 aa, Zea mays subsp. mays
  peptide (1)..(223): Ceres Seq. ID no. 12348758
  misc_feature (6)..(223): Homolog of NCBI NO: 27754314 NR Description: unknown protein [Arabidopsis thaliana]
  misc_feature (116)..(223): Homolog of NCBI NO: 15221608 NR Description: hypothetical protein; protein id: At1g62850.1
  misc_feature (90)..(158): Homolog of NCBI NO: 6630453 NR Description: F23N19.20 [Arabidopsis thaliana]
  misc_feature (195)..(223): Homolog of NCBI NO: 6630453 NR Description: F23N19.20 [Arabidopsis thaliana]
  misc_feature (40)..(223): Homolog of NCBI NO: 19921098 NR Description: CG6094-PA [Drosophila melanogaster]
  misc_feature (74)..(217): Homolog of NCBI NO: 27690532 NR Description: similar to immature colon carcinoma transcript 1
  misc_feature (26)..(217): Homolog of NCBI NO: 20306641 NR Description: Similar to immature colon carcinoma transcript 1
  misc_feature (62)..(217): Homolog of NCBI NO: 19387848 NR Description: immature colon carcinoma transcript 1 [Mus >gi|12833706|dbj|BAB22632.1| unnamed protein product [Mus
  misc_feature (76)..(217): Homolog of NCBI NO: 4557657 NR Description: immature colon carcinoma transcript 1 [Homo >gi|6015033|sp|Q14197|ICT1_HUMAN Immature colon carcinoma
  misc_feature (76)..(217): Homolog of NCBI NO: 30585121 NR Description: Homo sapiens immature colon carcinoma transcript
MRGSSLLRFGFRHPSCLLFQSPRCPAPSLGLNLAVGRTGLIRLRCSAAGAGDAGGKKVSARLALTQQVLRNAEERAASAGSDPAPKITLDHVTVNFARSGGPGGQNVNKVNTKVDMRFNVKEAHWLGERIKERILQAEKNRINKDGELVISSTKTRTQKGNIEDALQKIQAIIDAASYVPPPPTEDQKKKIEKIAAVAERKRLQNKKVLSQKKEFRRNRTSWD

SEQ ID NO: 11513 - DNA, 1477 bp, Zea mays subsp. mays
  misc_feature (1)..(1477): Ceres Seq. ID no. 12374112
  misc_feature: MA Experiment ID: 108504 Result: Up-regulated in Transcription
  misc_feature: MA Experiment 108504 PARAMETER Experiment Name: Zm_Drought_P Parameter: Age (day) Value: 8
  misc_feature: MA Experiment 108504 PARAMETER Experiment Name: Zm_Drought_P Parameter: Organism Value: Zea mays
  misc_feature: MA Experiment 108504 PARAMETER Experiment Name: Zm_Drought_P Parameter: Plant Line Value: 35A19
  misc_feature: MA Experiment 108504 PARAMETER Experiment Name: Zm_Drought_P Parameter: Timepoint (hr) Value: 12
  misc_feature: MA Experiment 108504 PARAMETER Experiment Name: Zm_Drought_P Parameter: Tissue Value: Aerial
  misc_feature: MA Experiment 108504 PARAMETER Experiment Name: Zm_Drought_P Parameter: Treatment Value: Drought vs. No Drought
  misc_feature: MA Experiment ID: 108515 Result: Up-regulated in Transcription
  misc_feature: MA Experiment 108515 PARAMETER Experiment Name: Zm_2mM_SA_P Parameter: Age (day) Value: 8
  misc_feature: MA Experiment 108515 PARAMETER Experiment Name: Zm_2mM_SA_P Parameter: Organism Value: Zea mays
  misc_feature: MA Experiment 108515 PARAMETER Experiment Name: Zm_2mM_SA_P Parameter: Plant Line Value: 35A19
  misc_feature: MA Experiment 108515 PARAMETER Experiment Name: Zm_2mM_SA_P Parameter: Timepoint (hr) Value: 12
  misc_feature: MA Experiment 108515 PARAMETER Experiment Name: Zm_2mM_SA_P Parameter: Tissue Value: Aerial
  misc_feature: MA Experiment 108515 PARAMETER Experiment Name: Zm_2mM_SA_P Parameter: Treatment Value: 2mM SA vs. No Treatment
  misc_feature: MA Experiment ID: 108522 Result: Up-regulated in Transcription
  misc_feature: MA Experiment 108522 PARAMETER Experiment Name: Zm_42deg_Heat_P Parameter: Age (day) Value: 8
  misc_feature: MA Experiment 108522 PARAMETER Experiment Name: Zm_42deg_Heat_P Parameter: Organism Value: Zea mays
  misc_feature: MA Experiment 108522 PARAMETER Experiment Name: Zm_42deg_Heat_P Parameter: Plant Line Value: 35A19
  misc_feature: MA Experiment 108522 PARAMETER Experiment Name: Zm_42deg_Heat_P Parameter: Temperature (deg C) Value: 42 vs. 22
  misc_feature: MA Experiment 108522 PARAMETER Experiment Name: Zm_42deg_Heat_P Parameter: Timepoint (hr) Value: 1
  misc_feature: MA Experiment 108522 PARAMETER Experiment Name: Zm_42deg_Heat_P Parameter: Tissue Value: Aerial
  misc_feature: MA Experiment ID: 108523 Result: Up-regulated in Transcription
  misc_feature: MA Experiment 108523 PARAMETER Experiment Name: Zm_42deg_Heat_P Parameter: Age (day) Value: 8
  misc_feature: MA Experiment 108523 PARAMETER Experiment Name: Zm_42deg_Heat_P Parameter: Organism Value: Zea mays
  misc_feature: MA Experiment 108523 PARAMETER Experiment Name: Zm_42deg_Heat_P Parameter: Plant Line Value: 35A19
  misc_feature: MA Experiment 108523 PARAMETER Experiment Name: Zm_42deg_Heat_P Parameter: Temperature (deg C) Value: 42 vs. 22
  misc_feature: MA Experiment 108523 PARAMETER Experiment Name: Zm_42deg_Heat_P Parameter: Timepoint (hr) Value: 6
  misc_feature: MA Experiment 108523 PARAMETER Experiment Name: Zm_42deg_Heat_P Parameter: Tissue Value: Aerial
  misc_feature: MA Experiment ID: 108527 Result: Up-regulated in Transcription
  misc_feature: MA Experiment 108527 PARAMETER Experiment Name: Zm_5mM_NO_P Parameter: Age (day) Value: 8
  misc_feature: MA Experiment 108527 PARAMETER Experiment Name: Zm_5mM_NO_P Parameter: Organism Value: Zea mays
  misc_feature: MA Experiment 108527 PARAMETER Experiment Name: Zm_5mM_NO_P Parameter: Plant Line Value: 35A19
  misc_feature: MA Experiment 108527 PARAMETER Experiment Name: Zm_5mM_NO_P Parameter: Timepoint (hr) Value: 6
  misc_feature: MA Experiment 108527 PARAMETER Experiment Name: Zm_5mM_NO_P Parameter: Tissue Value: Aerial
  misc_feature: MA Experiment 108527 PARAMETER Experiment Name: Zm_5mM_NO_P Parameter: Treatment Value: 5mM NO vs. No Treatment
  misc_feature: MA Experiment ID: 108534 Result: Up-regulated in Transcription
  misc_feature: MA Experiment 108534 PARAMETER Experiment Name: Zm_4deg_Cold_P Parameter: Age (hr) Value: 8
  misc_feature: MA Experiment 108534 PARAMETER Experiment Name: Zm_4deg_Cold_P Parameter: Organism Value: Zea mays
  misc_feature: MA Experiment 108534 PARAMETER Experiment Name: Zm_4deg_Cold_P Parameter: Plant Line Value: 35A19
  misc_feature: MA Experiment 108534 PARAMETER Experiment Name: Zm_4deg_Cold_P Parameter: Temperature (deg C) Value: 4 vs. 22
  misc_feature: MA Experiment 108534 PARAMETER Experiment Name: Zm_4deg_Cold_P Parameter: Timepoint (hr) Value: 6
  misc_feature: MA Experiment 108534 PARAMETER Experiment Name: Zm_4deg_Cold_P Parameter: Tissue Value: Aerial
  misc_feature: MA Experiment ID: 108535 Result: Down-regulated in Transcription
  misc_feature: MA Experiment 108535 PARAMETER Experiment Name: Zm_Meristem_P Parameter: Age (day) Value: 8
  misc_feature: MA Experiment 108535 PARAMETER Experiment Name: Zm_Meristem_P Parameter: Organism Value: Zea mays
  misc_feature: MA Experiment 108535 PARAMETER Experiment Name: Zm_Meristem_P Parameter: Plant Line Value: 35A19
  misc_feature: MA Experiment 108535 PARAMETER Experiment Name: Zm_Meristem_P Parameter: Tissue Value: Root Meristem vs. Above Root Meristem
  misc_feature: MA Experiment ID: 108540 Result: Up-regulated in Transcription
  misc_feature: MA Experiment 108540 PARAMETER Experiment Name: Zm_20percent_PEG_P Parameter: Age (day) Value: 8
  misc_feature: MA Experiment 108540 PARAMETER Experiment Name: Zm_20percent_PEG_P Parameter: Organism Value: Zea mays
  misc_feature: MA Experiment 108540 PARAMETER Experiment Name: Zm_20percent_PEG_P Parameter: Plant Line Value: 35A19
  misc_feature: MA Experiment 108540 PARAMETER Experiment Name: Zm_20percent_PEG_P Parameter: Timepoint (hr) Value: 6
  misc_feature: MA Experiment 108540 PARAMETER Experiment Name: Zm_20percent_PEG_P Parameter: Tissue Value: Aerial
  misc_feature: MA Experiment 108540 PARAMETER Experiment Name: Zm_20percent_PEG_P Parameter: Treatment Value: 20percent PEG vs. No Treatment
  misc_feature: MA Experiment ID: 108543 Result: Up-regulated in Transcription
  misc_feature: MA Experiment ID: 108545 Result: Down-regulated in Transcription
  misc_feature: MA Experiment 108545 PARAMETER Experiment Name: Zm_Imbibed_Seeds_P Parameter: Age (day) Value: 3 vs. 2
  misc_feature: MA Experiment 108545 PARAMETER Experiment Name: Zm_Imbibed_Seeds_P Parameter: Organism Value: Zea mays
  misc_feature: MA Experiment 108545 PARAMETER Experiment Name: Zm_Imbibed_Seeds_P Parameter: Plant Line Value: 35A19
  misc_feature: MA Experiment 108545 PARAMETER Experiment Name: Zm_Imbibed_Seeds_P Parameter: Tissue Value: Aerial vs. Embryo
  misc_feature: MA Experiment ID: 108547 Result: Down-regulated in Transcription
  misc_feature: MA Experiment 108547 PARAMETER Experiment Name: Zm_Imbibed_Seeds_P Parameter: Age (day) Value: 4 vs. 2
  misc_feature: MA Experiment 108547 PARAMETER Experiment Name: Zm_Imbibed_Seeds_P Parameter: Organism Value: Zea mays
  misc_feature: MA Experiment 108547 PARAMETER Experiment Name: Zm_Imbibed_Seeds_P Parameter: Plant Line Value: 35A19
  misc_feature: MA Experiment 108547 PARAMETER Experiment Name: Zm_Imbibed_Seeds_P Parameter: Tissue Value: Aerial vs. Embryo
  misc_feature: MA Experiment ID: 20000477 Result: Up-regulated in Transcription
  misc_feature: MA Experiment 20000477 PARAMETER Experiment Name: Zm_5mM_SA_P Parameter: Age (day) Value: 10
  misc_feature: MA Experiment 20000477 PARAMETER Experiment Name: Zm_5mM_SA_P Parameter: Organism Value: Zea mays
  misc_feature: MA Experiment 20000477 PARAMETER Experiment Name: Zm_5mM_SA_P Parameter: Plant Line Value: 35A19
  misc_feature: MA Experiment 20000477 PARAMETER Experiment Name: Zm_5mM_SA_P Parameter: Timepoint (hr) Value: 48
  misc_feature: MA Experiment 20000477 PARAMETER Experiment Name: Zm_5mM_SA_P Parameter: Tissue Value: Aerial
  misc_feature: MA Experiment 20000477 PARAMETER Experiment Name: Zm_5mM_SA_P Parameter: Treatment Value: 5mM SA vs. No Treatment
  misc_feature: MA Experiment ID: 20000533 Result: Up-regulated in Transcription
  misc_feature: MA Experiment 20000533 PARAMETER Experiment Name: Zm_0.001percent_MeJA_P Parameter: Age (day) Value: 11
  misc_feature: MA Experiment 20000533 PARAMETER Experiment Name: Zm_0.001percent_MeJA_P Parameter: Organism Value: Zea mays
  misc_feature: MA Experiment 20000533 PARAMETER Experiment Name: Zm_0.001percent_MeJA_P Parameter: Plant Line Value: 35A19
  misc_feature: MA Experiment 20000533 PARAMETER Experiment Name: Zm_0.001percent_MeJA_P Parameter: Timepoint (hr) Value: 72
  misc_feature: MA Experiment 20000533 PARAMETER Experiment Name: Zm_0.001percent_MeJA_P Parameter: Tissue Value: Aerial
  misc_feature: MA Experiment 20000533 PARAMETER Experiment Name: Zm_0.001percent_MeJA_P Parameter: Treatment Value: 0.001percent MeJA vs. No Treatment
  misc_feature: MA Experiment ID: 20000626 Result: Up-regulated in Transcription
  misc_feature: MA Experiment 20000626 PARAMETER Experiment Name: Zm_Herbicide-Treatments_P Parameter: Timepoint (hr) Value: 12
  misc_feature: MA Experiment 20000626 PARAMETER Experiment Name: Zm_Herbicide-Treatments_P Parameter: Tissue Value: Aerial
  misc_feature: MA Experiment 20000626 PARAMETER Experiment Name: Zm_Herbicide-Treatments_P Parameter: Treatment Value: Roundup vs. No Treatment
aagccacttggcgcacgcgctgacgcgcacccgcaccagcctctagtcggccagtcgggacgaagcctctcgaacgagcgaggccacgaggtgcccgccgcgcccagccggcctcgccgaccgggcccgccggcccctatataggcaggcgccacttcctcctcgcaaccaccagacgccagtccaccaccgcttcccgtgcagcgccctccctctacgttcccccatttcctgtgttggcggcgatggcgcggcacttcgtgctcaacaccggcgccaagatcccctccgtggggctcggcacctggcagtctgaccccggcgtcgttggcaacgctgtctacgccgccgtcaaggcgggttaccgacatatcgattgtgccagagtttacggcaacgaaaaggagattggtttggcgctgaagaagctatttgaagagggtgtagtgaagcgagaagatctgtttatcacctctaagctatggaatgatcatcatgctcctgaagatgtgcctgaggcactaaatgacagcctgaatgatttgcagcttgagtacctggatctttatcttatccattggccatttagagtcaagaagggaacaaataccagccctgaaaattttgttacacctgacttccctgctacttggggggcaatggaaaagttatatgatgctggcaaagctcgcgctattggtgtgagtaacttctcctcaaagaaattgggtgacttgcttgctgtagctcgtgtacctccagctgttgatcaggtggaatgtcatcctggttggcagcaaactaagctccatagcttttgtcagtcaactggtgttcatctaactgcttactcaccactaggttcacctggtacaacttggatgaatggtaatgtccttaaagaaccaataatcatctcaatagctgagaaactcgggaaaacttctgcacaagtggctctgcgctggaacattcagatgggtcacagtgttcttccaaagagcacgaatgaagaaaggataaagcaaaaccttgatgtttatgattggtcaattccagatgacttgcttgcaaagttctctgagattaagcaggctaggctacttagaggcaacttcattgtgaatccagagagcgtttacaagacccatgaggagctctgggatggtgaactttaggaaggacgccgttgtccgtcctgactcctgagcagggagcaagcagcgttccattagggcccgtcagatcatttcacctccaaagttgctcttttgaaatgaaggttcagtgctcggaagctctggtgccatcctgtatcacgaactattgagaaatttatcggtgattttactttgtgctacgggatgtgctgctgcagtctatcctagtgtcagttgatttttctggtaaaactgtgaccaaataagttaattcgccaggcatcattactattggaatttcatcgttttatctccgc

SEQ ID NO: 11514 - protein, 310 aa, Zea mays subsp. mays
  peptide (1)..(310): Ceres Seq. ID no. 12374113
  misc_feature (1)..(310): Homolog of NCBI NO: 34908280 NR Description: putative aldose reductase [Oryza sativa (japonica group)] >gi|15408884|dbj|BAB64275.1| putative aldose reductase
  misc_feature (1)..(310): Homolog of NCBI NO: 34908276 NR Description: putative aldose reductase [Oryza sativa (japonica group)] >gi|15408882|dbj|BAB64273.1| putative aldose reductase
  misc_feature (1)..(310): Homolog of NCBI NO: 30687261 NR Description: aldo/keto reductase family [Arabidopsis thaliana]
  misc_feature (5)..(310): Homolog of NCBI NO: 30687247 NR Description: aldo/keto reductase family [Arabidopsis thaliana]
  misc_feature (1)..(284): Homolog of NCBI NO: 25283479 NR Description: probable alcohol dehydrogenase [imported] -
  misc_feature (283)..(310): Homolog of NCBI NO: 25283479 NR Description: probable alcohol dehydrogenase [imported] -
  misc_feature (9)..(310): Homolog of NCBI NO: 28393400 NR Description: putative aldo/keto reductase [Arabidopsis
  misc_feature (1)..(308): Homolog of NCBI NO: 13160397 NR Description: aldose reductase [Digitalis purpurea]
  misc_feature (1)..(308): Homolog of NCBI NO: 13160399 NR Description: aldose reductase [Digitalis purpurea]
  misc_feature (5)..(285): Homolog of NCBI NO: 7431114 NR Description: aldehyde dehydrogenase homolog At2g37770 - thaliana >gi|3236259|gb|AAC23647.1| putative alcohol
MARHFVLNTGAKIPSVGLGTWQSDPGVVGNAVYAAVKAGYRHIDCARVYGNEKEIGLALKKLFEEGVVKREDLFITSKLWNDHHAPEDVPEALNDSLNDLQLEYLDLYLIHWPFRVKKGTNTSPENFVTPDFPATWGAMEKLYDAGKARAIGVSNFSSKKLGDLLAVARVPPAVDQVECHPGWQQTKLHSFCQSTGVHLTAYSPLGSPGTTWMNGNVLKEPIIISIAEKLGKTSAQVALRWNIQMGHSVLPKSTNEERIKQNLDVYDWSIPDDLLAKFSEIKQARLLRGNFIVNPESVYKTHEELWDGEL

SEQ ID NO: 11515 - protein, 172 aa, Zea mays subsp. mays
  peptide (1)..(172): Ceres Seq. ID no. 12374114
  misc_feature (1)..(172): Homolog of NCBI NO: 34908280 NR Description: putative aldose reductase [Oryza sativa (japonica group)] >gi|15408884|dbj|BAB64275.1| putative aldose reductase
  misc_feature (1)..(172): Homolog of NCBI NO: 34908276 NR Description: putative aldose reductase [Oryza sativa (japonica group)] >gi|15408882|dbj|BAB64273.1| putative aldose reductase
  misc_feature (1)..(172): Homolog of NCBI NO: 30687261 NR Description: aldo/keto reductase family [Arabidopsis thaliana]
  misc_feature (1)..(172): Homolog of NCBI NO: 30687247 NR Description: aldo/keto reductase family [Arabidopsis thaliana]
  misc_feature (1)..(146): Homolog of NCBI NO: 25283479 NR Description: probable alcohol dehydrogenase [imported] -
  misc_feature (145)..(172): Homolog of NCBI NO: 25283479 NR Description: probable alcohol dehydrogenase [imported] -
  misc_feature (1)..(172): Homolog of NCBI NO: 28393400 NR Description: putative aldo/keto reductase [Arabidopsis
  misc_feature (1)..(170): Homolog of NCBI NO: 13160397 NR Description: aldose reductase [Digitalis purpurea]
  misc_feature (1)..(170): Homolog of NCBI NO: 13160399 NR Description: aldose reductase [Digitalis purpurea]
  misc_feature (1)..(147): Homolog of NCBI NO: 7431114 NR Description: aldehyde dehydrogenase homolog At2g37770 - thaliana >gi|3236259|gb|AAC23647.1| putative alcohol
MEKLYDAGKARAIGVSNFSSKKLGDLLAVARVPPAVDQVECHPGWQQTKLHSFCQSTGVHLTAYSPLGSPGTTWMNGNVLKEPIIISIAEKLGKTSAQVALRWNIQMGHSVLPKSTNEERIKQNLDVYDWSIPDDLLAKFSEIKQARLLRGNFIVNPESVYKTHEELWDGEL

SEQ ID NO: 11516 - DNA, 1112 bp, Zea mays subsp. mays
  misc_feature (1)..(1112): Ceres Seq. ID no. 12413854
  misc_feature: MA Experiment ID: 108544 Result: Up-regulated in Transcription
atcgaatccttatcgttttctgtttttgttttgcccatttttttcgctggcgatttatgccatcacatctggcgctgctgtcgtgcctgctggtactgctcctctctttcgacaagttcctcttccactacctgaagcgccgctggttctccggcggcagcggcgccaccgtcccaagggcccccgccaaatcgaggcggaacatggcggccgccaagtggagcgagacggccatgctcgttatcgacatgcagaaggacttcgtggacccggcgatgcgcagtccgatgctggtagccggtggcgaggccgtcgtccctgccgttgccggggccgtcgccgtcgcaatggagcgcggcattttcgtcgtctgggttgtcagagagcatgacccttctggaagagatgttgaacttttccgtaggcaccattattctgggggaaagggtccaacagtgaaaggtctgaaaggagcggagctggctgatgggcttgttatcaaagaaggggaatacaagttggtgaagactagatttagtgctttcttcgcaacacatcttgattctgtcctgaaaactgcaggaataaagaacttggttattgttggagttcagacaccaaattgcattcggcagactgtgttcgatgctatagcactggactatgagaaagttacggttctaattgacgcaacagctgctgcaagaccagaaatccatttgtccaatatcagggatatgaagaacatcggagtggacacgccaaccctggaagaatggcgccgctagggttactctgtctcttggcagcaacagcaaacggagatgacctgttgtatgagatgcatgcagcacctccctgcatctacttctttgcttctaatctgcgtctgactgcgcgtacgttgttgtattgttatacccagtgcggtagaacaattgcagatggtggtatatggtatatgcaaacttgtaatccctcatatgtagagttcagttcaccataccatgtgatgtgcttgctttcacgtcgcagcagatggcactcaatccactccacatgccttgttatcttctttcttcatgagtcggcaaatgatgcctaaactgttg

SEQ ID NO: 11517 - protein, 261 aa, Zea mays subsp. mays
  peptide (1)..(261): Ceres Seq. ID no. 12413855
  misc_feature (76)..(259): Pfam Name: Isochorismatase family Pfam Description: Isochorismatase family
  misc_feature (70)..(259): Homolog of NCBI NO: 18401044 NR Description: putative hydrolase; protein id: At3g16190.1, by cDNA: 24775., supported by cDNA: gi_16648697 [Arabidopsis >gi|16648698|gb|AAL25541.1| AT3g16190/MYA6_2 [Arabidopsis
  misc_feature (74)..(260): Homolog of NCBI NO: 33599706 NR Description: putative isochorismatase [Bordetella >gi|33567303|emb|CAE31216.1| putative isochorismatase [Bordetella
  misc_feature (77)..(258): Homolog of NCBI NO: 20093942 NR Description: Amidase related to nicotinamidase [Methanopyrus AV19] >gi|19886895|gb|AAM01719.1| Amidase related to
  misc_feature (77)..(249): Homolog of NCBI NO: 11499734 NR Description: isochorismatase (entB) [Archaeoglobus fulgidus]
  misc_feature (75)..(256): Homolog of NCBI NO: 14521185 NR Description: PYRAZINAMIDASE/NICOTINAMIDASE [Pyrococcus abyssi]
  misc_feature (74)..(231): Homolog of NCBI NO: 28868562 NR Description: isochorismatase family protein [Pseudomonas pv. tomato str. DC3000] >gi|28851800|gb|AAO54876.1|
  misc_feature (57)..(246): Homolog of NCBI NO: 18313752 NR Description: isochorismatase, putative [Pyrobaculum >gi|18161309|gb|AAL64601.1| isochorismatase, putative
  misc_feature (77)..(233): Homolog of NCBI NO: 16081574 NR Description: N-carbamoylsarcosine amidase related protein
  misc_feature (57)..(233): Homolog of NCBI NO: 14602014 NR Description: hypothetical protein [Aeropyrum pernix]
  misc_feature (64)..(236): Homolog of NCBI NO: 23470336 NR Description: hypothetical protein [Pseudomonas syringae pv.
RILIVFCFCFAHFFRWRFMPSHLALLSCLLVLLLSFDKFLFHYLKRRWFSGGSGATVPRAPAKSRRNMAAAKWSETAMLVIDMQKDFVDPAMRSPMLVAGGEAVVPAVAGAVAVAMERGIFVVWVVREHDPSGRDVELFRRHHYSGGKGPTVKGLKGAELADGLVIKEGEYKLVKTRFSAFFATHLDSVLKTAGIKNLVIVGVQTPNCIRQTVFDAIALDYEKVTVLIDATAAARPEIHLSNIRDMKNIGVDTPTLEEWRR

SEQ ID NO: 11518 - protein, 243 aa, Zea mays subsp. mays
  peptide (1)..(243): Ceres Seq. ID no. 12413856
  misc_feature (58)..(241): Pfam Name: Isochorismatase family Pfam Description: Isochorismatase family
  misc_feature (52)..(241): Homolog of NCBI NO: 18401044 NR Description: putative hydrolase; protein id: At3g16190.1, by cDNA: 24775., supported by cDNA: gi_16648697 [Arabidopsis >gi|16648698|gb|AAL25541.1| AT3g16190/MYA6_2 [Arabidopsis
  misc_feature (56)..(242): Homolog of NCBI NO: 33599706 NR Description: putative isochorismatase [Bordetella >gi|33567303|emb|CAE31216.1| putative isochorismatase [Bordetella
  misc_feature (59)..(240): Homolog of NCBI NO: 20093942 NR Description: Amidase related to nicotinamidase [Methanopyrus AV19] >gi|19886895|gb|AAM01719.1| Amidase related to
  misc_feature (59)..(231): Homolog of NCBI NO: 11499734 NR Description: isochorismatase (entB) [Archaeoglobus fulgidus]
  misc_feature (57)..(238): Homolog of NCBI NO: 14521185 NR Description: PYRAZINAMIDASE/NICOTINAMIDASE [Pyrococcus abyssi]
  misc_feature (56)..(213): Homolog of NCBI NO: 28868562 NR Description: isochorismatase family protein [Pseudomonas pv. tomato str. DC3000] >gi|28851800|gb|AAO54876.1|
  misc_feature (39)..(228): Homolog of NCBI NO: 18313752 NR Description: isochorismatase, putative [Pyrobaculum >gi|18161309|gb|AAL64601.1| isochorismatase, putative
  misc_feature (59)..(215): Homolog of NCBI NO: 16081574 NR Description: N-carbamoylsarcosine amidase related protein
  misc_feature (39)..(215): Homolog of NCBI NO: 14602014 NR Description: hypothetical protein [Aeropyrum pernix]
  misc_feature (46)..(218): Homolog of NCBI NO: 23470336 NR Description: hypothetical protein [Pseudomonas syringae pv.
MPSHLALLSCLLVLLLSFDKFLFHYLKRRWFSGGSGATVPRAPAKSRRNMAAAKWSETAMLVIDMQKDFVDPAMRSPMLVAGGEAVVPAVAGAVAVAMERGIFVVWVVREHDPSGRDVELFRRHHYSGGKGPTVKGLKGAELADGLVIKEGEYKLVKTRFSAFFATHLDSVLKTAGIKNLVIVGVQTPNCIRQTVFDAIALDYEKVTVLIDATAAARPEIHLSNIRDMKNIGVDTPTLEEWRR

SEQ ID NO: 11519 - protein, 194 aa, Zea mays subsp. mays
  peptide (1)..(194): Ceres Seq. ID no. 12413857
  misc_feature (9)..(192): Pfam Name: Isochorismatase family Pfam Description: Isochorismatase family
  misc_feature (3)..(192): Homolog of NCBI NO: 18401044 NR Description: putative hydrolase; protein id: At3g16190.1, by cDNA: 24775., supported by cDNA: gi_16648697 [Arabidopsis >gi|16648698|gb|AAL25541.1| AT3g16190/MYA6_2 [Arabidopsis
  misc_feature (7)..(193): Homolog of NCBI NO: 33599706 NR Description: putative isochorismatase [Bordetella >gi|33567303|emb|CAE31216.1| putative isochorismatase [Bordetella
  misc_feature (10)..(191): Homolog of NCBI NO: 20093942 NR Description: Amidase related to nicotinamidase [Methanopyrus AV19] >gi|19886895|gb|AAM01719.1| Amidase related to
  misc_feature (10)..(182): Homolog of NCBI NO: 11499734 NR Description: isochorismatase (entB) [Archaeoglobus fulgidus]
  misc_feature (8)..(189): Homolog of NCBI NO: 14521185 NR Description: PYRAZINAMIDASE/NICOTINAMIDASE [Pyrococcus abyssi]
  misc_feature (7)..(164): Homolog of NCBI NO: 28868562 NR Description: isochorismatase family protein [Pseudomonas pv. tomato str. DC3000] >gi|28851800|gb|AAO54876.1|
  misc_feature (1)..(179): Homolog of NCBI NO: 18313752 NR Description: isochorismatase, putative [Pyrobaculum >gi|18161309|gb|AAL64601.1| isochorismatase, putative
  misc_feature (10)..(166): Homolog of NCBI NO: 16081574 NR Description: N-carbamoylsarcosine amidase related protein
  misc_feature (1)..(166): Homolog of NCBI NO: 14602014 NR Description: hypothetical protein [Aeropyrum pernix]
  misc_feature (1)..(169): Homolog of NCBI NO: 23470336 NR Description: hypothetical protein [Pseudomonas syringae pv.
MAAAKWSETAMLVIDMQKDFVDPAMRSPMLVAGGEAVVPAVAGAVAVAMERGIFVVWVVREHDPSGRDVELFRRHHYSGGKGPTVKGLKGAELADGLVIKEGEYKLVKTRFSAFFATHLDSVLKTAGIKNLVIVGVQTPNCIRQTVFDAIALDYEKVTVLIDATAAARPEIHLSNIRDMKNIGVDTPTLEEWRR

SEQ ID NO: 11520 - DNA, 1745 bp, Zea mays subsp. mays
  misc_feature (1)..(1745): Ceres Seq. ID no. 12348768
  misc_feature: MA Experiment ID: 108515 Result: Up-regulated in Transcription
  misc_feature: MA Experiment 108515 PARAMETER Experiment Name: Zm_2mM_SA_P Parameter: Age (day) Value: 8
  misc_feature: MA Experiment 108515 PARAMETER Experiment Name: Zm_2mM_SA_P Parameter: Organism Value: Zea mays
  misc_feature: MA Experiment 108515 PARAMETER Experiment Name: Zm_2mM_SA_P Parameter: Plant Line Value: 35A19
  misc_feature: MA Experiment 108515 PARAMETER Experiment Name: Zm_2mM_SA_P Parameter: Timepoint (hr) Value: 12
  misc_feature: MA Experiment 108515 PARAMETER Experiment Name: Zm_2mM_SA_P Parameter: Tissue Value: Aerial
  misc_feature: MA Experiment 108515 PARAMETER Experiment Name: Zm_2mM_SA_P Parameter: Treatment Value: 2mM SA vs. No Treatment
  misc_feature: MA Experiment ID: 108528 Result: Down-regulated in Transcription
  misc_feature: MA Experiment 108528 PARAMETER Experiment Name: Zm_Imbibed_Seeds_P Parameter: Age (day) Value: 5 vs. 2
  misc_feature: MA Experiment 108528 PARAMETER Experiment Name: Zm_Imbibed_Seeds_P Parameter: Organism Value: Zea mays
  misc_feature: MA Experiment 108528 PARAMETER Experiment Name: Zm_Imbibed_Seeds_P Parameter: Plant Line Value: 35A19
  misc_feature: MA Experiment 108528 PARAMETER Experiment Name: Zm_Imbibed_Seeds_P Parameter: Tissue Value: Aerial vs. Embryo
  misc_feature: MA Experiment ID: 108534 Result: Down-regulated in Transcription
  misc_feature: MA Experiment 108534 PARAMETER Experiment Name: Zm_4deg_Cold_P Parameter: Age (hr) Value: 8
  misc_feature: MA Experiment 108534 PARAMETER Experiment Name: Zm_4deg_Cold_P Parameter: Organism Value: Zea mays
  misc_feature: MA Experiment 108534 PARAMETER Experiment Name: Zm_4deg_Cold_P Parameter: Plant Line Value: 35A19
  misc_feature: MA Experiment 108534 PARAMETER Experiment Name: Zm_4deg_Cold_P Parameter: Temperature (deg C) Value: 4 vs. 22
  misc_feature: MA Experiment 108534 PARAMETER Experiment Name: Zm_4deg_Cold_P Parameter: Timepoint (hr) Value: 6
  misc_feature: MA Experiment 108534 PARAMETER Experiment Name: Zm_4deg_Cold_P Parameter: Tissue Value: Aerial
  misc_feature: MA Experiment ID: 108536 Result: Up-regulated in Transcription
  misc_feature: MA Experiment 108536 PARAMETER Experiment Name: Zm_Meristem_P Parameter: Age (day) Value: 8
  misc_feature: MA Experiment 108536 PARAMETER Experiment Name: Zm_Meristem_P Parameter: Organism Value: Zea mays
  misc_feature: MA Experiment 108536 PARAMETER Experiment Name: Zm_Meristem_P Parameter: Plant Line Value: 35A19
  misc_feature: MA Experiment 108536 PARAMETER Experiment Name: Zm_Meristem_P Parameter: Tissue Value: Shoot Meristem vs. Above Shoot Meristem
  misc_feature: MA Experiment ID: 108544 Result: Up-regulated in Transcription
  misc_feature: MA Experiment ID: 108545 Result: Down-regulated in Transcription
  misc_feature: MA Experiment 108545 PARAMETER Experiment Name: Zm_Imbibed_Seeds_P Parameter: Age (day) Value: 3 vs. 2
  misc_feature: MA Experiment 108545 PARAMETER Experiment Name: Zm_Imbibed_Seeds_P Parameter: Organism Value: Zea mays
  misc_feature: MA Experiment 108545 PARAMETER Experiment Name: Zm_Imbibed_Seeds_P Parameter: Plant Line Value: 35A19
  misc_feature: MA Experiment 108545 PARAMETER Experiment Name: Zm_Imbibed_Seeds_P Parameter: Tissue Value: Aerial vs. Embryo
  misc_feature: MA Experiment ID: 108547 Result: Down-regulated in Transcription
  misc_feature: MA Experiment 108547 PARAMETER Experiment Name: Zm_Imbibed_Seeds_P Parameter: Age (day) Value: 4 vs. 2
  misc_feature: MA Experiment 108547 PARAMETER Experiment Name: Zm_Imbibed_Seeds_P Parameter: Organism Value: Zea mays
  misc_feature: MA Experiment 108547 PARAMETER Experiment Name: Zm_Imbibed_Seeds_P Parameter: Plant Line Value: 35A19
  misc_feature: MA Experiment 108547 PARAMETER Experiment Name: Zm_Imbibed_Seeds_P Parameter: Tissue Value: Aerial vs. Embryo
  misc_feature: MA Experiment ID: 108556 Result: Up-regulated in Transcription
  misc_feature: MA Experiment 108556 PARAMETER Experiment Name: Zm_Drought_P Parameter: Age (day) Value: 9
  misc_feature: MA Experiment 108556 PARAMETER Experiment Name: Zm_Drought_P Parameter: Organism Value: Zea mays
  misc_feature: MA Experiment 108556 PARAMETER Experiment Name: Zm_Drought_P Parameter: Plant Line Value: 35A19
  misc_feature: MA Experiment 108556 PARAMETER Experiment Name: Zm_Drought_P Parameter: Timepoint (hr) Value: 24
  misc_feature: MA Experiment 108556 PARAMETER Experiment Name: Zm_Drought_P Parameter: Tissue Value: Aerial
  misc_feature: MA Experiment 108556 PARAMETER Experiment Name: Zm_Drought_P Parameter: Treatment Value: Drought vs. No Drought
  misc_feature: MA Experiment ID: 20000477 Result: Up-regulated in Transcription
  misc_feature: MA Experiment 20000477 PARAMETER Experiment Name: Zm_5mM_SA_P Parameter: Age (day) Value: 10
  misc_feature: MA Experiment 20000477 PARAMETER Experiment Name: Zm_5mM_SA_P Parameter: Organism Value: Zea mays
  misc_feature: MA Experiment 20000477 PARAMETER Experiment Name: Zm_5mM_SA_P Parameter: Plant Line Value: 35A19
  misc_feature: MA Experiment 20000477 PARAMETER Experiment Name: Zm_5mM_SA_P Parameter: Timepoint (hr) Value: 48
  misc_feature: MA Experiment 20000477 PARAMETER Experiment Name: Zm_5mM_SA_P Parameter: Tissue Value: Aerial
  misc_feature: MA Experiment 20000477 PARAMETER Experiment Name: Zm_5mM_SA_P Parameter: Treatment Value: 5mM SA vs. No Treatment
  misc_feature: MA Experiment ID: 20000478 Result: Up-regulated in Transcription
  misc_feature: MA Experiment 20000478 PARAMETER Experiment Name: Zm_5mM_SA_P Parameter: Age (day) Value: 11
  misc_feature: MA Experiment 20000478 PARAMETER Experiment Name: Zm_5mM_SA_P Parameter: Organism Value: Zea mays
  misc_feature: MA Experiment 20000478 PARAMETER Experiment Name: Zm_5mM_SA_P Parameter: Plant Line Value: 35A19
  misc_feature: MA Experiment 20000478 PARAMETER Experiment Name: Zm_5mM_SA_P Parameter: Timepoint (hr) Value: 72
  misc_feature: MA Experiment 20000478 PARAMETER Experiment Name: Zm_5mM_SA_P Parameter: Tissue Value: Aerial
  misc_feature: MA Experiment 20000478 PARAMETER Experiment Name: Zm_5mM_SA_P Parameter: Treatment Value: 5mM SA vs. No Treatment
  misc_feature: MA Experiment ID: 20000479 Result: Up-regulated in Transcription
  misc_feature: MA Experiment 20000479 PARAMETER Experiment Name: Zm_Drought_P Parameter: Age (day) Value: 10
  misc_feature: MA Experiment 20000479 PARAMETER Experiment Name: Zm_Drought_P Parameter: Organism Value: Zea mays
  misc_feature: MA Experiment 20000479 PARAMETER Experiment Name: Zm_Drought_P Parameter: Plant Line Value: 35A19
  misc_feature: MA Experiment 20000479 PARAMETER Experiment Name: Zm_Drought_P Parameter: Timepoint (hr) Value: 48
  misc_feature: MA Experiment 20000479 PARAMETER Experiment Name: Zm_Drought_P Parameter: Tissue Value: Aerial
  misc_feature: MA Experiment 20000479 PARAMETER Experiment Name: Zm_Drought_P Parameter: Treatment Value: Drought vs. No Drought
  misc_feature: MA Experiment ID: 20000480 Result: Up-regulated in Transcription
  misc_feature: MA Experiment 20000480 PARAMETER Experiment Name: Zm_Drought_P Parameter: Age (day) Value: 11
  misc_feature: MA Experiment 20000480 PARAMETER Experiment Name: Zm_Drought_P Parameter: Organism Value: Zea mays
  misc_feature: MA Experiment 20000480 PARAMETER Experiment Name: Zm_Drought_P Parameter: Plant Line Value: 35A19
  misc_feature: MA Experiment 20000480 PARAMETER Experiment Name: Zm_Drought_P Parameter: Timepoint (hr) Value: 72
  misc_feature: MA Experiment 20000480 PARAMETER Experiment Name: Zm_Drought_P Parameter: Tissue Value: Aerial
  misc_feature: MA Experiment 20000480 PARAMETER Experiment Name: Zm_Drought_P Parameter: Treatment Value: Drought vs. No Drought
  misc_feature: MA Experiment ID: 20000492 Result: Up-regulated in Transcription
  misc_feature: MA Experiment 20000492 PARAMETER Experiment Name: Zm_Hybrid_Seed_Dev_P Parameter: DAP Value: 12
  misc_feature: MA Experiment 20000492 PARAMETER Experiment Name: Zm_Hybrid_Seed_Dev_P Parameter: Organism Value: Zea mays
  misc_feature: MA Experiment 20000492 PARAMETER Experiment Name: Zm_Hybrid_Seed_Dev_P Parameter: Plant Line Value: 35A19
  misc_feature: MA Experiment 20000492 PARAMETER Experiment Name: Zm_Hybrid_Seed_Dev_P Parameter: Tissue Value: Fert Kernel vs. Unfert Floret
  misc_feature: MA Experiment ID: 20000534 Result: Down-regulated in Transcription
  misc_feature: MA Experiment 20000534 PARAMETER Experiment Name: Zm_Hybrid_Pollen_P Parameter: Age (day) Value: 8
  misc_feature: MA Experiment 20000534 PARAMETER Experiment Name: Zm_Hybrid_Pollen_P Parameter: Organism Value: Zea mays
  misc_feature: MA Experiment 20000534 PARAMETER Experiment Name: Zm_Hybrid_Pollen_P Parameter: Plant Line Value: 35A19
  misc_feature: MA Experiment 20000534 PARAMETER Experiment Name: Zm_Hybrid_Pollen_P Parameter: Tissue Value: Pollen vs. Aerial
  misc_feature: MA Experiment ID: 20000535 Result: Up-regulated in Transcription
  misc_feature: MA Experiment 20000535 PARAMETER Experiment Name: Zm_Hybrid_Seed_Dev_P Parameter: DAP Value: 30 vs. 12
  misc_feature: MA Experiment 20000535 PARAMETER Experiment Name: Zm_Hybrid_Seed_Dev_P Parameter: Organism Value: Zea mays
  misc_feature: MA Experiment 20000535 PARAMETER Experiment Name: Zm_Hybrid_Seed_Dev_P Parameter: Plant Line Value: 35A19
  misc_feature: MA Experiment 20000535 PARAMETER Experiment Name: Zm_Hybrid_Seed_Dev_P Parameter: Tissue Value: Embryo vs. Unfert Floret
  misc_feature: MA Experiment ID: 20000626 Result: Up-regulated in Transcription
  misc_feature: MA Experiment 20000626 PARAMETER Experiment Name: Zm_Herbicide-Treatments_P Parameter: Timepoint (hr) Value: 12
  misc_feature: MA Experiment 20000626 PARAMETER Experiment Name: Zm_Herbicide-Treatments_P Parameter: Tissue Value: Aerial
  misc_feature: MA Experiment 20000626 PARAMETER Experiment Name: Zm_Herbicide-Treatments_P Parameter: Treatment Value: Roundup vs. No Treatment
acgctcgcagcaccggccgttttctacgggcggtgcagtggacgggagtagtaccctttctttctcttcgaagaaaatgcggcggcgtgtggtataaaccccgcccgtcacgccgggccgtccgtgcgtttccttttgtcttcgcttgcttcctttcgaaagtccttgcgtcacactcgccgatcgatcgagtctctccggattacagagaggcccaactgccgaagccatcgatcgccgccacctcttcgagcagaatagttgagaatggctgacgaggatatccagcctatcgtatgtgacaatggcactggaatggtcaaggccggtttcgctggtgatgatgcgccaagagctgtcttccccagcattgtgggaagaccacgccacaccggtgtcatggtcggcatgggccaaaaggatgcctacgtaggtgatgaggctcaggccaagagaggcatcctgacactgaagtacccgattgagcatggcattgtcaacaactgggatgacatggagaaaatctggcatcacaccttctacaacgagctccgtgtttcgcctgaagatcaccctgtgctgctgaccgaggcccctctcaaccccaaggccaacagagaaaaaatgacgcagattatgtttgaaaccttcgaatgcccagcaatttatgttgctatccaggctgttctttcgttgtacgctagtgggcgaacaactggtattgtgatggattccggtgatggtgtgagccacacggttccaatctatgaaggatacacacttcctcatgctattctccgtttggatcttgcggggcgtgacctcaccgaccacctaatgaagatcctcacagagagagggtactccctcactacgagcgctgagcgggagattgtcagggacataaaggagaagcttgcctacgttgcccttgattatgaacaggagctggagactgccaggagcagctcctctgtcgagaagagctacgagatgcctgatggtcaggtcatcaccattgggtcagaaaggtttaggtgccccgaggtgctgttccaaccatcccttgttggcatggaatcgcctggcgtccatgaggccacgtacaactccatcatgaagtgtgatgttgatatcaggaaggatttgtatggtaacgttgtcctcagtgggggatctaccatgttccctgggattgccgatcgtatgagcaaggagatcacgtccctggctcctagcagcatgaaggttaaagtgattgcgccacctgaaaggaagtacagtgtctggatcggtggctctattttggcttctctcagcacttttcagcagatgtggatctccaagggagagtatgacgaaactggtccgggcattgtccacatgaagtgcttctaagtttttttgggaaatttttccaaaaaaaaagaagtttctggggaagttcgacatggtacgtcaggcgttaccggctcattgtgaaccaatacatgaactgccatgataaggttataagcagaaataacagtagcactggctccaattcctgaagatgagtctggtgctccctgctgtatgaaatggatcccactcgtatattcgtcaccgcgccgcactggtgtaacgtgttgcctcagagtttgcttttagctggttccttttttaaaaataagtactgtttttggttggctaccagtcattttgaacttcagtagcaaattatcttatttaatgcttgctttttc

SEQ ID NO: 11521 - protein, 376 aa, Zea mays subsp. mays
  peptide (1)..(376): Ceres Seq. ID no. 12348769
  misc_feature (1)..(376): Pfam Name: Actin Pfam Description: Actin
  misc_feature (1)..(376): Homolog of NCBI NO: 113220 NR Description: ACTIN 1 >gi|71640|pir||ATZM1 actin - maize
  misc_feature (1)..(376): Homolog of NCBI NO: 168404 NR Description: actin
  misc_feature (1)..(376): Homolog of NCBI NO: 9965319 NR Description: actin [Setaria italica]
  misc_feature (1)..(376): Homolog of NCBI NO: 37535954 NR Description: actin [Oryza sativa (japonica cultivar-group)]
  misc_feature (1)..(376): Homolog of NCBI NO: 15242516 NR Description: ACTIN 2/7 (sp|P53492); protein id: At5g09810.1, by cDNA: gi_1049306, supported by cDNA: gi_17065251, supported by gi_17381047, supported by cDNA: gi_20465864 [Arabidopsis
  misc_feature (1)..(376): Homolog of NCBI NO: 11276972 NR Description: actin [imported] - rape
  misc_feature (1)..(376): Homolog of NCBI NO: 24496452 NR Description: actin [Hordeum vulgare]
  misc_feature (1)..(376): Homolog of NCBI NO: 23955912 NR Description: actin [Stevia rebaudiana]
  misc_feature (1)..(376): Homolog of NCBI NO: 11276970 NR Description: actin [imported] - Malva pusilla
  misc_feature (1)..(376): Homolog of NCBI NO: 37547348 NR Description: similar to FKSG30 [Homo sapiens]
MADEDIQPIVCDNGTGMVKAGFAGDDAPRAVFPSIVGRPRHTGVMVGMGQKDAYVGDEAQAKRGILTLKYPIEHGIVNNWDDMEKIWHHTFYNELRVSPEDHPVLLTEAPLNPKANREKMTQIMFETFECPAIYVAIQAVLSLYASGRTTGIVMDSGDGVSHTVPIYEGYTLPHAILRLDLAGRDLTDHLMKILTERGYSLTTSAEREIVRDIKEKLAYVALDYEQELETARSSSSVEKSYEMPDGQVITIGSERFRCPEVLFQPSLVGMESPGVHEATYNSIMKCDVDIRKDLYGNVVLSGGSTMFPGIADRMSKEITSLAPSSMKVKVIAPPERKYSVWIGGSILASLSTFQQMWISKGEYDETGPGIVHMKCF

SEQ ID NO: 11522 - protein, 360 aa, Zea mays subsp. mays
  peptide (1)..(360): Ceres Seq. ID no. 12348770
  misc_feature (1)..(360): Pfam Name: Actin Pfam Description: Actin
  misc_feature (1)..(360): Homolog of NCBI NO: 113220 NR Description: ACTIN 1 >gi|71640|pir||ATZM1 actin - maize
  misc_feature (1)..(360): Homolog of NCBI NO: 168404 NR Description: actin
  misc_feature (1)..(360): Homolog of NCBI NO: 9965319 NR Description: actin [Setaria italica]
  misc_feature (1)..(360): Homolog of NCBI NO: 37535954 NR Description: actin [Oryza sativa (japonica cultivar-group)]
  misc_feature (1)..(360): Homolog of NCBI NO: 15242516 NR Description: ACTIN 2/7 (sp|P53492); protein id: At5g09810.1, by cDNA: gi_1049306, supported by cDNA: gi_17065251, supported by gi_17381047, supported by cDNA: gi_20465864 [Arabidopsis
  misc_feature (1)..(360): Homolog of NCBI NO: 11276972 NR Description: actin [imported] - rape
  misc_feature (1)..(360): Homolog of NCBI NO: 24496452 NR Description: actin [Hordeum vulgare]
  misc_feature (1)..(360): Homolog of NCBI NO: 23955912 NR Description: actin [Stevia rebaudiana]
  misc_feature (1)..(360): Homolog of NCBI NO: 11276970 NR Description: actin [imported] - Malva pusilla
  misc_feature (1)..(360): Homolog of NCBI NO: 37547348 NR Description: similar to FKSG30 [Homo sapiens]
MVKAGFAGDDAPRAVFPSIVGRPRHTGVMVGMGQKDAYVGDEAQAKRGILTLKYPIEHGIVNNWDDMEKIWHHTFYNELRVSPEDHPVLLTEAPLNPKANREKMTQIMFETFECPAIYVAIQAVLSLYASGRTTGIVMDSGDGVSHTVPIYEGYTLPHAILRLDLAGRDLTDHLMKILTERGYSLTTSAEREIVRDIKEKLAYVALDYEQELETARSSSSVEKSYEMPDGQVITIGSERFRCPEVLFQPSLVGMESPGVHEATYNSIMKCDVDIRKDLYGNVVLSGGSTMFPGIADRMSKEITSLAPSSMKVKVIAPPERKYSVWIGGSILASLSTFQQMWISKGEYDETGPGIVHMKCF

SEQ ID NO: 11523 - protein, 332 aa, Zea mays subsp. mays
  peptide (1)..(332): Ceres Seq. ID no. 12348771
  misc_feature (1)..(332): Pfam Name: Actin Pfam Description: Actin
  misc_feature (1)..(332): Homolog of NCBI NO: 113220 NR Description: ACTIN 1 >gi|71640|pir||ATZM1 actin - maize
  misc_feature (1)..(332): Homolog of NCBI NO: 168404 NR Description: actin
  misc_feature (1)..(332): Homolog of NCBI NO: 9965319 NR Description: actin [Setaria italica]
  misc_feature (1)..(332): Homolog of NCBI NO: 37535954 NR Description: actin [Oryza sativa (japonica cultivar-group)]
  misc_feature (1)..(332): Homolog of NCBI NO: 15242516 NR Description: ACTIN 2/7 (sp|P53492); protein id: At5g09810.1, by cDNA: gi_1049306, supported by cDNA: gi_17065251, supported by gi_17381047, supported by cDNA: gi_20465864 [Arabidopsis
  misc_feature (1)..(332): Homolog of NCBI NO: 11276972 NR Description: actin [imported] - rape
  misc_feature (1)..(332): Homolog of NCBI NO: 24496452 NR Description: actin [Hordeum vulgare]
  misc_feature (1)..(332): Homolog of NCBI NO: 23955912 NR Description: actin [Stevia rebaudiana]
  misc_feature (1)..(332): Homolog of NCBI NO: 11276970 NR Description: actin [imported] - Malva pusilla
  misc_feature (1)..(332): Homolog of NCBI NO: 37547348 NR Description: similar to FKSG30 [Homo sapiens]
MVGMGQKDAYVGDEAQAKRGILTLKYPIEHGIVNNWDDMEKIWHHTFYNELRVSPEDHPVLLTEAPLNPKANREKMTQIMFETFECPAIYVAIQAVLSLYASGRTTGIVMDSGDGVSHTVPIYEGYTLPHAILRLDLAGRDLTDHLMKILTERGYSLTTSAEREIVRDIKEKLAYVALDYEQELETARSSSSVEKSYEMPDGQVITIGSERFRCPEVLFQPSLVGMESPGVHEATYNSIMKCDVDIRKDLYGNVVLSGGSTMFPGIADRMSKEITSLAPSSMKVKVIAPPERKYSVWIGGSILASLSTFQQMWISKGEYDETGPGIVHMKCF

SEQ ID NO: 11524 - DNA, 1877 bp, Zea mays subsp. mays
  misc_feature (1)..(1877): Ceres Seq. ID no. 12344575
  misc_feature: MA Experiment ID: 108535 Result: Up-regulated in Transcription
  misc_feature: MA Experiment 108535 PARAMETER Experiment Name: Zm_Meristem_P Parameter: Age (day) Value: 8
  misc_feature: MA Experiment 108535 PARAMETER Experiment Name: Zm_Meristem_P Parameter: Organism Value: Zea mays
  misc_feature: MA Experiment 108535 PARAMETER Experiment Name: Zm_Meristem_P Parameter: Plant Line Value: 35A19
  misc_feature: MA Experiment 108535 PARAMETER Experiment Name: Zm_Meristem_P Parameter: Tissue Value: Root Meristem vs. Above Root Meristem
  misc_feature: MA Experiment ID: 108544 Result: Down-regulated in Transcription
ctctcctctcgctcgcgtccgcacaaatcccgtgctcccccgtctgaaaaccctccccacctccggcggcggcggcggcgctggcgaccgggtgtcttctccggcgagtctcccccctagtaacaagaaaatatggatgtacctgttgatgaccctgtggagaacctcactggaagtcctagtacccttggcaatgaggaagaagccactacttatgctaatgtgcaagatcagtccaaggaagaaccagaaaagctttacgaggaacccaaagacccaatgcaagacgagttgggtaaccaagggcatgtgagcatgaacaatgaagatgtgggaggccagaacaaagtggaccaagctacccccacagagcacggcgaggaagctggggtgaagcagcatgatgctacagttcctgatgacaagaaatggcctgggtggcctggagagagtgtgttccgtatactggttcctaccacaaaggtgggtgccgtcattgggcgcaaaggggatttcatcaagaaaatgtgtgaggaatcaagagcccgcatcaaggttcttgagggaccaccagctgtgccagaaagagctgtaatgatttcagcaaaggatgaaccagacacagagctacctccagctgttgatgggttgcttagagttcatagaaggataacagatggtttagaaactgaaactgatcagcctcaacgagctactgtcaacactgggccgacaaggctactggttccagcttcccaagctggcagcctaattgggaagcaaggagcaactattaagtcaatacaggatgcttcaaagtgcgttctccggattgttgagaatgttccacctgttgcattaaacgatgacagagttgtagagatacagggtgaacctcatgattctcacaaagccgtagaactgattgcaagtcatttaagaaaatttcttgttgaccgcagtgtcctccctttgtttgaaacacagattaaagcacacaatatgcacagagagcaacctatgcctcctccacaggcatggggcccccctcctccgtcaccctggggtcatccaccaccaaaccttcctcctggtggcccaggttatgttgggaacccacactacatgcctccacggccacaagagaactattatcctcctcccgatgtgccccctgtagaaaagcagccacactatggaatttcttcatatggacgagatgcacctccaagtgctcccccagggaatcaaaaccaagcacatgggtcatctcaggtgacacacagcatgcaagttcctctttcctatgctgatgctgtgataggggcagctggtgccagtatcagctacatccgcaggcatagtggagcaactataagtattcaagaaggcgctcctggcgagatgacagtggagattacaggaagtgcttcacaagtacagactgctcaacagctaatcaagaatttcatggctgaagcttctccccagggaccaccagccccaggtccacacggtcaaccagtggacacgggttacggctcgtacccaccttacgtggagcatcctatgggtctcctccaggtgctccagctccagcgcctcacaacggtggaagttatggtgctgcaccatactcgtcgagctatggatactaatccggagcaagagcttgcctcagacttagggaaggagggttatcgttatggttttgtttgctagtctattcatctgttgagaactcaagattgttattgttaggacgtgtgaactttggtgttctaggctgctttcagacgccagtgtcgatatactctctttgctttattgttgcggaatttatcgtaatatgttattttaatgttcaagaaaaaacc

SEQ ID NO: 11525 - protein, 529 aa, Zea mays subsp. mays
  peptide (1)..(529): Ceres Seq. ID no. 12344576
  misc_feature (202)..(253): Pfam Name: KH domain Pfam Description: KH domain
  misc_feature (1)..(474): Homolog of NCBI NO: 16924113 NR Description: putative RNA binding protein [Oryza sativa]
  misc_feature (1)..(478): Homolog of NCBI NO: 15229321 NR Description: KH domain protein; protein id: At3g04610.1, by cDNA: gi_17979248 [Arabidopsis thaliana]
  misc_feature (82)..(473): Homolog of NCBI NO: 37536904 NR Description: putative nucleic acid binding protein [Oryza
  misc_feature (305)..(455): Homolog of NCBI NO: 37534332 NR Description: unknown protein [Oryza sativa (japonica
  misc_feature (101)..(237): Homolog of NCBI NO: 37534332 NR Description: unknown protein [Oryza sativa (japonica
  misc_feature (237)..(365): Homolog of NCBI NO: 37534332 NR Description: unknown protein [Oryza sativa (japonica
  misc_feature (106)..(447): Homolog of NCBI NO: 15217969 NR Description: KH domain protein; protein id: At1g51580.1
  misc_feature (110)..(443): Homolog of NCBI NO: 14141168 NR Description: poly(rC)-binding protein 2, isoform a; alpha-CP2; binding protein 2; heterogenous nuclear ribonucleoprotein E2
  misc_feature (110)..(443): Homolog of NCBI NO: 6707736 NR Description: Poly(rC)-binding protein 2 (Alpha-CP2) (hnRNP-E2)
  misc_feature (298)..(454): Homolog of NCBI NO: 28317389 NR Description: TPA: hnRNP-E2 b [Xenopus laevis]
MDVPVDDPVENLTGSPSTLGNEEEATTYANVQDQSKEEPEKLYEEPKDPMQDELGNQGHVSMNNEDVGGQNKVDQATPTEHGEEAGVKQHDATVPDDKKWPGWPGESVFRILVPTTKVGAVIGRKGDFIKKMCEESRARIKVLEGPPAVPERAVMISAKDEPDTELPPAVDGLLRVHRRITDGLETETDQPQRATVNTGPTRLLVPASQAGSLIGKQGATIKSIQDASKCVLRIVENVPPVALNDDRVVEIQGEPHDSHKAVELIASHLRKFLVDRSVLPLFETQIKAHNMHREQPMPPPQAWGPPPPSPWGHPPPNLPPGGPGYVGNPHYMPPRPQENYYPPPDVPPVEKQPHYGISSYGRDAPPSAPPGNQNQAHGSSQVTHSMQVPLSYADAVIGAAGASISYIRRHSGATISIQEGAPGEMTVEITGSASQVQTAQQLIKNFMAEASPQGPPAPGPHGQPVDTGYGSYPPYVEHPMGLLQVLQLQRLTTVEVMVLHHTRRAMDTNPEQELASDLGKEGYRYGFVC

SEQ ID NO: 11526 - protein, 480 aa, Zea mays subsp. mays
  peptide (1)..(480): Ceres Seq. ID no. 12344577
  misc_feature (153)..(204): Pfam Name: KH domain Pfam Description: KH domain
  misc_feature (1)..(425): Homolog of NCBI NO: 16924113 NR Description: putative RNA binding protein [Oryza sativa]
  misc_feature (1)..(429): Homolog of NCBI NO: 15229321 NR Description: KH domain protein; protein id: At3g04610.1, by cDNA: gi_17979248 [Arabidopsis thaliana]
  misc_feature (33)..(424): Homolog of NCBI NO: 37536904 NR Description: putative nucleic acid binding protein [Oryza
  misc_feature (256)..(406): Homolog of NCBI NO: 37534332 NR Description: unknown protein [Oryza sativa (japonica
  misc_feature (52)..(188): Homolog of NCBI NO: 37534332 NR Description: unknown protein [Oryza sativa (japonica
  misc_feature (188)..(316): Homolog of NCBI NO: 37534332 NR Description: unknown protein [Oryza sativa (japonica
  misc_feature (57)..(398): Homolog of NCBI NO: 15217969 NR Description: KH domain protein; protein id: At1g51580.1
  misc_feature (61)..(394): Homolog of NCBI NO: 14141168 NR Description: poly(rC)-binding protein 2, isoform a; alpha-CP2; binding protein 2; heterogenous nuclear ribonucleoprotein E2
  misc_feature (61)..(394): Homolog of NCBI NO: 6707736 NR Description: Poly(rC)-binding protein 2 (Alpha-CP2) (hnRNP-E2)
  misc_feature (249)..(405): Homolog of NCBI NO: 28317389 NR Description: TPA: hnRNP-E2 b [Xenopus laevis]
MQDELGNQGHVSMNNEDVGGQNKVDQATPTEHGEEAGVKQHDATVPDDKKWPGWPGESVFRILVPTTKVGAVIGRKGDFIKKMCEESRARIKVLEGPPAVPERAVMISAKDEPDTELPPAVDGLLRVHRRITDGLETETDQPQRATVNTGPTRLLVPASQAGSLIGKQGATIKSIQDASKCVLRIVENVPPVALNDDRVVEIQGEPHDSHKAVELIASHLRKFLVDRSVLPLFETQIKAHNMHREQPMPPPQAWGPPPPSPWGHPPPNLPPGGPGYVGNPHYMPPRPQENYYPPPDVPPVEKQPHYGISSYGRDAPPSAPPGNQNQAHGSSQVTHSMQVPLSYADAVIGAAGASISYIRRHSGATISIQEGAPGEMTVEITGSASQVQTAQQLIKNFMAEASPQGPPAPGPHGQPVDTGYGSYPPYVEHPMGLLQVLQLQRLTTVEVMVLHHTRRAMDTNPEQELASDLGKEGYRYGFVC

SEQ ID NO: 11527 - protein, 468 aa, Zea mays subsp. mays
  peptide (1)..(468): Ceres Seq. ID no. 12344578
  misc_feature (141)..(192): Pfam Name: KH domain Pfam Description: KH domain
  misc_feature (1)..(413): Homolog of NCBI NO: 16924113 NR Description: putative RNA binding protein [Oryza sativa]
  misc_feature (1)..(417): Homolog of NCBI NO: 15229321 NR Description: KH domain protein; protein id: At3g04610.1, by cDNA: gi_17979248 [Arabidopsis thaliana]
  misc_feature (21)..(412): Homolog of NCBI NO: 37536904 NR Description: putative nucleic acid binding protein [Oryza
  misc_feature (244)..(394): Homolog of NCBI NO: 37534332 NR Description: unknown protein [Oryza sativa (japonica
  misc_feature (40)..(176): Homolog of NCBI NO: 37534332 NR Description: unknown protein [Oryza sativa (japonica
  misc_feature (176)..(304): Homolog of NCBI NO: 37534332 NR Description: unknown protein [Oryza sativa (japonica
  misc_feature (45)..(386): Homolog of NCBI NO: 15217969 NR Description: KH domain protein; protein id: At1g51580.1
  misc_feature (49)..(382): Homolog of NCBI NO: 14141168 NR Description: poly(rC)-binding protein 2, isoform a; alpha-CP2; binding protein 2; heterogenous nuclear ribonucleoprotein E2
  misc_feature (49)..(382): Homolog of NCBI NO: 6707736 NR Description: Poly(rC)-binding protein 2 (Alpha-CP2) (hnRNP-E2)
  misc_feature (237)..(393): Homolog of NCBI NO: 28317389 NR Description: TPA: hnRNP-E2 b [Xenopus laevis]
MNNEDVGGQNKVDQATPTEHGEEAGVKQHDATVPDDKKWPGWPGESVFRILVPTTKVGAVIGRKGDFIKKMCEESRARIKVLEGPPAVPERAVMISAKDEPDTELPPAVDGLLRVHRRITDGLETETDQPQRATVNTGPTRLLVPASQAGSLIGKQGATIKSIQDASKCVLRIVENVPPVALNDDRVVEIQGEPHDSHKAVELIASHLRKFLVDRSVLPLFETQIKAHNMHREQPMPPPQAWGPPPPSPWGHPPPNLPPGGPGYVGNPHYMPPRPQENYYPPPDVPPVEKQPHYGISSYGRDAPPSAPPGNQNQAHGSSQVTHSMQVPLSYADAVIGAAGASISYIRRHSGATISIQEGAPGEMTVEITGSASQVQTAQQLIKNFMAEASPQGPPAPGPHGQPVDTGYGSYPPYVEHPMGLLQVLQLQRLTTVEVMVLHHTRRAMDTNPEQELASDLGKEGYRYGFVC

SEQ ID NO: 11528 - DNA, 619 bp, Zea mays subsp. mays
  misc_feature (1)..(619): Ceres Seq. ID no. 13499146
  misc_feature: MA Experiment ID: 108543 Result: Up-regulated in Transcription
  misc_feature: MA Experiment ID: 108544 Result: Up-regulated in Transcription
aagcacccaaatcgacgaattcttcccccctctccgatctcgacgcgcaccgatgcgggcgatgtcgtcggcggttaatggtatgctgcgggcacggctgcgcggggcagcgcgcgttcgcggcggcggcggcgagggggccgggcggtggacgaccccaggtcacgaggagcgccccaaggggtacctcttcaaccggccgccgccgcctccggggggaatctcgcaagtgggaggattgggagctgccctgctacgtgacctccttcctcaccgtcgtcatcctcggcgtcggcctcaacgcgaagcccgaccttacaatcgagacgtgggcgcaccagaaggcgctcgagcgcctccagcagcaggagctcgccgctgccgacacccaggccgagtgatccgcgcgtctcaggtcctctcgaactctcggctgcctctgatttggttccaataagatggccacaatgtgcggtcctgaatgttctggacttctggtattgatggaacacgagctgaacactatgctgctgttttttctgttctgttttgaaatttgcccggtgatgatggcgaatgtcctgaatattctgaatattttgaaatgtttgactgttgt

SEQ ID NO: 11529 - protein, 151 aa, Zea mays subsp. mays
  peptide (1)..(151): Ceres Seq. ID no. 13499147
  misc_feature (33)..(72): Homolog of NCBI NO: 18410807 NR Description: expressed protein [Arabidopsis thaliana] unknown [Arabidopsis thaliana] >gi|22531245|gb|AAM97126.1| protein [Arabidopsis thaliana] >gi|24899847|gb|AAN65138.1|
  misc_feature (33)..(72): Homolog of NCBI NO: 7485503 NR Description: hypothetical protein F15B8.20 - Arabidopsis >gi|4678268|emb|CAB41176.1| putative protein [Arabidopsis
STQIDEFFPPLRSRRAPMRAMSSAVNGMLRARLRGAARVRGGGGEGAGRWTTPGHEERPKGYLFNRPPPPPGGISQVGGLGAALLRDLLPHRRHPRRRPQREARPYNRDVGAPEGARAPPAAGARRCRHPGRVIRASQVLSNSRLPLIWFQ

SEQ ID NO: 11530 - protein, 134 aa, Zea mays subsp. mays
  peptide (1)..(134): Ceres Seq. ID no. 13499148
  misc_feature (16)..(55): Homolog of NCBI NO: 18410807 NR Description: expressed protein [Arabidopsis thaliana] unknown [Arabidopsis thaliana] >gi|22531245|gb|AAM97126.1| protein [Arabidopsis thaliana] >gi|24899847|gb|AAN65138.1|
  misc_feature (16)..(55): Homolog of NCBI NO: 7485503 NR Description: hypothetical protein F15B8.20 - Arabidopsis >gi|4678268|emb|CAB41176.1| putative protein [Arabidopsis
MRAMSSAVNGMLRARLRGAARVRGGGGEGAGRWTTPGHEERPKGYLFNRPPPPPGGISQVGGLGAALLRDLLPHRRHPRRRPQREARPYNRDVGAPEGARAPPAAGARRCRHPGRVIRASQVLSNSRLPLIWFQ

SEQ ID NO: 11531 - protein, 132 aa, Zea mays subsp. mays
  peptide (1)..(132): Ceres Seq. ID no. 13499149
  misc_feature (72)..(127): Homolog of NCBI NO: 18410807 NR Description: expressed protein [Arabidopsis thaliana] unknown [Arabidopsis thaliana] >gi|22531245|gb|AAM97126.1| protein [Arabidopsis thaliana] >gi|24899847|gb|AAN65138.1|
  misc_feature (72)..(127): Homolog of NCBI NO: 7485503 NR Description: hypothetical protein F15B8.20 - Arabidopsis >gi|4678268|emb|CAB41176.1| putative protein [Arabidopsis
  misc_feature (40)..(132): Homolog of NCBI NO: 15227917 NR Description: expressed protein [Arabidopsis thaliana]
  misc_feature (6)..(130): Homolog of NCBI NO: 9858777 NR Description: BAC19.9 [Lycopersicon esculentum]
  misc_feature (29)..(132): Homolog of NCBI NO: 29150398 NR Description: hypothetical protein [Oryza sativa (japonica
APKSTNSSPLSDLDAHRCGRCRRRLMVCCGHGCAGQRAFAAAAARGPGGGRPQVTRSAPRGTSSTGRRRLRGESRKWEDWELPCYVTSFLTVVILGVGLNAKPDLTIETWAHQKALERLQQQELAAADTQAE

SEQ ID NO: 11532 - protein, 107 aa, Zea mays subsp. mays
  peptide (1)..(107): Ceres Seq. ID no. 13499150
  misc_feature (47)..(102): Homolog of NCBI NO: 18410807 NR Description: expressed protein [Arabidopsis thaliana] unknown [Arabidopsis thaliana] >gi|22531245|gb|AAM97126.1| protein [Arabidopsis thaliana] >gi|24899847|gb|AAN65138.1|
  misc_feature (47)..(102): Homolog of NCBI NO: 7485503 NR Description: hypothetical protein F15B8.20 - Arabidopsis >gi|4678268|emb|CAB41176.1| putative protein [Arabidopsis
  misc_feature (15)..(107): Homolog of NCBI NO: 15227917 NR Description: expressed protein [Arabidopsis thaliana]
  misc_feature (1)..(105): Homolog of NCBI NO: 9858777 NR Description: BAC19.9 [Lycopersicon esculentum]
  misc_feature (4)..(107): Homolog of NCBI NO: 29150398 NR Description: hypothetical protein [Oryza sativa (japonica
MVCCGHGCAGQRAFAAAAARGPGGGRPQVTRSAPRGTSSTGRRRLRGESRKWEDWELPCYVTSFLTVVILGVGLNAKPDLTIETWAHQKALERLQQQELAAADTQAE

SEQ ID NO: 11533 - DNA, 1426 bp, Zea mays subsp. mays
  misc_feature (1)..(1426): Ceres Seq. ID no. 12414746
  misc_feature: MA Experiment ID: 108559 Result: Up-regulated in Transcription
  misc_feature: MA Experiment 108559 PARAMETER Experiment Name: Zm_5mM_NO_P Parameter: Age (day) Value: 8
  misc_feature: MA Experiment 108559 PARAMETER Experiment Name: Zm_5mM_NO_P Parameter: Organism Value: Zea mays
  misc_feature: MA Experiment 108559 PARAMETER Experiment Name: Zm_5mM_NO_P Parameter: Plant Line Value: 35A19
  misc_feature: MA Experiment 108559 PARAMETER Experiment Name: Zm_5mM_NO_P Parameter: Timepoint (hr) Value: 12
  misc_feature: MA Experiment 108559 PARAMETER Experiment Name: Zm_5mM_NO_P Parameter: Tissue Value: Aerial
  misc_feature: MA Experiment 108559 PARAMETER Experiment Name: Zm_5mM_NO_P Parameter: Treatment Value: 5mM NO vs. No Treatment
atgacctatgcgtgtcactgcaggcggacctacaagctctttggaggagtagagacttccagccatcccttctacgctctccccgttcccgtgtcgtcctcccgacaaagagggagccgctagggtttagcggcttccgcttctgggcgagggcttacccgcgagggacggcgcgacgcggcggcacttgagctagggtttccctccgatcccgttcctttcccggcgaggcgatggacgaggcggcgattgacgacttgatccggcggctcctcgaggcccgcggcgggcgcaccccgcgcaacgcgcaggtgactgacgccgagatccggcgcctctgcgccaccgccaaggacgttttcctgctcccagcccaacctcctggagctcgaggcccccattaagatatgcggggatgtccatggccagtattcagacctccttcgattatttgagtatggtggctatccaccagatgcaaattatctgttcctgggtgactatgttgatcgggggaaacagagcatagaaacaatatgccttctcttggcgtacaagataaagtacccagaaaacttctttcttctcaggggaaaccatgaatgtgcctcgatcaaccggatatatgggttttttgatgagtgtaagaggagattcaatgtgcgtatctggaagatattcactgagtgttttaactgcctcccagtggctgcacttattgacgataagatcttttgcatgcatggggggttgtctcctgagctaaagaacatggatcaaatacgtaacatttctcctcctgtggatgttcctgacgttggtcttctatgtgatctgttatggtcggaccctgataaagagattgttgggtggggtgataatgacaggggtgtttcctacacctttggagctgacatagttgctgagtttcttcagaaacatgacctagatttgatctgcagggctcaccaggtcgtagaggatggctatgagtttttcgcaaatcgccagcttgtaacaatattctcagcaccgaactactgtggagagtttgacaatgctggtgcactgatgagcatcgatgactccctagtatgctcgttccagatactcaagccttctgaaaagaaaagaaaagcaggagctgagaacatgccaaagcccggtacacctcccaggaagataaaaataagtgttacccgcatttagccagattctcgttatcaaactggatttgagaagttgtgattaaatgctccccaaacttgttatggtaggttttttggtgagcttaacacggtgttaaactgtggagtgtggaccaccgtgcttatgtcttgctgatctgaagtcatgcaaatgtatcctggcgttttgccaaacaaaaaagatcatgctaacagaaacttctggattttttttattg

SEQ ID NO: 11534 - protein, 156 aa, Zea mays subsp. mays
  peptide (1)..(156): Ceres Seq. ID no. 12414747
  misc_feature (1)..(81): Pfam Name: Calcineurin-like phosphoesterase Pfam Description: Calcineurin-like phosphoesterase
  misc_feature (1)..(149): Homolog of NCBI NO: 7435131 NR Description: phosphoprotein phosphatase (EC 3.1.3.16) PP1BG - thaliana >gi|5596470|emb|CAB51408.1| protein phosphatase type 1 [Arabidopsis thaliana] >gi|7267823|emb|CAB81225.1| protein
  misc_feature (1)..(148): Homolog of NCBI NO: 1346763 NR Description: SERINE/THREONINE PROTEIN PHOSPHATASE PP1
  misc_feature (1)..(148): Homolog of NCBI NO: 18413493 NR Description: protein phosphatase type 1 (AtPP1bg); protein id: supported by cDNA: 20905., supported by cDNA: gi_19699315 thaliana] >gi|19699316|gb|AAL91268.1| AT4g11240/F8L21_30
  misc_feature (1)..(148): Homolog of NCBI NO: 15222607 NR Description: phosphoprotein phosphatase-type 1 catalytic protein id: At1g64040.1, supported by cDNA: gi_166798, supported cDNA: gi_19698982 [Arabidopsis thaliana]
  misc_feature (1)..(148): Homolog of NCBI NO: 1346760 NR Description: Serine/threonine protein phosphatase PP1 isozyme >gi|829255|emb|CAA86339.1| protein phosphatase type 1 thaliana] >gi|3153203|gb|AAC39460.1| serine/threonine protein
  misc_feature (1)..(151): Homolog of NCBI NO: 25752372 NR Description: phosphoprotein phosphatase (EC 3.1.3.16) 1
  misc_feature (1)..(147): Homolog of NCBI NO: 1346753 NR Description: SERINE/THREONINE PROTEIN PHOSPHATASE PP1 ISOZYME >gi|2654373|emb|CAA82264.1| protein phosphatase 1 [Acetabularia
  misc_feature (1)..(147): Homolog of NCBI NO: 1346750 NR Description: SERINE/THREONINE PROTEIN PHOSPHATASE PP1 ISOZYME >gi|2654372|emb|CAA82263.1| protein phosphatase 1 [Acetabularia
  misc_feature (1)..(147): Homolog of NCBI NO: 4506005 NR Description: protein phosphatase 1, catalytic subunit, beta [Homo sapiens] >gi|6981388|ref|NP_037197.1| protein phosphatase catalytic subunit, beta isoform [Rattus norvegicus]
  misc_feature (1)..(147): Homolog of NCBI NO: 27884151 NR Description: SI:zC214P16.4 (novel protein similar to human phosphatase 1, catalytic subunit, beta isoform (PPP1CB)) [Danio
MHGGLSPELKNMDQIRNISPPVDVPDVGLLCDLLWSDPDKEIVGWGDNDRGVSYTFGADIVAEFLQKHDLDLICRAHQVVEDGYEFFANRQLVTIFSAPNYCGEFDNAGALMSIDDSLVCSFQILKPSEKKRKAGAENMPKPGTPPRKIKISVTRI

SEQ ID NO: 11535 - protein, 145 aa, Zea mays subsp. mays
  peptide (1)..(145): Ceres Seq. ID no. 12414748
  misc_feature (1)..(70): Pfam Name: Calcineurin-like phosphoesterase Pfam Description: Calcineurin-like phosphoesterase
  misc_feature (1)..(137): Homolog of NCBI NO: 15222607 NR Description: phosphoprotein phosphatase-type 1 catalytic protein id: At1g64040.1, supported by cDNA: gi_166798, supported cDNA: gi_19698982 [Arabidopsis thaliana]
  misc_feature (1)..(137): Homolog of NCBI NO: 1346760 NR Description: Serine/threonine protein phosphatase PP1 isozyme >gi|829255|emb|CAA86339.1| protein phosphatase type 1 thaliana] >gi|3153203|gb|AAC39460.1| serine/threonine protein
  misc_feature (1)..(140): Homolog of NCBI NO: 25752372 NR Description: phosphoprotein phosphatase (EC 3.1.3.16) 1
  misc_feature (1)..(136): Homolog of NCBI NO: 1346753 NR Description: SERINE/THREONINE PROTEIN PHOSPHATASE PP1 ISOZYME >gi|2654373|emb|CAA82264.1| protein phosphatase 1 [Acetabularia
  misc_feature (1)..(137): Homolog of NCBI NO: 1346763 NR Description: SERINE/THREONINE PROTEIN PHOSPHATASE PP1
  misc_feature (1)..(137): Homolog of NCBI NO: 18413493 NR Description: protein phosphatase type 1 (AtPP1bg); protein id: supported by cDNA: 20905., supported by cDNA: gi_19699315 thaliana] >gi|19699316|gb|AAL91268.1| AT4g11240/F8L21_30
  misc_feature (1)..(138): Homolog of NCBI NO: 7435131 NR Description: phosphoprotein phosphatase (EC 3.1.3.16) PP1BG - thaliana >gi|5596470|emb|CAB51408.1| protein phosphatase type 1 [Arabidopsis thaliana] >gi|7267823|emb|CAB81225.1| protein
  misc_feature (1)..(136): Homolog of NCBI NO: 1346750 NR Description: SERINE/THREONINE PROTEIN PHOSPHATASE PP1 ISOZYME >gi|2654372|emb|CAA82263.1| protein phosphatase 1 [Acetabularia
  misc_feature (1)..(136): Homolog of NCBI NO: 4506005 NR Description: protein phosphatase 1, catalytic subunit, beta [Homo sapiens] >gi|6981388|ref|NP_037197.1| protein phosphatase catalytic subunit, beta isoform [Rattus norvegicus]
  misc_feature (1)..(136): Homolog of NCBI NO: 27884151 NR Description: SI:zC214P16.4 (novel protein similar to human phosphatase 1, catalytic subunit, beta isoform (PPP1CB)) [Danio
MDQIRNISPPVDVPDVGLLCDLLWSDPDKEIVGWGDNDRGVSYTFGADIVAEFLQKHDLDLICRAHQVVEDGYEFFANRQLVTIFSAPNYCGEFDNAGALMSIDDSLVCSFQILKPSEKKRKAGAENMPKPGTPPRKIKISVTRI

SEQ ID NO: 11536 - DNA, 919 bp, Zea mays subsp. mays
  misc_feature (1)..(919): Ceres Seq. ID no. 12351094
  misc_feature: MA Experiment ID: 108544 Result: Down-regulated in Transcription
  misc_feature: MA Experiment ID: 20000477 Result: Down-regulated in Transcription
  misc_feature: MA Experiment 20000477 PARAMETER Experiment Name: Zm_5mM_SA_P Parameter: Age (day) Value: 10
  misc_feature: MA Experiment 20000477 PARAMETER Experiment Name: Zm_5mM_SA_P Parameter: Organism Value: Zea mays
  misc_feature: MA Experiment 20000477 PARAMETER Experiment Name: Zm_5mM_SA_P Parameter: Plant Line Value: 35A19
  misc_feature: MA Experiment 20000477 PARAMETER Experiment Name: Zm_5mM_SA_P Parameter: Timepoint (hr) Value: 48
  misc_feature: MA Experiment 20000477 PARAMETER Experiment Name: Zm_5mM_SA_P Parameter: Tissue Value: Aerial
  misc_feature: MA Experiment 20000477 PARAMETER Experiment Name: Zm_5mM_SA_P Parameter: Treatment Value: 5mM SA vs. No Treatment
  misc_feature: MA Experiment ID: 20000478 Result: Down-regulated in Transcription
  misc_feature: MA Experiment 20000478 PARAMETER Experiment Name: Zm_5mM_SA_P Parameter: Age (day) Value: 11
  misc_feature: MA Experiment 20000478 PARAMETER Experiment Name: Zm_5mM_SA_P Parameter: Organism Value: Zea mays
  misc_feature: MA Experiment 20000478 PARAMETER Experiment Name: Zm_5mM_SA_P Parameter: Plant Line Value: 35A19
  misc_feature: MA Experiment 20000478 PARAMETER Experiment Name: Zm_5mM_SA_P Parameter: Timepoint (hr) Value: 72
  misc_feature: MA Experiment 20000478 PARAMETER Experiment Name: Zm_5mM_SA_P Parameter: Tissue Value: Aerial
  misc_feature: MA Experiment 20000478 PARAMETER Experiment Name: Zm_5mM_SA_P Parameter: Treatment Value: 5mM SA vs. No Treatment
  misc_feature: MA Experiment ID: 20000479 Result: Down-regulated in Transcription
  misc_feature: MA Experiment 20000479 PARAMETER Experiment Name: Zm_Drought_P Parameter: Age (day) Value: 10
  misc_feature: MA Experiment 20000479 PARAMETER Experiment Name: Zm_Drought_P Parameter: Organism Value: Zea mays
  misc_feature: MA Experiment 20000479 PARAMETER Experiment Name: Zm_Drought_P Parameter: Plant Line Value: 35A19
  misc_feature: MA Experiment 20000479 PARAMETER Experiment Name: Zm_Drought_P Parameter: Timepoint (hr) Value: 48
  misc_feature: MA Experiment 20000479 PARAMETER Experiment Name: Zm_Drought_P Parameter: Tissue Value: Aerial
  misc_feature: MA Experiment 20000479 PARAMETER Experiment Name: Zm_Drought_P Parameter: Treatment Value: Drought vs. No Drought
gtgcactctctcctacgactcccacttcctctaccagcctagggcctaggctaccaccccagtgcgaaggaagtcagagctctccgcctccgccggcggggctcgatactgatgggtgtcttcgggacctcgcgtcctgcctccgtcaccctctgcgccttcctcacattcctcaacctcttcgccttccttctcgccgtcggcgccgagcgccgccgcagcaccgggaaggtggtgccggacgagtacgacgagcggtcctactgcctctacgacaccgacgcctccacggtctacggcgtttccgctttcttcgtgctgctgctccagcaggccattgtcaccgccgccacgcgttgcctttgcttcggccccgtgctctcctcccgcggctgcgccgtcaccgcattcgtcctctcctgggcaacgtttctcatcgcagaagcctgcctcataggaggatcggtgaggaacgcaaagcacaccaagtatctaggctactacacgaagcatgacctggtgtcgtgcgccaccctccgcaagggagtctttgcggccgccgctgcgatgatgctcgtcaacctcttggcgtcccttgtgtgctgctggagctactcgaaagccgcgacgggcgggttcatgaagcaccagaatgaggtcggagtgggcatgacggattacggccttgacaggggcgtttctgggccctgagtgagttggctggaaccttgttggcgtctgtgctgcagtaggcgtctcacctgtggtgtaatattatcgtcgaaatgtatgtgagtgaagttccgttctttctctacggtcggtgcgaatggtataccagaactgtgctctggaatgtgctagtcagtgatgatgttgtatggttcgtgattttatatctgtgaaaaaatgtggtagc

SEQ ID NO: 11537 - protein, 199 aa, Zea mays subsp. mays
  peptide (1)..(199): Ceres Seq. ID no. 12351095
  misc_feature (11)..(188): Homolog of NCBI NO: 18408976 NR Description: expressed protein; protein id: At1g68220.1, by cDNA: 2381., supported by cDNA: gi_14596226, supported by
  misc_feature (10)..(190): Homolog of NCBI NO: 38016521 NR Description: fiber protein Fb34 [Gossypium barbadense]
  misc_feature (10)..(186): Homolog of NCBI NO: 34394069 NR Description: unknown protein [Oryza sativa (japonica
  misc_feature (10)..(174): Homolog of NCBI NO: 18404242 NR Description: expressed protein; protein id: At1g52910.1, by cDNA: 21921. [Arabidopsis thaliana] >gi|25405613|pir||D96570
  misc_feature (10)..(171): Homolog of NCBI NO: 18400781 NR Description: expressed protein; protein id: At3g15480.1, by cDNA: 22328., supported by cDNA: gi_15982922, supported by gi_19699225 [Arabidopsis thaliana] >gi|7021733|gb|AAF35414.1|
  misc_feature (10)..(190): Homolog of NCBI NO: 18391509 NR Description: expressed protein; protein id: At1g13380.1, by cDNA: 5232. [Arabidopsis thaliana] Unknown Protein [Arabidopsis thaliana]
  misc_feature (10)..(172): Homolog of NCBI NO: 18416991 NR Description: Expressed protein; protein id: At4g27435.1, by cDNA: gi_15809977, supported by cDNA: gi_17981656 [Arabidopsis >gi|15809978|gb|AAL06916.1| At4g27438 [Arabidopsis thaliana]
  misc_feature (10)..(188): Homolog of NCBI NO: 38344206 NR Description: OSJNBa0064G10.22 [Oryza sativa (japonica
  misc_feature (10)..(171): Homolog of NCBI NO: 18407003 NR Description: Expressed protein; protein id: At1g61065.1, by cDNA: 25888., supported by cDNA: gi_16930460, supported by gi_19310518 [Arabidopsis thaliana]
  misc_feature (10)..(161): Homolog of NCBI NO: 21554630 NR Description: unknown [Arabidopsis thaliana]
MGVFGTSRPASVTLCAFLTFLNLFAFLLAVGAERRRSTGKVVPDEYDERSYCLYDTDASTVYGVSAFFVLLLQQAIVTAATRCLCFGPVLSSRGCAVTAFVLSWATFLIAEACLIGGSVRNAKHTKYLGYYTKHDLVSCATLRKGVFAAAAAMMLVNLLASLVCCWSYSKAATGGFMKHQNEVGVGMTDYGLDRGVSGP

SEQ ID NO: 11538 - protein, 170 aa, Zea mays subsp. mays
  peptide (1)..(170): Ceres Seq. ID no. 12351096
ALSPTTPTSSTSLGPRLPPQCEGSQSSPPPPAGLDTDGCLRDLASCLRHPLRLPHIPQPLRLPSRRRRRAPPQHREGGAGRVRRAVLLPLRHRRLHGLRRFRFLRAAAPAGHCHRRHALPLLRPRALLPRLRRHRIRPLLGNVSHRRSLPHRRIGEERKAHQVSRLLHEA

SEQ ID NO: 11539 - DNA, 587 bp, Zea mays subsp. mays
  misc_feature (1)..(587): Ceres Seq. ID no. 12353408
  misc_feature: MA Experiment ID: 108530 Result: Down-regulated in Transcription
  misc_feature: MA Experiment 108530 PARAMETER Experiment Name: Zm_Imbibed_Seeds_P Parameter: Age (day) Value: 6 vs. 2
  misc_feature: MA Experiment 108530 PARAMETER Experiment Name: Zm_Imbibed_Seeds_P Parameter: Organism Value: Zea mays
  misc_feature: MA Experiment 108530 PARAMETER Experiment Name: Zm_Imbibed_Seeds_P Parameter: Plant Line Value: 35A19
  misc_feature: MA Experiment 108530 PARAMETER Experiment Name: Zm_Imbibed_Seeds_P Parameter: Tissue Value: Aerial vs. Embryo
  misc_feature: MA Experiment ID: 108535 Result: Up-regulated in Transcription
  misc_feature: MA Experiment 108535 PARAMETER Experiment Name: Zm_Meristem_P Parameter: Age (day) Value: 8
  misc_feature: MA Experiment 108535 PARAMETER Experiment Name: Zm_Meristem_P Parameter: Organism Value: Zea mays
  misc_feature: MA Experiment 108535 PARAMETER Experiment Name: Zm_Meristem_P Parameter: Plant Line Value: 35A19
  misc_feature: MA Experiment 108535 PARAMETER Experiment Name: Zm_Meristem_P Parameter: Tissue Value: Root Meristem vs. Above Root Meristem
  misc_feature: MA Experiment ID: 108544 Result: Down-regulated in Transcription
  misc_feature: MA Experiment ID: 108556 Result: Down-regulated in Transcription
  misc_feature: MA Experiment 108556 PARAMETER Experiment Name: Zm_Drought_P Parameter: Age (day) Value: 9
  misc_feature: MA Experiment 108556 PARAMETER Experiment Name: Zm_Drought_P Parameter: Organism Value: Zea mays
  misc_feature: MA Experiment 108556 PARAMETER Experiment Name: Zm_Drought_P Parameter: Plant Line Value: 35A19
  misc_feature: MA Experiment 108556 PARAMETER Experiment Name: Zm_Drought_P Parameter: Timepoint (hr) Value: 24
  misc_feature: MA Experiment 108556 PARAMETER Experiment Name: Zm_Drought_P Parameter: Tissue Value: Aerial
  misc_feature: MA Experiment 108556 PARAMETER Experiment Name: Zm_Drought_P Parameter: Treatment Value: Drought vs. No Drought
  misc_feature: MA Experiment ID: 108597 Result: Down-regulated in Transcription
  misc_feature: MA Experiment 108597 PARAMETER Experiment Name: Zm_100uM_ABA_P Parameter: Age (day) Value: 9
  misc_feature: MA Experiment 108597 PARAMETER Experiment Name: Zm_100uM_ABA_P Parameter: Organism Value: Zea mays
  misc_feature: MA Experiment 108597 PARAMETER Experiment Name: Zm_100uM_ABA_P Parameter: Plant Line Value: 35A19
  misc_feature: MA Experiment 108597 PARAMETER Experiment Name: Zm_100uM_ABA_P Parameter: Timepoint (hr) Value: 24
  misc_feature: MA Experiment 108597 PARAMETER Experiment Name: Zm_100uM_ABA_P Parameter: Tissue Value: Aerial
  misc_feature: MA Experiment 108597 PARAMETER Experiment Name: Zm_100uM_ABA_P Parameter: Treatment Value: 100uM ABA vs. No Treatment
  misc_feature: MA Experiment ID: 20000487 Result: Up-regulated in Transcription
  misc_feature: MA Experiment 20000487 PARAMETER Experiment Name: Zm_50mM_NH4NO3_L_to_H_P Parameter: Organism Value: Zea mays
  misc_feature: MA Experiment 20000487 PARAMETER Experiment Name: Zm_50mM_NH4NO3_L_to_H_P Parameter: Timepoint (hr) Value: 4
  misc_feature: MA Experiment 20000487 PARAMETER Experiment Name: Zm_50mM_NH4NO3_L_to_H_P Parameter: Tissue Value: Leaves
  misc_feature: MA Experiment 20000487 PARAMETER Experiment Name: Zm_50mM_NH4NO3_L_to_H_P Parameter: Treatment Value: 50mM NH4NO3 vs. 100mM Mannitol
  misc_feature: MA Experiment ID: 20000488 Result: Up-regulated in Transcription
  misc_feature: MA Experiment 20000488 PARAMETER Experiment Name: Zm_50mM_NH4NO3_L_to_H_P Parameter: Organism Value: Zea mays
  misc_feature: MA Experiment 20000488 PARAMETER Experiment Name: Zm_50mM_NH4NO3_L_to_H_P Parameter: Timepoint (hr) Value: 8
  misc_feature: MA Experiment 20000488 PARAMETER Experiment Name: Zm_50mM_NH4NO3_L_to_H_P Parameter: Tissue Value: Leaves
  misc_feature: MA Experiment 20000488 PARAMETER Experiment Name: Zm_50mM_NH4NO3_L_to_H_P Parameter: Treatment Value: 50mM NH4NO3 vs. 100mM Mannitol
  misc_feature: MA Experiment ID: 20000492 Result: Up-regulated in Transcription
  misc_feature: MA Experiment 20000492 PARAMETER Experiment Name: Zm_Hybrid_Seed_Dev_P Parameter: DAP Value: 12
  misc_feature: MA Experiment 20000492 PARAMETER Experiment Name: Zm_Hybrid_Seed_Dev_P Parameter: Organism Value: Zea mays
  misc_feature: MA Experiment 20000492 PARAMETER Experiment Name: Zm_Hybrid_Seed_Dev_P Parameter: Plant Line Value: 35A19
  misc_feature: MA Experiment 20000492 PARAMETER Experiment Name: Zm_Hybrid_Seed_Dev_P Parameter: Tissue Value: Fert Kernel vs. Unfert Floret
  misc_feature: MA Experiment ID: 20001612 Result: Up-regulated in Transcription
  misc_feature: MA Experiment 20001612 PARAMETER Experiment Name: Zm_50ppm_KNO3_L-to-H_P Parameter: Age (day) Value: 19
  misc_feature: MA Experiment 20001612 PARAMETER Experiment Name: Zm_50ppm_KNO3_L-to-H_P Parameter: Organism Value: Zea mays
  misc_feature: MA Experiment 20001612 PARAMETER Experiment Name: Zm_50ppm_KNO3_L-to-H_P Parameter: Plant Line Value: 35A19
  misc_feature: MA Experiment 20001612 PARAMETER Experiment Name: Zm_50ppm_KNO3_L-to-H_P Parameter: Timepoint (hr) Value: 8
  misc_feature: MA Experiment 20001612 PARAMETER Experiment Name: Zm_50ppm_KNO3_L-to-H_P Parameter: Tissue Value: Roots
  misc_feature: MA Experiment 20001612 PARAMETER Experiment Name: Zm_50ppm_KNO3_L-to-H_P Parameter: Treatment Value: 50ppm KNO3 vs. 50ppm KCl
aatagtttctctcctgccacttttgcgagcttacttcacgcacgccgccgcagccgccgccgctacagcccgcacctcgcttcctctcccgtcgccgagatgacgaagcgaaccaagaaggccggaattgttggcaaatatggaaccaggtatggtgctagcttgcgtaagcaaatcaagaagatggaggtatctcagcactccaagtatttctgtgagttctgtgggaagtttgctgtgaagaggaaagcggttgggatttggggatgcaaggactgtgggaaggtcaaggccggtggtgcttataccatgaacactgctagtgcggtcactgtcaggagcacgatccgtcgcttgagggagcagactgaagcatgatccgtcgcttgtcaggcatactggggtccactatattggctgtttagccgagacagtactccagcatttttgggttatgctctaggatctctaaaagttgggtgctaagatttctacttgtttaccgttgtgaaaatttcacaagtgatatctgatcctattactatcttgatgacgtcaaatttgcttctggtttctaccctttggtc

SEQ ID NO: 11540 - protein, 125 aa, Zea mays subsp. mays
  peptide (1)..(125): Ceres Seq. ID no. 12353409
  misc_feature (35)..(125): Homolog of NCBI NO: 34911166 NR Description: putative 60S ribosomal protein L37a [Oryza sativa
  misc_feature (34)..(124): Homolog of NCBI NO: 6831607 NR Description: 60S ribosomal protein L37a
  misc_feature (34)..(125): Homolog of NCBI NO: 6831602 NR Description: 60S RIBOSOMAL PROTEIN L37A
  misc_feature (34)..(125): Homolog of NCBI NO: 15228411 NR Description: putative 60S ribosomal protein L37a; protein id: [Arabidopsis thaliana] >gi|20139844|sp|Q9SRK6|R37A_ARATH 60S protein L37a >gi|6016699|gb|AAF01526.1|AC009991_22 putative 60S
  misc_feature (34)..(124): Homolog of NCBI NO: 18411538 NR Description: Expressed protein; protein id: At3g60245.1, by cDNA: 42545., supported by cDNA: gi_19347787 [Arabidopsis >gi|19347788|gb|AAL86345.1| unknown protein [Arabidopsis
  misc_feature (34)..(124): Homolog of NCBI NO: 1173045 NR Description: 60S RIBOSOMAL PROTEIN L37A >gi|421866|pir||S34661
  misc_feature (39)..(124): Homolog of NCBI NO: 11358898 NR Description: translation initiation factor eIF-4 gamma homolog
  misc_feature (34)..(125): Homolog of NCBI NO: 6093889 NR Description: 60S RIBOSOMAL PROTEIN L37A
  misc_feature (34)..(121): Homolog of NCBI NO: 7441206 NR Description: ribosomal protein L37a [similarity] - slime mold
  misc_feature (34)..(122): Homolog of NCBI NO: 33637090 NR Description: N1 [Toxoplasma gondii]
NSFSPATFASLLHARRRSRRRYSPHLASSPVAEMTKRTKKAGIVGKYGTRYGASLRKQIKKMEVSQHSKYFCEFCGKFAVKRKAVGIWGCKDCGKVKAGGAYTMNTASAVTVRSTIRRLREQTEA

SEQ ID NO: 11541 - protein, 92 aa, Zea mays subsp. mays
  peptide (1)..(92): Ceres Seq. ID no. 12353410
  misc_feature (2)..(92): Homolog of NCBI NO: 34911166 NR Description: putative 60S ribosomal protein L37a [Oryza sativa
  misc_feature (1)..(91): Homolog of NCBI NO: 6831607 NR Description: 60S ribosomal protein L37a
  misc_feature (1)..(92): Homolog of NCBI NO: 6831602 NR Description: 60S RIBOSOMAL PROTEIN L37A
  misc_feature (1)..(92): Homolog of NCBI NO: 15228411 NR Description: putative 60S ribosomal protein L37a; protein id: [Arabidopsis thaliana] >gi|20139844|sp|Q9SRK6|R37A_ARATH 60S protein L37a >gi|6016699|gb|AAF01526.1|AC009991_22 putative 60S
  misc_feature (1)..(91): Homolog of NCBI NO: 18411538 NR Description: Expressed protein; protein id: At3g60245.1, by cDNA: 42545., supported by cDNA: gi_19347787 [Arabidopsis >gi|19347788|gb|AAL86345.1| unknown protein [Arabidopsis
  misc_feature (1)..(91): Homolog of NCBI NO: 1173045 NR Description: 60S RIBOSOMAL PROTEIN L37A >gi|421866|pir||S34661
  misc_feature (6)..(91): Homolog of NCBI NO: 11358898 NR Description: translation initiation factor eIF-4 gamma homolog
  misc_feature (1)..(92): Homolog of NCBI NO: 6093889 NR Description: 60S RIBOSOMAL PROTEIN L37A
  misc_feature (1)..(88): Homolog of NCBI NO: 7441206 NR Description: ribosomal protein L37a [similarity] - slime mold
  misc_feature (1)..(89): Homolog of NCBI NO: 33637090 NR Description: N1 [Toxoplasma gondii]
MTKRTKKAGIVGKYGTRYGASLRKQIKKMEVSQHSKYFCEFCGKFAVKRKAVGIWGCKDCGKVKAGGAYTMNTASAVTVRSTIRRLREQTEA

SEQ ID NO: 11542 - protein, 64 aa, Zea mays subsp. mays
  peptide (1)..(64): Ceres Seq. ID no. 12353411
  misc_feature (1)..(64): Homolog of NCBI NO: 34911166 NR Description: putative 60S ribosomal protein L37a [Oryza sativa
  misc_feature (1)..(63): Homolog of NCBI NO: 6831607 NR Description: 60S ribosomal protein L37a
  misc_feature (1)..(64): Homolog of NCBI NO: 6831602 NR Description: 60S RIBOSOMAL PROTEIN L37A
  misc_feature (1)..(64): Homolog of NCBI NO: 15228411 NR Description: putative 60S ribosomal protein L37a; protein id: [Arabidopsis thaliana] >gi|20139844|sp|Q9SRK6|R37A_ARATH 60S protein L37a >gi|6016699|gb|AAF01526.1|AC009991_22 putative 60S
  misc_feature (1)..(63): Homolog of NCBI NO: 18411538 NR Description: Expressed protein; protein id: At3g60245.1, by cDNA: 42545., supported by cDNA: gi_19347787 [Arabidopsis >gi|19347788|gb|AAL86345.1| unknown protein [Arabidopsis
  misc_feature (1)..(63): Homolog of NCBI NO: 1173045 NR Description: 60S RIBOSOMAL PROTEIN L37A >gi|421866|pir||S34661
  misc_feature (1)..(63): Homolog of NCBI NO: 11358898 NR Description: translation initiation factor eIF-4 gamma homolog
  misc_feature (1)..(64): Homolog of NCBI NO: 6093889 NR Description: 60S RIBOSOMAL PROTEIN L37A
  misc_feature (1)..(60): Homolog of NCBI NO: 7441206 NR Description: ribosomal protein L37a [similarity] - slime mold
  misc_feature (1)..(61): Homolog of NCBI NO: 33637090 NR Description: N1 [Toxoplasma gondii]
MEVSQHSKYFCEFCGKFAVKRKAVGIWGCKDCGKVKAGGAYTMNTASAVTVRSTIRRLREQTEA

SEQ ID NO: 11543 - DNA, 929 bp, Zea mays subsp. mays
  misc_feature (1)..(929): Ceres Seq. ID no. 12361987
  misc_feature: MA Experiment ID: 108545 Result: Up-regulated in Transcription
  misc_feature: MA Experiment 108545 PARAMETER Experiment Name: Zm_Imbibed_Seeds_P Parameter: Age (day) Value: 3 vs. 2
  misc_feature: MA Experiment 108545 PARAMETER Experiment Name: Zm_Imbibed_Seeds_P Parameter: Organism Value: Zea mays
  misc_feature: MA Experiment 108545 PARAMETER Experiment Name: Zm_Imbibed_Seeds_P Parameter: Plant Line Value: 35A19
  misc_feature: MA Experiment 108545 PARAMETER Experiment Name: Zm_Imbibed_Seeds_P Parameter: Tissue Value: Aerial vs. Embryo
  misc_feature: MA Experiment ID: 108546 Result: Down-regulated in Transcription
  misc_feature: MA Experiment 108546 PARAMETER Experiment Name: Zm_Imbibed_Seeds_P Parameter: Age (day) Value: 3 vs. 2
  misc_feature: MA Experiment 108546 PARAMETER Experiment Name: Zm_Imbibed_Seeds_P Parameter: Organism Value: Zea mays
  misc_feature: MA Experiment 108546 PARAMETER Experiment Name: Zm_Imbibed_Seeds_P Parameter: Plant Line Value: 35A19
  misc_feature: MA Experiment 108546 PARAMETER Experiment Name: Zm_Imbibed_Seeds_P Parameter: Tissue Value: Roots vs. Embryo
  misc_feature: MA Experiment ID: 108597 Result: Down-regulated in Transcription
  misc_feature: MA Experiment 108597 PARAMETER Experiment Name: Zm_100uM_ABA_P Parameter: Age (day) Value: 9
  misc_feature: MA Experiment 108597 PARAMETER Experiment Name: Zm_100uM_ABA_P Parameter: Organism Value: Zea mays
  misc_feature: MA Experiment 108597 PARAMETER Experiment Name: Zm_100uM_ABA_P Parameter: Plant Line Value: 35A19
  misc_feature: MA Experiment 108597 PARAMETER Experiment Name: Zm_100uM_ABA_P Parameter: Timepoint (hr) Value: 24
  misc_feature: MA Experiment 108597 PARAMETER Experiment Name: Zm_100uM_ABA_P Parameter: Tissue Value: Aerial
  misc_feature: MA Experiment 108597 PARAMETER Experiment Name: Zm_100uM_ABA_P Parameter: Treatment Value: 100uM ABA vs. No Treatment
  misc_feature: MA Experiment ID: 108687 Result: Down-regulated in Transcription
  misc_feature: MA Experiment 108687 PARAMETER Experiment Name: Zm_Embryos-Flowers__P Parameter: Tissue Value: Embryo vs. Aerial+
  misc_feature: MA Experiment ID: 20000478 Result: Down-regulated in Transcription
  misc_feature: MA Experiment 20000478 PARAMETER Experiment Name: Zm_5mM_SA_P Parameter: Age (day) Value: 11
  misc_feature: MA Experiment 20000478 PARAMETER Experiment Name: Zm_5mM_SA_P Parameter: Organism Value: Zea mays
  misc_feature: MA Experiment 20000478 PARAMETER Experiment Name: Zm_5mM_SA_P Parameter: Plant Line Value: 35A19
  misc_feature: MA Experiment 20000478 PARAMETER Experiment Name: Zm_5mM_SA_P Parameter: Timepoint (hr) Value: 72
  misc_feature: MA Experiment 20000478 PARAMETER Experiment Name: Zm_5mM_SA_P Parameter: Tissue Value: Aerial
  misc_feature: MA Experiment 20000478 PARAMETER Experiment Name: Zm_5mM_SA_P Parameter: Treatment Value: 5mM SA vs. No Treatment
  misc_feature: MA Experiment ID: 20000479 Result: Down-regulated in Transcription
  misc_feature: MA Experiment 20000479 PARAMETER Experiment Name: Zm_Drought_P Parameter: Age (day) Value: 10
  misc_feature: MA Experiment 20000479 PARAMETER Experiment Name: Zm_Drought_P Parameter: Organism Value: Zea mays
  misc_feature: MA Experiment 20000479 PARAMETER Experiment Name: Zm_Drought_P Parameter: Plant Line Value: 35A19
  misc_feature: MA Experiment 20000479 PARAMETER Experiment Name: Zm_Drought_P Parameter: Timepoint (hr) Value: 48
  misc_feature: MA Experiment 20000479 PARAMETER Experiment Name: Zm_Drought_P Parameter: Tissue Value: Aerial
  misc_feature: MA Experiment 20000479 PARAMETER Experiment Name: Zm_Drought_P Parameter: Treatment Value: Drought vs. No Drought
  misc_feature: MA Experiment ID: 20000487 Result: Down-regulated in Transcription
  misc_feature: MA Experiment 20000487 PARAMETER Experiment Name: Zm_50mM_NH4NO3_L_to_H_P Parameter: Organism Value: Zea mays
  misc_feature: MA Experiment 20000487 PARAMETER Experiment Name: Zm_50mM_NH4NO3_L_to_H_P Parameter: Timepoint (hr) Value: 4
  misc_feature: MA Experiment 20000487 PARAMETER Experiment Name: Zm_50mM_NH4NO3_L_to_H_P Parameter: Tissue Value: Leaves
  misc_feature: MA Experiment 20000487 PARAMETER Experiment Name: Zm_50mM_NH4NO3_L_to_H_P Parameter: Treatment Value: 50mM NH4NO3 vs. 100mM Mannitol
  misc_feature: MA Experiment ID: 20000632 Result: Down-regulated in Transcription
  misc_feature: MA Experiment 20000632 PARAMETER Experiment Name: Zm_Herbicide-Treatments_P Parameter: Timepoint (hr) Value: 4
  misc_feature: MA Experiment 20000632 PARAMETER Experiment Name: Zm_Herbicide-Treatments_P Parameter: Tissue Value: Aerial
  misc_feature: MA Experiment 20000632 PARAMETER Experiment Name: Zm_Herbicide-Treatments_P Parameter: Treatment Value: Glean vs. No Treatment
  misc_feature: MA Experiment ID: 20000633 Result: Down-regulated in Transcription
  misc_feature: MA Experiment 20000633 PARAMETER Experiment Name: Zm_Herbicide-Treatments_P Parameter: Timepoint (hr) Value: 4
  misc_feature: MA Experiment 20000633 PARAMETER Experiment Name: Zm_Herbicide-Treatments_P Parameter: Tissue Value: Aerial
  misc_feature: MA Experiment 20000633 PARAMETER Experiment Name: Zm_Herbicide-Treatments_P Parameter: Treatment Value: Trimec vs. No Treatment
gcacgagaccattacctagaacatcctaatcgaaaatgctcaaccgctacatgcacctctcgggccgcttccacatgcgcgaggtggagcgcaccgtgcagcgcctcatccgcgacggggtgatagtgcacgcgccggcgagcccgttccacggcttcgtctacgtcgccttccaggagcgcgccaccgccatcgcgcacggcaacacggcgcgcctcgtgggcgcgcgcggggccgggggacgccgctctcgcgcgcatctgcggcaccgtcgccgccgacgagaagcggcacgaggcggcgtacacccgcgtcgtgggcaagttcttcgaggccgacccggacgccgccgtgcgcgccatggcgtacatgatgcggcgccggatcgacatgcccactgtgctcatcaacgacggccgccacagcagcggcgacttctacgctcgcttcgtcgccatcgcgcagcaggccggcacgtacacggtttccgactaccgcgccattctcgagcacttcatacggcagtggggcgtcgaggaacttgcggcggggctcaccggcgaggggaggcgcgcgcgggactacctgtgcgcgctgccgcacaagataaagaggatggaagagaaggcccacgatagagcggtcaaagcacaaaagaaacccacacccatccccatcaactggatcttcgataggaccattcctgtcattctaccttagtgtttatctttttcgatctttgtttgggtatctatgctgttattgtaagctaattccatggaccttgatagcgtcgttcatgcctacgtgtcgatagcatcattagtgtcgttctacccttaatcctgttatgccacgttaggtaccatttttttccataagagaatatttacaaatttataatttgttggatcgaggtgatacagggg

SEQ ID NO: 11544 - protein, 200 aa, Zea mays subsp. mays
  peptide (1)..(200): Ceres Seq. ID no. 12361988
  misc_feature (1)..(68): Homolog of NCBI NO: 38637315 NR Description: putative Acyl-[acyl-carrier protein] desaturase,
  misc_feature (1)..(66): Homolog of NCBI NO: 30089750 NR Description: putative stearoyl-acyl-carrier protein desaturase
  misc_feature (1)..(66): Homolog of NCBI NO: 15232941 NR Description: putative stearoyl-acyl carrier protein protein id: At3g02610.1 [Arabidopsis thaliana]
  misc_feature (1)..(66): Homolog of NCBI NO: 34222062 NR Description: At3g02610 [Arabidopsis thaliana]
  misc_feature (1)..(66): Homolog of NCBI NO: 15237307 NR Description: stearoyl-acyl carrier protein desaturase; protein
  misc_feature (1)..(66): Homolog of NCBI NO: 15232942 NR Description: putative stearoyl-acyl carrier protein protein id: At3g02620.1 [Arabidopsis thaliana]
  misc_feature (1)..(66): Homolog of NCBI NO: 1304409 NR Description: myristyl-ACP desaturase
  misc_feature (1)..(66): Homolog of NCBI NO: 6983690 NR Description: AE9 stearoyl-ACP desaturase [Gossypium hirsutum]
  misc_feature (1)..(66): Homolog of NCBI NO: 3915031 NR Description: Acyl-[acyl-carrier protein] desaturase,
  misc_feature (1)..(66): Homolog of NCBI NO: 533086 NR Description: precursor delta-9-stearoyl-acyl carrier protein
MLNRYMHLSGRFHMREVERTVQRLIRDGVIVHAPASPFHGFVYVAFQERATAIAHGNTARLVGARGAGGRRSRAHLRHRRRRREAARGGVHPRRGQVLRGRPGRRRARHGVHDAAPDRHAHCAHQRRPPQQRRLLRSLRRHRAAGRHVHGFRLPRHSRALHTAVGRRGTCGGAHRRGEARAGLPVRAAAQDKEDGREGPR

SEQ ID NO: 11545 - protein, 195 aa, Zea mays subsp. mays
  peptide (1)..(195): Ceres Seq. ID no. 12361989
  misc_feature (1)..(63): Homolog of NCBI NO: 38637315 NR Description: putative Acyl-[acyl-carrier protein] desaturase,
  misc_feature (1)..(61): Homolog of NCBI NO: 30089750 NR Description: putative stearoyl-acyl-carrier protein desaturase
  misc_feature (1)..(61): Homolog of NCBI NO: 15232941 NR Description: putative stearoyl-acyl carrier protein protein id: At3g02610.1 [Arabidopsis thaliana]
  misc_feature (1)..(61): Homolog of NCBI NO: 34222062 NR Description: At3g02610 [Arabidopsis thaliana]
  misc_feature (1)..(61): Homolog of NCBI NO: 15237307 NR Description: stearoyl-acyl carrier protein desaturase; protein
  misc_feature (1)..(61): Homolog of NCBI NO: 15232942 NR Description: putative stearoyl-acyl carrier protein protein id: At3g02620.1 [Arabidopsis thaliana]
  misc_feature (1)..(61): Homolog of NCBI NO: 1304409 NR Description: myristyl-ACP desaturase
  misc_feature (1)..(61): Homolog of NCBI NO: 6983690 NR Description: AE9 stearoyl-ACP desaturase [Gossypium hirsutum]
  misc_feature (1)..(61): Homolog of NCBI NO: 3915031 NR Description: Acyl-[acyl-carrier protein] desaturase,
  misc_feature (1)..(61): Homolog of NCBI NO: 533086 NR Description: precursor delta-9-stearoyl-acyl carrier protein
MHLSGRFHMREVERTVQRLIRDGVIVHAPASPFHGFVYVAFQERATAIAHGNTARLVGARGAGGRRSRAHLRHRRRRREAARGGVHPRRGQVLRGRPGRRRARHGVHDAAPDRHAHCAHQRRPPQQRRLLRSLRRHRAAGRHVHGFRLPRHSRALHTAVGRRGTCGGAHRRGEARAGLPVRAAAQDKEDGREGPR

SEQ ID NO: 11546 - protein, 187 aa, Zea mays subsp. mays
  peptide (1)..(187): Ceres Seq. ID no. 12361990
  misc_feature (1)..(55): Homolog of NCBI NO: 38637315 NR Description: putative Acyl-[acyl-carrier protein] desaturase,
  misc_feature (1)..(53): Homolog of NCBI NO: 30089750 NR Description: putative stearoyl-acyl-carrier protein desaturase
  misc_feature (1)..(53): Homolog of NCBI NO: 15232941 NR Description: putative stearoyl-acyl carrier protein protein id: At3g02610.1 [Arabidopsis thaliana]
  misc_feature (1)..(53): Homolog of NCBI NO: 34222062 NR Description: At3g02610 [Arabidopsis thaliana]
  misc_feature (1)..(53): Homolog of NCBI NO: 15237307 NR Description: stearoyl-acyl carrier protein desaturase; protein
  misc_feature (1)..(53): Homolog of NCBI NO: 15232942 NR Description: putative stearoyl-acyl carrier protein protein id: At3g02620.1 [Arabidopsis thaliana]
  misc_feature (1)..(53): Homolog of NCBI NO: 1304409 NR Description: myristyl-ACP desaturase
  misc_feature (1)..(53): Homolog of NCBI NO: 6983690 NR Description: AE9 stearoyl-ACP desaturase [Gossypium hirsutum]
  misc_feature (1)..(53): Homolog of NCBI NO: 3915031 NR Description: Acyl-[acyl-carrier protein] desaturase,
  misc_feature (1)..(53): Homolog of NCBI NO: 533086 NR Description: precursor delta-9-stearoyl-acyl carrier protein
MREVERTVQRLIRDGVIVHAPASPFHGFVYVAFQERATAIAHGNTARLVGARGAGGRRSRAHLRHRRRRREAARGGVHPRRGQVLRGRPGRRRARHGVHDAAPDRHAHCAHQRRPPQQRRLLRSLRRHRAAGRHVHGFRLPRHSRALHTAVGRRGTCGGAHRRGEARAGLPVRAAAQDKEDGREGPR

SEQ ID NO: 11547 - DNA, 1485 bp, Zea mays subsp. mays
  misc_feature (1)..(1485): Ceres Seq. ID no. 12376376
  misc_feature: MA Experiment ID: 108535 Result: Up-regulated in Transcription
  misc_feature: MA Experiment 108535 PARAMETER Experiment Name: Zm_Meristem_P Parameter: Age (day) Value: 8
  misc_feature: MA Experiment 108535 PARAMETER Experiment Name: Zm_Meristem_P Parameter: Organism Value: Zea mays
  misc_feature: MA Experiment 108535 PARAMETER Experiment Name: Zm_Meristem_P Parameter: Plant Line Value: 35A19
  misc_feature: MA Experiment 108535 PARAMETER Experiment Name: Zm_Meristem_P Parameter: Tissue Value: Root Meristem vs. Above Root Meristem
aattcctaaacaaacgaacgcattctcctcccaaaccaccagacatattgcagtctgccgtagaagtgaaagggtttggtgaaaaattccggccgcctcagcgtcgcgaggtgggggacgagacgaagccagagcgccccaaacccaaaccccagaaccccgacatagggttacgccatcgccatgggatctgttgcctccgcagcagcgccaccttctcctcactcagcgctaccccaggagggcgcgccgccctatggccccgggctcgccgggatcctcccgcagacgtcagtgggagaggagaagaaggaggagaaggtggactacctcaacctcctctgccccgtgcccttcgaggagatccagcgcgaggctctcatgtctttgaagcctgaactttttgaaggattgaggtttgacttcacaaaagggttgaatcaaaagttttctcttagccacagcgtttttatgggctccttagaagttccagcccaggggtctgaaactattaaagttccaactgctcattatgaatttggtgccaattttttagatccaaagttaatgctcattggaagggtgatgacagatggaaggcttaatgctcgcgtgaaatgtgatttgacagacaatctgatgctgaaagtaaatgcacagcttacccaagaggcacattactcacaaggaatgtttaactttgactacaagggaagtgactatcgagcacaattccaaatagggaacaatgcattctatggtgcaaattatattcagagtgttactccgaacctatcaatgggaactgaaatgttctggcttggtcaccaaaggaagtctggaattggttttgcctgtcgctataacacggacaaaatggtgggcactctacaggtcgcaagcactggaatagttgccttaagttatgtccagaagatttctgagaaggtttcccttgcgtctgatttcatgtataaccatatgtcaagagacgtaacttccagctttggttacgattacttgcttaggcagtgccgtctaagaggcaaaattgactcgaatggtgttgttgcggcatatctggaggagaggttgaacatgggtgtcaactttcttctatctgctgagattgaccattgtaagaagaactacaagtttggtttcggaatgaccgtaggagagtaattctgctaaaacaattgctgagaagagcacatgaggactttcgcagtctgctttgcattgtatgttaagatacttcaggtctcagttttgattgatcaggttctgccccgtcgaaaaaatactagctgttgctgctttacagggttttgtctcagtgtattggtggttgtttattttcagctacttgagcatgggggccatgattctttgttcatcttggatgtaactagctgattggtgttccaatgaaaaaaaaaaaaaaaaaaaaaaaaaaaaaaaaaaaaaaaaaaaaaaaataaa

SEQ ID NO: 11548 - protein, 333 aa, Zea mays subsp. mays
  peptide (1)..(333): Ceres Seq. ID no. 12376377
  misc_feature (55)..(326): Pfam Name: Eukaryotic porin Pfam Description: Eukaryotic porin
  misc_feature (29)..(332): Homolog of NCBI NO: 15231008 NR Description: membrane import protein, putative; protein id: supported by cDNA: gi_15292982 [Arabidopsis thaliana] Probable mitochondrial import receptor subunit TOM40 homolog
  misc_feature (42)..(329): Homolog of NCBI NO: 15222963 NR Description: hypothetical protein; protein id: At1g50400.1
  misc_feature (159)..(332): Homolog of NCBI NO: 11994775 NR Description: membrane import protein-like [Arabidopsis
  misc_feature (29)..(128): Homolog of NCBI NO: 11994775 NR Description: membrane import protein-like [Arabidopsis
  misc_feature (156)..(329): Homolog of NCBI NO: 13162531 NR Description: Hypothetical protein [Arabidopsis thaliana]
  misc_feature (42)..(128): Homolog of NCBI NO: 13162531 NR Description: Hypothetical protein [Arabidopsis thaliana]
  misc_feature (156)..(329): Homolog of NCBI NO: 25405370 NR Description: hypothetical protein F14I3.2 [imported] -
  misc_feature (97)..(128): Homolog of NCBI NO: 25405370 NR Description: hypothetical protein F14I3.2 [imported] -
  misc_feature (241)..(333): Homolog of NCBI NO: 2982293 NR Description: ISP42-like protein [Picea mariana]
  misc_feature (1)..(276): Homolog of NCBI NO: 34903264 NR Description: unnamed protein product [Oryza sativa (japonica group)] >gi|6539563|dbj|BAA88180.1| unnamed protein product
MGSVASAAAPPSPHSALPQEGAPPYGPGLAGILPQTSVGEEKKEEKVDYLNLLCPVPFEEIQREALMSLKPELFEGLRFDFTKGLNQKFSLSHSVFMGSLEVPAQGSETIKVPTAHYEFGANFLDPKLMLIGRVMTDGRLNARVKCDLTDNLMLKVNAQLTQEAHYSQGMFNFDYKGSDYRAQFQIGNNAFYGANYIQSVTPNLSMGTEMFWLGHQRKSGIGFACRYNTDKMVGTLQVASTGIVALSYVQKISEKVSLASDFMYNHMSRDVTSSFGYDYLLRQCRLRGKIDSNGVVAAYLEERLNMGVNFLLSAEIDHCKKNYKFGFGMTVGE

SEQ ID NO: 11549 - protein, 267 aa, Zea mays subsp. mays
  peptide (1)..(267): Ceres Seq. ID no. 12376378
  misc_feature (1)..(260): Pfam Name: Eukaryotic porin Pfam Description: Eukaryotic porin
  misc_feature (1)..(266): Homolog of NCBI NO: 15231008 NR Description: membrane import protein, putative; protein id: supported by cDNA: gi_15292982 [Arabidopsis thaliana] Probable mitochondrial import receptor subunit TOM40 homolog
  misc_feature (1)..(263): Homolog of NCBI NO: 15222963 NR Description: hypothetical protein; protein id: At1g50400.1
  misc_feature (93)..(266): Homolog of NCBI NO: 11994775 NR Description: membrane import protein-like [Arabidopsis
  misc_feature (1)..(62): Homolog of NCBI NO: 11994775 NR Description: membrane import protein-like [Arabidopsis
  misc_feature (90)..(263): Homolog of NCBI NO: 13162531 NR Description: Hypothetical protein [Arabidopsis thaliana]
  misc_feature (1)..(62): Homolog of NCBI NO: 13162531 NR Description: Hypothetical protein [Arabidopsis thaliana]
  misc_feature (90)..(263): Homolog of NCBI NO: 25405370 NR Description: hypothetical protein F14I3.2 [imported] -
  misc_feature (31)..(62): Homolog of NCBI NO: 25405370 NR Description: hypothetical protein F14I3.2 [imported] -
  misc_feature (175)..(267): Homolog of NCBI NO: 2982293 NR Description: ISP42-like protein [Picea mariana]
  misc_feature (1)..(210): Homolog of NCBI NO: 34903264 NR Description: unnamed protein product [Oryza sativa (japonica group)] >gi|6539563|dbj|BAA88180.1| unnamed protein product
MSLKPELFEGLRFDFTKGLNQKFSLSHSVFMGSLEVPAQGSETIKVPTAHYEFGANFLDPKLMLIGRVMTDGRLNARVKCDLTDNLMLKVNAQLTQEAHYSQGMFNFDYKGSDYRAQFQIGNNAFYGANYIQSVTPNLSMGTEMFWLGHQRKSGIGFACRYNTDKMVGTLQVASTGIVALSYVQKISEKVSLASDFMYNHMSRDVTSSFGYDYLLRQCRLRGKIDSNGVVAAYLEERLNMGVNFLLSAEIDHCKKNYKFGFGMTVGE

SEQ ID NO: 11550 - protein, 237 aa, Zea mays subsp. mays
  peptide (1)..(237): Ceres Seq. ID no. 12376379
  misc_feature (1)..(230): Pfam Name: Eukaryotic porin Pfam Description: Eukaryotic porin
  misc_feature (1)..(236): Homolog of NCBI NO: 15231008 NR Description: membrane import protein, putative; protein id: supported by cDNA: gi_15292982 [Arabidopsis thaliana] Probable mitochondrial import receptor subunit TOM40 homolog
  misc_feature (1)..(233): Homolog of NCBI NO: 15222963 NR Description: hypothetical protein; protein id: At1g50400.1
  misc_feature (63)..(236): Homolog of NCBI NO: 11994775 NR Description: membrane import protein-like [Arabidopsis
  misc_feature (1)..(32): Homolog of NCBI NO: 11994775 NR Description: membrane import protein-like [Arabidopsis
  misc_feature (60)..(233): Homolog of NCBI NO: 13162531 NR Description: Hypothetical protein [Arabidopsis thaliana]
  misc_feature (1)..(32): Homolog of NCBI NO: 13162531 NR Description: Hypothetical protein [Arabidopsis thaliana]
  misc_feature (60)..(233): Homolog of NCBI NO: 25405370 NR Description: hypothetical protein F14I3.2 [imported] -
  misc_feature (1)..(32): Homolog of NCBI NO: 25405370 NR Description: hypothetical protein F14I3.2 [imported] -
  misc_feature (145)..(237): Homolog of NCBI NO: 2982293 NR Description: ISP42-like protein [Picea mariana]
  misc_feature (1)..(180): Homolog of NCBI NO: 34903264 NR Description: unnamed protein product [Oryza sativa (japonica group)] >gi|6539563|dbj|BAA88180.1| unnamed protein product
MGSLEVPAQGSETIKVPTAHYEFGANFLDPKLMLIGRVMTDGRLNARVKCDLTDNLMLKVNAQLTQEAHYSQGMFNFDYKGSDYRAQFQIGNNAFYGANYIQSVTPNLSMGTEMFWLGHQRKSGIGFACRYNTDKMVGTLQVASTGIVALSYVQKISEKVSLASDFMYNHMSRDVTSSFGYDYLLRQCRLRGKIDSNGVVAAYLEERLNMGVNFLLSAEIDHCKKNYKFGFGMTVGE

SEQ ID NO: 11551 - DNA, 834 bp, Zea mays subsp. mays; identical to SEQ ID NO: 9269
  misc_feature (1)..(834): Ceres Seq. ID no. 12404684
  misc_feature: MA Experiment ID: 108504 Result: Up-regulated in Transcription
  misc_feature: MA Experiment 108504 PARAMETER Experiment Name: Zm_Drought_P Parameter: Age (day) Value: 8
  misc_feature: MA Experiment 108504 PARAMETER Experiment Name: Zm_Drought_P Parameter: Organism Value: Zea mays
  misc_feature: MA Experiment 108504 PARAMETER Experiment Name: Zm_Drought_P Parameter: Plant Line Value: 35A19
  misc_feature: MA Experiment 108504 PARAMETER Experiment Name: Zm_Drought_P Parameter: Timepoint (hr) Value: 12
  misc_feature: MA Experiment 108504 PARAMETER Experiment Name: Zm_Drought_P Parameter: Tissue Value: Aerial
  misc_feature: MA Experiment 108504 PARAMETER Experiment Name: Zm_Drought_P Parameter: Treatment Value: Drought vs. No Drought
  misc_feature: MA Experiment ID: 108515 Result: Up-regulated in Transcription
  misc_feature: MA Experiment 108515 PARAMETER Experiment Name: Zm_2mM_SA_P Parameter: Age (day) Value: 8
  misc_feature: MA Experiment 108515 PARAMETER Experiment Name: Zm_2mM_SA_P Parameter: Organism Value: Zea mays
  misc_feature: MA Experiment 108515 PARAMETER Experiment Name: Zm_2mM_SA_P Parameter: Plant Line Value: 35A19
  misc_feature: MA Experiment 108515 PARAMETER Experiment Name: Zm_2mM_SA_P Parameter: Timepoint (hr) Value: 12
  misc_feature: MA Experiment 108515 PARAMETER Experiment Name: Zm_2mM_SA_P Parameter: Tissue Value: Aerial
  misc_feature: MA Experiment 108515 PARAMETER Experiment Name: Zm_2mM_SA_P Parameter: Treatment Value: 2mM SA vs. No Treatment
  misc_feature: MA Experiment ID: 108522 Result: Up-regulated in Transcription
  misc_feature: MA Experiment 108522 PARAMETER Experiment Name: Zm_42deg_Heat_P Parameter: Age (day) Value: 8
  misc_feature: MA Experiment 108522 PARAMETER Experiment Name: Zm_42deg_Heat_P Parameter: Organism Value: Zea mays
  misc_feature: MA Experiment 108522 PARAMETER Experiment Name: Zm_42deg_Heat_P Parameter: Plant Line Value: 35A19
  misc_feature: MA Experiment 108522 PARAMETER Experiment Name: Zm_42deg_Heat_P Parameter: Temperature (deg C) Value: 42 vs. 22
  misc_feature: MA Experiment 108522 PARAMETER Experiment Name: Zm_42deg_Heat_P Parameter: Timepoint (hr) Value: 1
  misc_feature: MA Experiment 108522 PARAMETER Experiment Name: Zm_42deg_Heat_P Parameter: Tissue Value: Aerial
  misc_feature: MA Experiment ID: 108523 Result: Up-regulated in Transcription
  misc_feature: MA Experiment 108523 PARAMETER Experiment Name: Zm_42deg_Heat_P Parameter: Age (day) Value: 8
  misc_feature: MA Experiment 108523 PARAMETER Experiment Name: Zm_42deg_Heat_P Parameter: Organism Value: Zea mays
  misc_feature: MA Experiment 108523 PARAMETER Experiment Name: Zm_42deg_Heat_P Parameter: Plant Line Value: 35A19
  misc_feature: MA Experiment 108523 PARAMETER Experiment Name: Zm_42deg_Heat_P Parameter: Temperature (deg C) Value: 42 vs. 22
  misc_feature: MA Experiment 108523 PARAMETER Experiment Name: Zm_42deg_Heat_P Parameter: Timepoint (hr) Value: 6
  misc_feature: MA Experiment 108523 PARAMETER Experiment Name: Zm_42deg_Heat_P Parameter: Tissue Value: Aerial
  misc_feature: MA Experiment ID: 108526 Result: Up-regulated in Transcription
  misc_feature: MA Experiment 108526 PARAMETER Experiment Name: Zm_5mM_NO_P Parameter: Age (day) Value: 8
  misc_feature: MA Experiment 108526 PARAMETER Experiment Name: Zm_5mM_NO_P Parameter: Organism Value: Zea mays
  misc_feature: MA Experiment 108526 PARAMETER Experiment Name: Zm_5mM_NO_P Parameter: Plant Line Value: 35A19
  misc_feature: MA Experiment 108526 PARAMETER Experiment Name: Zm_5mM_NO_P Parameter: Timepoint (hr) Value: 1
  misc_feature: MA Experiment 108526 PARAMETER Experiment Name: Zm_5mM_NO_P Parameter: Tissue Value: Aerial
  misc_feature: MA Experiment 108526 PARAMETER Experiment Name: Zm_5mM_NO_P Parameter: Treatment Value: 5mM NO vs. No Treatment
  misc_feature: MA Experiment ID: 108527 Result: Up-regulated in Transcription
  misc_feature: MA Experiment 108527 PARAMETER Experiment Name: Zm_5mM_NO_P Parameter: Age (day) Value: 8
  misc_feature: MA Experiment 108527 PARAMETER Experiment Name: Zm_5mM_NO_P Parameter: Organism Value: Zea mays
  misc_feature: MA Experiment 108527 PARAMETER Experiment Name: Zm_5mM_NO_P Parameter: Plant Line Value: 35A19
  misc_feature: MA Experiment 108527 PARAMETER Experiment Name: Zm_5mM_NO_P Parameter: Timepoint (hr) Value: 6
  misc_feature: MA Experiment 108527 PARAMETER Experiment Name: Zm_5mM_NO_P Parameter: Tissue Value: Aerial
  misc_feature: MA Experiment 108527 PARAMETER Experiment Name: Zm_5mM_NO_P Parameter: Treatment Value: 5mM NO vs. No Treatment
  misc_feature: MA Experiment ID: 108528 Result: Down-regulated in Transcription
  misc_feature: MA Experiment 108528 PARAMETER Experiment Name: Zm_Imbibed_Seeds_P Parameter: Age (day) Value: 5 vs. 2
  misc_feature: MA Experiment 108528 PARAMETER Experiment Name: Zm_Imbibed_Seeds_P Parameter: Organism Value: Zea mays
  misc_feature: MA Experiment 108528 PARAMETER Experiment Name: Zm_Imbibed_Seeds_P Parameter: Plant Line Value: 35A19
  misc_feature: MA Experiment 108528 PARAMETER Experiment Name: Zm_Imbibed_Seeds_P Parameter: Tissue Value: Aerial vs. Embryo
  misc_feature: MA Experiment ID: 108529 Result: Down-regulated in Transcription
  misc_feature: MA Experiment 108529 PARAMETER Experiment Name: Zm_Imbibed_Seeds_P Parameter: Age (day) Value: 5 vs. 2
  misc_feature: MA Experiment 108529 PARAMETER Experiment Name: Zm_Imbibed_Seeds_P Parameter: Organism Value: Zea mays
  misc_feature: MA Experiment 108529 PARAMETER Experiment Name: Zm_Imbibed_Seeds_P Parameter: Plant Line Value: 35A19
  misc_feature: MA Experiment 108529 PARAMETER Experiment Name: Zm_Imbibed_Seeds_P Parameter: Tissue Value: Roots vs. Embryo
  misc_feature: MA Experiment ID: 108530 Result: Down-regulated in Transcription
  misc_feature: MA Experiment 108530 PARAMETER Experiment Name: Zm_Imbibed_Seeds_P Parameter: Age (day) Value: 6 vs. 2
  misc_feature: MA Experiment 108530 PARAMETER Experiment Name: Zm_Imbibed_Seeds_P Parameter: Organism Value: Zea mays
  misc_feature: MA Experiment 108530 PARAMETER Experiment Name: Zm_Imbibed_Seeds_P Parameter: Plant Line Value: 35A19
  misc_feature: MA Experiment 108530 PARAMETER Experiment Name: Zm_Imbibed_Seeds_P Parameter: Tissue Value: Aerial vs. Embryo
  misc_feature: MA Experiment ID: 108534 Result: Up-regulated in Transcription
  misc_feature: MA Experiment 108534 PARAMETER Experiment Name: Zm_4deg_Cold_P Parameter: Age (hr) Value: 8
  misc_feature: MA Experiment 108534 PARAMETER Experiment Name: Zm_4deg_Cold_P Parameter: Organism Value: Zea mays
  misc_feature: MA Experiment 108534 PARAMETER Experiment Name: Zm_4deg_Cold_P Parameter: Plant Line Value: 35A19
  misc_feature: MA Experiment 108534 PARAMETER Experiment Name: Zm_4deg_Cold_P Parameter: Temperature (deg C) Value: 4 vs. 22
  misc_feature: MA Experiment 108534 PARAMETER Experiment Name: Zm_4deg_Cold_P Parameter: Timepoint (hr) Value: 6
  misc_feature: MA Experiment 108534 PARAMETER Experiment Name: Zm_4deg_Cold_P Parameter: Tissue Value: Aerial
  misc_feature: MA Experiment ID: 108536 Result: Up-regulated in Transcription
  misc_feature: MA Experiment 108536 PARAMETER Experiment Name: Zm_Meristem_P Parameter: Age (day) Value: 8
  misc_feature: MA Experiment 108536 PARAMETER Experiment Name: Zm_Meristem_P Parameter: Organism Value: Zea mays
  misc_feature: MA Experiment 108536 PARAMETER Experiment Name: Zm_Meristem_P Parameter: Plant Line Value: 35A19
  misc_feature: MA Experiment 108536 PARAMETER Experiment Name: Zm_Meristem_P Parameter: Tissue Value: Shoot Meristem vs. Above Shoot Meristem
  misc_feature: MA Experiment ID: 108540 Result: Up-regulated in Transcription
  misc_feature: MA Experiment 108540 PARAMETER Experiment Name: Zm_20percent_PEG_P Parameter: Age (day) Value: 8
  misc_feature: MA Experiment 108540 PARAMETER Experiment Name: Zm_20percent_PEG_P Parameter: Organism Value: Zea mays
  misc_feature: MA Experiment 108540 PARAMETER Experiment Name: Zm_20percent_PEG_P Parameter: Plant Line Value: 35A19
  misc_feature: MA Experiment 108540 PARAMETER Experiment Name: Zm_20percent_PEG_P Parameter: Timepoint (hr) Value: 6
  misc_feature: MA Experiment 108540 PARAMETER Experiment Name: Zm_20percent_PEG_P Parameter: Tissue Value: Aerial
  misc_feature: MA Experiment 108540 PARAMETER Experiment Name: Zm_20percent_PEG_P Parameter: Treatment Value: 20percent PEG vs. No Treatment
  misc_feature: MA Experiment ID: 108542 Result: Up-regulated in Transcription
  misc_feature: MA Experiment 108542 PARAMETER Experiment Name: Zm_150mM_NaCl_P Parameter: Age (day) Value: 8
  misc_feature: MA Experiment 108542 PARAMETER Experiment Name: Zm_150mM_NaCl_P Parameter: Organism Value: Zea mays
  misc_feature: MA Experiment 108542 PARAMETER Experiment Name: Zm_150mM_NaCl_P Parameter: Plant Line Value: 35A19
  misc_feature: MA Experiment 108542 PARAMETER Experiment Name: Zm_150mM_NaCl_P Parameter: Timepoint (hr) Value: 6
  misc_feature: MA Experiment 108542 PARAMETER Experiment Name: Zm_150mM_NaCl_P Parameter: Tissue Value: Aerial
  misc_feature: MA Experiment 108542 PARAMETER Experiment Name: Zm_150mM_NaCl_P Parameter: Treatment Value: 150mM NaCl vs. No Treatment
  misc_feature: MA Experiment ID: 108544 Result: Up-regulated in Transcription
  misc_feature: MA Experiment ID: 108545 Result: Down-regulated in Transcription
  misc_feature: MA Experiment 108545 PARAMETER Experiment Name: Zm_Imbibed_Seeds_P Parameter: Age (day) Value: 3 vs. 2
  misc_feature: MA Experiment 108545 PARAMETER Experiment Name: Zm_Imbibed_Seeds_P Parameter: Organism Value: Zea mays
  misc_feature: MA Experiment 108545 PARAMETER Experiment Name: Zm_Imbibed_Seeds_P Parameter: Plant Line Value: 35A19
  misc_feature: MA Experiment 108545 PARAMETER Experiment Name: Zm_Imbibed_Seeds_P Parameter: Tissue Value: Aerial vs. Embryo
  misc_feature: MA Experiment ID: 108546 Result: Down-regulated in Transcription
  misc_feature: MA Experiment 108546 PARAMETER Experiment Name: Zm_Imbibed_Seeds_P Parameter: Age (day) Value: 3 vs. 2
  misc_feature: MA Experiment 108546 PARAMETER Experiment Name: Zm_Imbibed_Seeds_P Parameter: Organism Value: Zea mays
  misc_feature: MA Experiment 108546 PARAMETER Experiment Name: Zm_Imbibed_Seeds_P Parameter: Plant Line Value: 35A19
  misc_feature: MA Experiment 108546 PARAMETER Experiment Name: Zm_Imbibed_Seeds_P Parameter: Tissue Value: Roots vs. Embryo
  misc_feature: MA Experiment ID: 108547 Result: Down-regulated in Transcription
  misc_feature: MA Experiment 108547 PARAMETER Experiment Name: Zm_Imbibed_Seeds_P Parameter: Age (day) Value: 4 vs. 2
  misc_feature: MA Experiment 108547 PARAMETER Experiment Name: Zm_Imbibed_Seeds_P Parameter: Organism Value: Zea mays
  misc_feature: MA Experiment 108547 PARAMETER Experiment Name: Zm_Imbibed_Seeds_P Parameter: Plant Line Value: 35A19
  misc_feature: MA Experiment 108547 PARAMETER Experiment Name: Zm_Imbibed_Seeds_P Parameter: Tissue Value: Aerial vs. Embryo
  misc_feature: MA Experiment ID: 108556 Result: Up-regulated in Transcription
  misc_feature: MA Experiment 108556 PARAMETER Experiment Name: Zm_Drought_P Parameter: Age (day) Value: 9
  misc_feature: MA Experiment 108556 PARAMETER Experiment Name: Zm_Drought_P Parameter: Organism Value: Zea mays
  misc_feature: MA Experiment 108556 PARAMETER Experiment Name: Zm_Drought_P Parameter: Plant Line Value: 35A19
  misc_feature: MA Experiment 108556 PARAMETER Experiment Name: Zm_Drought_P Parameter: Timepoint (hr) Value: 24
  misc_feature: MA Experiment 108556 PARAMETER Experiment Name: Zm_Drought_P Parameter: Tissue Value: Aerial
  misc_feature: MA Experiment 108556 PARAMETER Experiment Name: Zm_Drought_P Parameter: Treatment Value: Drought vs. No Drought
  misc_feature: MA Experiment ID: 108559 Result: Up-regulated in Transcription
  misc_feature: MA Experiment 108559 PARAMETER Experiment Name: Zm_5mM_NO_P Parameter: Age (day) Value: 8
  misc_feature: MA Experiment 108559 PARAMETER Experiment Name: Zm_5mM_NO_P Parameter: Organism Value: Zea mays
  misc_feature: MA Experiment 108559 PARAMETER Experiment Name: Zm_5mM_NO_P Parameter: Plant Line Value: 35A19
  misc_feature: MA Experiment 108559 PARAMETER Experiment Name: Zm_5mM_NO_P Parameter: Timepoint (hr) Value: 12
  misc_feature: MA Experiment 108559 PARAMETER Experiment Name: Zm_5mM_NO_P Parameter: Tissue Value: Aerial
  misc_feature: MA Experiment 108559 PARAMETER Experiment Name: Zm_5mM_NO_P Parameter: Treatment Value: 5mM NO vs. No Treatment
  misc_feature: MA Experiment ID: 108597 Result: Up-regulated in Transcription
  misc_feature: MA Experiment 108597 PARAMETER Experiment Name: Zm_100uM_ABA_P Parameter: Age (day) Value: 9
  misc_feature: MA Experiment 108597 PARAMETER Experiment Name: Zm_100uM_ABA_P Parameter: Organism Value: Zea mays
  misc_feature: MA Experiment 108597 PARAMETER Experiment Name: Zm_100uM_ABA_P Parameter: Plant Line Value: 35A19
  misc_feature: MA Experiment 108597 PARAMETER Experiment Name: Zm_100uM_ABA_P Parameter: Timepoint (hr) Value: 24
  misc_feature: MA Experiment 108597 PARAMETER Experiment Name: Zm_100uM_ABA_P Parameter: Tissue Value: Aerial
  misc_feature: MA Experiment 108597 PARAMETER Experiment Name: Zm_100uM_ABA_P Parameter: Treatment Value: 100uM ABA vs. No Treatment
  misc_feature: MA Experiment ID: 20000477 Result: Up-regulated in Transcription
  misc_feature: MA Experiment 20000477 PARAMETER Experiment Name: Zm_5mM_SA_P Parameter: Age (day) Value: 10
  misc_feature: MA Experiment 20000477 PARAMETER Experiment Name: Zm_5mM_SA_P Parameter: Organism Value: Zea mays
  misc_feature: MA Experiment 20000477 PARAMETER Experiment Name: Zm_5mM_SA_P Parameter: Plant Line Value: 35A19
  misc_feature: MA Experiment 20000477 PARAMETER Experiment Name: Zm_5mM_SA_P Parameter: Timepoint (hr) Value: 48
  misc_feature: MA Experiment 20000477 PARAMETER Experiment Name: Zm_5mM_SA_P Parameter: Tissue Value: Aerial
  misc_feature: MA Experiment 20000477 PARAMETER Experiment Name: Zm_5mM_SA_P Parameter: Treatment Value: 5mM SA vs. No Treatment
  misc_feature: MA Experiment ID: 20000478 Result: Up-regulated in Transcription
  misc_feature: MA Experiment 20000478 PARAMETER Experiment Name: Zm_5mM_SA_P Parameter: Age (day) Value: 11
  misc_feature: MA Experiment 20000478 PARAMETER Experiment Name: Zm_5mM_SA_P Parameter: Organism Value: Zea mays
  misc_feature: MA Experiment 20000478 PARAMETER Experiment Name: Zm_5mM_SA_P Parameter: Plant Line Value: 35A19
  misc_feature: MA Experiment 20000478 PARAMETER Experiment Name: Zm_5mM_SA_P Parameter: Timepoint (hr) Value: 72
  misc_feature: MA Experiment 20000478 PARAMETER Experiment Name: Zm_5mM_SA_P Parameter: Tissue Value: Aerial
  misc_feature: MA Experiment 20000478 PARAMETER Experiment Name: Zm_5mM_SA_P Parameter: Treatment Value: 5mM SA vs. No Treatment
  misc_feature: MA Experiment ID: 20000480 Result: Up-regulated in Transcription
  misc_feature: MA Experiment 20000480 PARAMETER Experiment Name: Zm_Drought_P Parameter: Age (day) Value: 11
  misc_feature: MA Experiment 20000480 PARAMETER Experiment Name: Zm_Drought_P Parameter: Organism Value: Zea mays
  misc_feature: MA Experiment 20000480 PARAMETER Experiment Name: Zm_Drought_P Parameter: Plant Line Value: 35A19
  misc_feature: MA Experiment 20000480 PARAMETER Experiment Name: Zm_Drought_P Parameter: Timepoint (hr) Value: 72
  misc_feature: MA Experiment 20000480 PARAMETER Experiment Name: Zm_Drought_P Parameter: Tissue Value: Aerial
  misc_feature: MA Experiment 20000480 PARAMETER Experiment Name: Zm_Drought_P Parameter: Treatment Value: Drought vs. No Drought
  misc_feature: MA Experiment ID: 20000533 Result: Up-regulated in Transcription
  misc_feature: MA Experiment 20000533 PARAMETER Experiment Name: Zm_0.001percent_MeJA_P Parameter: Age (day) Value: 11
  misc_feature: MA Experiment 20000533 PARAMETER Experiment Name: Zm_0.001percent_MeJA_P Parameter: Organism Value: Zea mays
  misc_feature: MA Experiment 20000533 PARAMETER Experiment Name: Zm_0.001percent_MeJA_P Parameter: Plant Line Value: 35A19
  misc_feature: MA Experiment 20000533 PARAMETER Experiment Name: Zm_0.001percent_MeJA_P Parameter: Timepoint (hr) Value: 72
  misc_feature: MA Experiment 20000533 PARAMETER Experiment Name: Zm_0.001percent_MeJA_P Parameter: Tissue Value: Aerial
  misc_feature: MA Experiment 20000533 PARAMETER Experiment Name: Zm_0.001percent_MeJA_P Parameter: Treatment Value: 0.001percent MeJA vs. No Treatment
  misc_feature: MA Experiment ID: 20000535 Result: Up-regulated in Transcription
  misc_feature: MA Experiment 20000535 PARAMETER Experiment Name: Zm_Hybrid_Seed_Dev_P Parameter: DAP Value: 30 vs. 12
  misc_feature: MA Experiment 20000535 PARAMETER Experiment Name: Zm_Hybrid_Seed_Dev_P Parameter: Organism Value: Zea mays
  misc_feature: MA Experiment 20000535 PARAMETER Experiment Name: Zm_Hybrid_Seed_Dev_P Parameter: Plant Line Value: 35A19
  misc_feature: MA Experiment 20000535 PARAMETER Experiment Name: Zm_Hybrid_Seed_Dev_P Parameter: Tissue Value: Embryo vs. Unfert Floret
  misc_feature: MA Experiment ID: 20000626 Result: Up-regulated in Transcription
  misc_feature: MA Experiment 20000626 PARAMETER Experiment Name: Zm_Herbicide-Treatments_P Parameter: Timepoint (hr) Value: 12
  misc_feature: MA Experiment 20000626 PARAMETER Experiment Name: Zm_Herbicide-Treatments_P Parameter: Tissue Value: Aerial
  misc_feature: MA Experiment 20000626 PARAMETER Experiment Name: Zm_Herbicide-Treatments_P Parameter: Treatment Value: Roundup vs. No Treatment

SEQ ID NO: 11552 - protein, 177 aa, Zea mays subsp. mays; identical to SEQ ID NO: 9270
  peptide (1)..(177): Ceres Seq. ID no. 12404685

SEQ ID NO: 11553 - protein, 169 aa, Zea mays subsp. mays; identical to SEQ ID NO: 9271
  peptide (1)..(169): Ceres Seq. ID no. 12404686
  misc_feature (1)..(100): Homolog of NCBI NO: 100790 NR Description: heat shock protein 17.3 - wheat
  misc_feature (1)..(100): Homolog of NCBI NO: 5257560 NR Description: cytosolic class II low molecular weight heat
  misc_feature (1)..(100): Homolog of NCBI NO: 123549 NR Description: 17.5 KD CLASS II HEAT SHOCK PROTEIN
  misc_feature (1)..(100): Homolog of NCBI NO: 123553 NR Description: 17.8 KD CLASS II HEAT SHOCK PROTEIN
  misc_feature (1)..(102): Homolog of NCBI NO: 34906270 NR Description: putative heat shock protein, 18K - maize [Oryza
  misc_feature (1)..(100): Homolog of NCBI NO: 14009833 NR Description: small heat shock protein HSP17.8 [Triticum
  misc_feature (1)..(100): Homolog of NCBI NO: 729762 NR Description: 17.0 KD CLASS II HEAT SHOCK PROTEIN (HSP 18)
  misc_feature (1)..(100): Homolog of NCBI NO: 123549 NR Description: 17.5 KD CLASS II HEAT SHOCK PROTEIN
  misc_feature (1)..(100): Homolog of NCBI NO: 123553 NR Description: 17.8 KD CLASS II HEAT SHOCK PROTEIN
  misc_feature (1)..(102): Homolog of NCBI NO: 34906270 NR Description: putative heat shock protein, 18K - maize [Oryza
  misc_feature (1)..(100): Homolog of NCBI NO: 14009833 NR Description: small heat shock protein HSP17.8 [Triticum
  misc_feature (1)..(100): Homolog of NCBI NO: 729762 NR Description: 17.0 KD CLASS II HEAT SHOCK PROTEIN (HSP 18)
  misc_feature (1)..(100): Homolog of NCBI NO: 100790 NR Description: heat shock protein 17.3 - wheat
  misc_feature (1)..(100): Homolog of NCBI NO: 5257560 NR Description: cytosolic class II low molecular weight heat

SEQ ID NO: 11554 - protein, 165 aa, Zea mays subsp. mays; identical to SEQ ID NO: 9272
  peptide (1)..(165): Ceres Seq. ID no. 12404687
  misc_feature (1)..(96): Homolog of NCBI NO: 123549 NR Description: 17.5 KD CLASS II HEAT SHOCK PROTEIN
  misc_feature (1)..(96): Homolog of NCBI NO: 123553 NR Description: 17.8 KD CLASS II HEAT SHOCK PROTEIN
  misc_feature (1)..(98): Homolog of NCBI NO: 34906270 NR Description: putative heat shock protein, 18K - maize [Oryza
  misc_feature (1)..(96): Homolog of NCBI NO: 14009833 NR Description: small heat shock protein HSP17.8 [Triticum
  misc_feature (1)..(96): Homolog of NCBI NO: 729762 NR Description: 17.0 KD CLASS II HEAT SHOCK PROTEIN (HSP 18)
  misc_feature (1)..(96): Homolog of NCBI NO: 100790 NR Description: heat shock protein 17.3 - wheat
  misc_feature (1)..(96): Homolog of NCBI NO: 5257560 NR Description: cytosolic class II low molecular weight heat
  misc_feature (1)..(96): Homolog of NCBI NO: 100790 NR Description: heat shock protein 17.3 - wheat
  misc_feature (1)..(96): Homolog of NCBI NO: 5257560 NR Description: cytosolic class II low molecular weight heat
  misc_feature (1)..(96): Homolog of NCBI NO: 123549 NR Description: 17.5 KD CLASS II HEAT SHOCK PROTEIN
  misc_feature (1)..(96): Homolog of NCBI NO: 123553 NR Description: 17.8 KD CLASS II HEAT SHOCK PROTEIN
  misc_feature (1)..(98): Homolog of NCBI NO: 34906270 NR Description: putative heat shock protein, 18K - maize [Oryza
  misc_feature (1)..(96): Homolog of NCBI NO: 14009833 NR Description: small heat shock protein HSP17.8 [Triticum
  misc_feature (1)..(96): Homolog of NCBI NO: 729762 NR Description: 17.0 KD CLASS II HEAT SHOCK PROTEIN (HSP 18)

SEQ ID NO: 11555 - DNA, 990 bp, Zea mays subsp. mays
  misc_feature (1)..(990): Ceres Seq. ID no. 12345649
  misc_feature: MA Experiment ID: 108528 Result: Up-regulated in Transcription
  misc_feature: MA Experiment 108528 PARAMETER Experiment Name: Zm_Imbibed_Seeds_P Parameter: Age (day) Value: 5 vs. 2
  misc_feature: MA Experiment 108528 PARAMETER Experiment Name: Zm_Imbibed_Seeds_P Parameter: Organism Value: Zea mays
  misc_feature: MA Experiment 108528 PARAMETER Experiment Name: Zm_Imbibed_Seeds_P Parameter: Plant Line Value: 35A19
  misc_feature: MA Experiment 108528 PARAMETER Experiment Name: Zm_Imbibed_Seeds_P Parameter: Tissue Value: Aerial vs. Embryo
  misc_feature: MA Experiment ID: 108530 Result: Up-regulated in Transcription
  misc_feature: MA Experiment 108530 PARAMETER Experiment Name: Zm_Imbibed_Seeds_P Parameter: Age (day) Value: 6 vs. 2
  misc_feature: MA Experiment 108530 PARAMETER Experiment Name: Zm_Imbibed_Seeds_P Parameter: Organism Value: Zea mays
  misc_feature: MA Experiment 108530 PARAMETER Experiment Name: Zm_Imbibed_Seeds_P Parameter: Plant Line Value: 35A19
  misc_feature: MA Experiment 108530 PARAMETER Experiment Name: Zm_Imbibed_Seeds_P Parameter: Tissue Value: Aerial vs. Embryo
  misc_feature: MA Experiment ID: 108545 Result: Up-regulated in Transcription
  misc_feature: MA Experiment 108545 PARAMETER Experiment Name: Zm_Imbibed_Seeds_P Parameter: Age (day) Value: 3 vs. 2
  misc_feature: MA Experiment 108545 PARAMETER Experiment Name: Zm_Imbibed_Seeds_P Parameter: Organism Value: Zea mays
  misc_feature: MA Experiment 108545 PARAMETER Experiment Name: Zm_Imbibed_Seeds_P Parameter: Plant Line Value: 35A19
  misc_feature: MA Experiment 108545 PARAMETER Experiment Name: Zm_Imbibed_Seeds_P Parameter: Tissue Value: Aerial vs. Embryo
  misc_feature: MA Experiment ID: 108547 Result: Up-regulated in Transcription
  misc_feature: MA Experiment 108547 PARAMETER Experiment Name: Zm_Imbibed_Seeds_P Parameter: Age (day) Value: 4 vs. 2
  misc_feature: MA Experiment 108547 PARAMETER Experiment Name: Zm_Imbibed_Seeds_P Parameter: Organism Value: Zea mays
  misc_feature: MA Experiment 108547 PARAMETER Experiment Name: Zm_Imbibed_Seeds_P Parameter: Plant Line Value: 35A19
  misc_feature: MA Experiment 108547 PARAMETER Experiment Name: Zm_Imbibed_Seeds_P Parameter: Tissue Value: Aerial vs. Embryo
  misc_feature: MA Experiment ID: 20000488 Result: Up-regulated in Transcription
  misc_feature: MA Experiment 20000488 PARAMETER Experiment Name: Zm_50mM_NH4NO3_L_to_H_P Parameter: Organism Value: Zea mays
  misc_feature: MA Experiment 20000488 PARAMETER Experiment Name: Zm_50mM_NH4NO3_L_to_H_P Parameter: Timepoint (hr) Value: 8
  misc_feature: MA Experiment 20000488 PARAMETER Experiment Name: Zm_50mM_NH4NO3_L_to_H_P Parameter: Tissue Value: Leaves
  misc_feature: MA Experiment 20000488 PARAMETER Experiment Name: Zm_50mM_NH4NO3_L_to_H_P Parameter: Treatment Value: 50mM NH4NO3 vs. 100mM Mannitol
  misc_feature: MA Experiment ID: 20000534 Result: Down-regulated in Transcription
  misc_feature: MA Experiment 20000534 PARAMETER Experiment Name: Zm_Hybrid_Pollen_P Parameter: Age (day) Value: 8
  misc_feature: MA Experiment 20000534 PARAMETER Experiment Name: Zm_Hybrid_Pollen_P Parameter: Organism Value: Zea mays
  misc_feature: MA Experiment 20000534 PARAMETER Experiment Name: Zm_Hybrid_Pollen_P Parameter: Plant Line Value: 35A19
  misc_feature: MA Experiment 20000534 PARAMETER Experiment Name: Zm_Hybrid_Pollen_P Parameter: Tissue Value: Pollen vs. Aerial
  misc_feature: MA Experiment ID: 20000626 Result: Down-regulated in Transcription
  misc_feature: MA Experiment 20000626 PARAMETER Experiment Name: Zm_Herbicide-Treatments_P Parameter: Timepoint (hr) Value: 12
  misc_feature: MA Experiment 20000626 PARAMETER Experiment Name: Zm_Herbicide-Treatments_P Parameter: Tissue Value: Aerial
  misc_feature: MA Experiment 20000626 PARAMETER Experiment Name: Zm_Herbicide-Treatments_P Parameter: Treatment Value: Roundup vs. No Treatment
  misc_feature: MA Experiment ID: 20001608 Result: Up-regulated in Transcription
  misc_feature: MA Experiment 20001608 PARAMETER Experiment Name: Zm_50ppm_KNO3_L-to-H_P Parameter: Age (day) Value: 21
  misc_feature: MA Experiment 20001608 PARAMETER Experiment Name: Zm_50ppm_KNO3_L-to-H_P Parameter: Organism Value: Zea mays
  misc_feature: MA Experiment 20001608 PARAMETER Experiment Name: Zm_50ppm_KNO3_L-to-H_P Parameter: Plant Line Value: 35A19
  misc_feature: MA Experiment 20001608 PARAMETER Experiment Name: Zm_50ppm_KNO3_L-to-H_P Parameter: Timepoint (hr) Value: 48
  misc_feature: MA Experiment 20001608 PARAMETER Experiment Name: Zm_50ppm_KNO3_L-to-H_P Parameter: Tissue Value: Shoots
  misc_feature: MA Experiment 20001608 PARAMETER Experiment Name: Zm_50ppm_KNO3_L-to-H_P Parameter: Treatment Value: 50ppm KNO3 vs. 50ppm KCl
gctccctatccaatcttctcctccctccctcccccgcgtcgcggcaagacgacctcgccgctccctgcctccctctccccgccgcaggtgctggagatgcaggcgactgccgcctccttcctcgcccgcccactcccgcggcttcgccgcattggcagctggggagcggatgcggcggtggtgcgtgagggcgttatcgcgctccctctgcggctgcgggggccgcggtgctccattagcctctccatcggcgccggcgccggcgctggcgccgaagctgaccacgagttcagctacgagcatgttccggtgttccctagataccgaatacgagatccctacaagcttcttggtgttgatcgtgatgcatctgaagaagagatccgaggtgcgaggaatttccttattcaacagtatgctgggcatgaaccgagtgaagaagctattgaaggtgcttatgagaagataattatgaagagctaccagcagcggaagaagacaaaaattaacttgaaaaccaagttaaagaagagagtagaggaatccccttcatgggtcaaagcacttcttggttgctttgaggtgccatcgatggatattatctccagaagattgtttttctttgctttcattgctggatggagcatagcaacttctgcagagaatggacctgcatttcagctcgcgatatcgctattctcatgcatatatttcctcaacgaaaagatgaagaaccttctaagggcatcaaccactgggtttggaatacttgttggcggttggatcattggttctctactggttccactggtcccaacattcatcatcccaccttcatggtctctagagctacttacctcactagttgcttacattttcttgtttctgggatccactttcctgaaatgaatctgtttcaatcttgtaactggaactgttggatcttttgagagggaaattacgatgactgatctctggatttgagttttc

SEQ ID NO: 11556 - protein, 302 aa, Zea mays subsp. mays
  peptide (1)..(302): Ceres Seq. ID no. 12345650
  misc_feature (101)..(302): Homolog of NCBI NO: 15237199 NR Description: putative protein; protein id: At5g23040.1 thaliana] >gi|9759362|dbj|BAB09821.1| to unknown protein [Arabidopsis thaliana]
  misc_feature (189)..(302): Homolog of NCBI NO: 37573058 NR Description: unknown protein [Oryza sativa (japonica
  misc_feature (58)..(302): Homolog of NCBI NO: 11357625 NR Description: hypothetical protein F24M12.180 - Arabidopsis >gi|6562266|emb|CAB62636.1| putative protein [Arabidopsis
  misc_feature (60)..(302): Homolog of NCBI NO: 18409276 NR Description: putative protein; protein id: At3g51140.1, by cDNA: 266414., supported by cDNA: gi_14334851, supported by gi_17104692 [Arabidopsis thaliana] >gi|14334852|gb|AAK59604.1|
  misc_feature (111)..(302): Homolog of NCBI NO: 17230751 NR Description: hypothetical protein [Nostoc sp. PCC 7120]
  misc_feature (113)..(302): Homolog of NCBI NO: 16329734 NR Description: unknown protein [Synechocystis sp. PCC 6803]
  misc_feature (114)..(302): Homolog of NCBI NO: 23039527 NR Description: hypothetical protein [Trichodesmium erythraeum
  misc_feature (111)..(302): Homolog of NCBI NO: 23129945 NR Description: hypothetical protein [Nostoc punctiforme]
  misc_feature (112)..(294): Homolog of NCBI NO: 37520608 NR Description: hypothetical protein glr1039 [Gloeobacter
APYPIFSSLPPPRRGKTTSPLPASLSPPQVLEMQATAASFLARPLPRLRRIGSWGADAAVVREGVIALPLRLRGPRCSISLSIGAGAGAGAEADHEFSYEHVPVFPRYRIRDPYKLLGVDRDASEEEIRGARNFLIQQYAGHEPSEEAIEGAYEKIIMKSYQQRKKTKINLKTKLKKRVEESPSWVKALLGCFEVPSMDIISRRLFFFAFIAGWSIATSAENGPAFQLAISLFSCIYFLNEKMKNLLRASTTGFGILVGGWIIGSLLVPLVPTFIIPPSWSLELLTSLVAYIFLFLGSTFLK

SEQ ID NO: 11557 - protein, 270 aa, Zea mays subsp. mays
  peptide (1)..(270): Ceres Seq. ID no. 12345651
  misc_feature (69)..(270): Homolog of NCBI NO: 15237199 NR Description: putative protein; protein id: At5g23040.1 thaliana] >gi|9759362|dbj|BAB09821.1| to unknown protein [Arabidopsis thaliana]
  misc_feature (157)..(270): Homolog of NCBI NO: 37573058 NR Description: unknown protein [Oryza sativa (japonica
  misc_feature (26)..(270): Homolog of NCBI NO: 11357625 NR Description: hypothetical protein F24M12.180 - Arabidopsis >gi|6562266|emb|CAB62636.1| putative protein [Arabidopsis
  misc_feature (28)..(270): Homolog of NCBI NO: 18409276 NR Description: putative protein; protein id: At3g51140.1, by cDNA: 266414., supported by cDNA: gi_14334851, supported by gi_17104692 [Arabidopsis thaliana] >gi|14334852|gb|AAK59604.1|
  misc_feature (79)..(270): Homolog of NCBI NO: 17230751 NR Description: hypothetical protein [Nostoc sp. PCC 7120]
  misc_feature (81)..(270): Homolog of NCBI NO: 16329734 NR Description: unknown protein [Synechocystis sp. PCC 6803]
  misc_feature (82)..(270): Homolog of NCBI NO: 23039527 NR Description: hypothetical protein [Trichodesmium erythraeum
  misc_feature (79)..(270): Homolog of NCBI NO: 23129945 NR Description: hypothetical protein [Nostoc punctiforme]
  misc_feature (80)..(262): Homolog of NCBI NO: 37520608 NR Description: hypothetical protein glr1039 [Gloeobacter
MQATAASFLARPLPRLRRIGSWGADAAVVREGVIALPLRLRGPRCSISLSIGAGAGAGAEADHEFSYEHVPVFPRYRIRDPYKLLGVDRDASEEEIRGARNFLIQQYAGHEPSEEAIEGAYEKIIMKSYQQRKKTKINLKTKLKKRVEESPSWVKALLGCFEVPSMDIISRRLFFFAFIAGWSIATSAENGPAFQLAISLFSCIYFLNEKMKNLLRASTTGFGILVGGWIIGSLLVPLVPTFIIPPSWSLELLTSLVAYIFLFLGSTFLK

SEQ ID NO: 11558 - protein, 155 aa, Zea mays subsp. mays
  peptide (1)..(155): Ceres Seq. ID no. 12345652
LPIQSSPPSLPRVAARRPRRSLPPSPRRRCWRCRRLPPPSSPAHSRGFAALAAGERMRRWCVRALSRSLCGCGGRGAPLASPSAPAPALAPKLTTSSATSMFRCSLDTEYEIPTSFLVLIVMHLKKRSEVRGISLFNSMLGMNRVKKLLKVLMRR

SEQ ID NO: 11559 - DNA, 735 bp, Zea mays subsp. mays
  misc_feature (1)..(735): Ceres Seq. ID no. 12350308
  misc_feature: MA Experiment ID: 108530 Result: Down-regulated in Transcription
  misc_feature: MA Experiment 108530 PARAMETER Experiment Name: Zm_Imbibed_Seeds_P Parameter: Age (day) Value: 6 vs. 2
  misc_feature: MA Experiment 108530 PARAMETER Experiment Name: Zm_Imbibed_Seeds_P Parameter: Organism Value: Zea mays
  misc_feature: MA Experiment 108530 PARAMETER Experiment Name: Zm_Imbibed_Seeds_P Parameter: Plant Line Value: 35A19
  misc_feature: MA Experiment 108530 PARAMETER Experiment Name: Zm_Imbibed_Seeds_P Parameter: Tissue Value: Aerial vs. Embryo
  misc_feature: MA Experiment ID: 20000535 Result: Down-regulated in Transcription
  misc_feature: MA Experiment 20000535 PARAMETER Experiment Name: Zm_Hybrid_Seed_Dev_P Parameter: DAP Value: 30 vs. 12
  misc_feature: MA Experiment 20000535 PARAMETER Experiment Name: Zm_Hybrid_Seed_Dev_P Parameter: Organism Value: Zea mays
  misc_feature: MA Experiment 20000535 PARAMETER Experiment Name: Zm_Hybrid_Seed_Dev_P Parameter: Plant Line Value: 35A19
  misc_feature: MA Experiment 20000535 PARAMETER Experiment Name: Zm_Hybrid_Seed_Dev_P Parameter: Tissue Value: Embryo vs. Unfert Floret
ctttttttcattacccccacctccgtggcgaggctcccccacctactaatacctctcctctctcgctcgcctgtcgcctttgtattcgtcttgctccagccgccgtcggatcggatccgatccaaagcaagcagcagcagccggctcctcctccgcctcccgcagcagccacaccccgtccgtcaccagaggaagaggaggaggatgtcgggatcgaaggtgtacacccttgaggaggtggccaagcacaacaccaaggacgactgctggctcgtcatcggcggcaaggtgtacaatgtgaccaagtttctggaggaccaccctggaggtgatgatgtcctgctgtcttccactgccaaggatgctaccgatgatttcgaagatgtggggcacagcaccaccgcccgtgcaatgatggacgagtacctcgtcggtgagattgatgcggccacgatacccagtaaggtgaagtacacgccccccaagcagccgcactacaaccaggataagaccccggagttcgtcatcaagatcctccagtttttggtccccctggcaatactgggcctggctgttgctgtaaggatctacaccaagtcggaatctgcctagtcatctgaaccaagttagcgagggttgcatcttgtaccagagtcgcatgtcagaaacttgagtctttgctgtcatacggttatatttatatgagacttctatcggtaaaatgaaatggatgtc

SEQ ID NO: 11560 - protein, 203 aa, Zea mays subsp. mays
  peptide (1)..(203): Ceres Seq. ID no. 12350309
  misc_feature (74)..(148): Pfam Name: Cytochrome b5-like Heme/Steroid binding domain Pfam Description: Cytochrome b5-like Heme/Steroid binding domain
  misc_feature (69)..(203): Homolog of NCBI NO: 34905998 NR Description: putative cytochrome B5 [Oryza sativa (japonica group)] >gi|15289978|dbj|BAB63673.1| putative cytochrome B5
  misc_feature (73)..(203): Homolog of NCBI NO: 14719320 NR Description: cytochrome B5 [Oryza sativa]
  misc_feature (73)..(203): Homolog of NCBI NO: 1345881 NR Description: Cytochrome b5 >gi|1076743|pir||S46307 cytochrome
  misc_feature (72)..(200): Homolog of NCBI NO: 15225731 NR Description: putative cytochrome b5; protein id: At2g32720.1 thaliana] >gi|12229741|sp|O48845|CY52_ARATH Probable cytochrome isoform 2 >gi|7430590|pir||T00796 cytochrome b5 At2g32720
  misc_feature (69)..(203): Homolog of NCBI NO: 1076621 NR Description: cytochrome b5 - common tobacco
  misc_feature (69)..(203): Homolog of NCBI NO: 1345882 NR Description: CYTOCHROME B5
  misc_feature (69)..(202): Homolog of NCBI NO: 1345879 NR Description: Cytochrome b5 >gi|7430589|pir||T09946 cytochrome
  misc_feature (69)..(202): Homolog of NCBI NO: 1345925 NR Description: Cytochrome b5, seed isoform
  misc_feature (72)..(202): Homolog of NCBI NO: 2647949 NR Description: cytochrome b5 [Olea europaea]
  misc_feature (73)..(202): Homolog of NCBI NO: 12229735 NR Description: Cytochrome b5 >gi|2062405|gb|AAC49701.1|
LFFITPTSVARLPHLLIPLLSRSPVAFVFVLLQPPSDRIRSKASSSSRLLLRLPQQPHPVRHQRKRRRMSGSKVYTLEEVAKHNTKDDCWLVIGGKVYNVTKFLEDHPGGDDVLLSSTAKDATDDFEDVGHSTTARAMMDEYLVGEIDAATIPSKVKYTPPKQPHYNQDKTPEFVIKILQFLVPLAILGLAVAVRIYTKSESA

SEQ ID NO: 11561 - protein, 135 aa, Zea mays subsp. mays
  peptide (1)..(135): Ceres Seq. ID no. 12350310
  misc_feature (6)..(80): Pfam Name: Cytochrome b5-like Heme/Steroid binding domain Pfam Description: Cytochrome b5-like Heme/Steroid binding domain
  misc_feature (1)..(135): Homolog of NCBI NO: 34905998 NR Description: putative cytochrome B5 [Oryza sativa (japonica group)] >gi|15289978|dbj|BAB63673.1| putative cytochrome B5
  misc_feature (5)..(135): Homolog of NCBI NO: 14719320 NR Description: cytochrome B5 [Oryza sativa]
  misc_feature (5)..(135): Homolog of NCBI NO: 1345881 NR Description: Cytochrome b5 >gi|1076743|pir||S46307 cytochrome
  misc_feature (4)..(132): Homolog of NCBI NO: 15225731 NR Description: putative cytochrome b5; protein id: At2g32720.1 thaliana] >gi|12229741|sp|O48845|CY52_ARATH Probable cytochrome isoform 2 >gi|7430590|pir||T00796 cytochrome b5 At2g32720
  misc_feature (1)..(135): Homolog of NCBI NO: 1076621 NR Description: cytochrome b5 - common tobacco
  misc_feature (1)..(135): Homolog of NCBI NO: 1345882 NR Description: CYTOCHROME B5
  misc_feature (1)..(134): Homolog of NCBI NO: 1345879 NR Description: Cytochrome b5 >gi|7430589|pir||T09946 cytochrome
  misc_feature (1)..(134): Homolog of NCBI NO: 1345925 NR Description: Cytochrome b5, seed isoform
  misc_feature (4)..(134): Homolog of NCBI NO: 2647949 NR Description: cytochrome b5 [Olea europaea]
  misc_feature (5)..(134): Homolog of NCBI NO: 12229735 NR Description: Cytochrome b5 >gi|2062405|gb|AAC49701.1|
MSGSKVYTLEEVAKHNTKDDCWLVIGGKVYNVTKFLEDHPGGDDVLLSSTAKDATDDFEDVGHSTTARAMMDEYLVGEIDAATIPSKVKYTPPKQPHYNQDKTPEFVIKILQFLVPLAILGLAVAVRIYTKSESA

SEQ ID NO: 11562 - DNA, 769 bp, Zea mays subsp. mays
  misc_feature (1)..(769): Ceres Seq. ID no. 12342308
  misc_feature: MA Experiment ID: 108535 Result: Up-regulated in Transcription
  misc_feature: MA Experiment 108535 PARAMETER Experiment Name: Zm_Meristem_P Parameter: Age (day) Value: 8
  misc_feature: MA Experiment 108535 PARAMETER Experiment Name: Zm_Meristem_P Parameter: Organism Value: Zea mays
  misc_feature: MA Experiment 108535 PARAMETER Experiment Name: Zm_Meristem_P Parameter: Plant Line Value: 35A19
  misc_feature: MA Experiment 108535 PARAMETER Experiment Name: Zm_Meristem_P Parameter: Tissue Value: Root Meristem vs. Above Root Meristem
catgaggaaagcaaggcacaacttcaggctcgatgaggtcggaataagaaggcagttgaagatcgtctctcagattatcaagcgcaaagattcacacctgtataggcatctgcagaagttgcaggctgaggactgtttctttgtgtacagaatggtggtagttctcttcaggagagagctcacttttgagcagactgtgtgcttgtgggaggttatgtgggctgaccaggcagctatacgagccgggatcgggaggtccacctggggaaggataagactgcgtgctcccccaactgacgacttgctactctatgccatcgccgcttgtgtcctgcagaggaggaagctaataattgagaagtatagcagcatggacgagatactgcgagagtgcaacagcatggctgggcagctcgacgtctggaggctgctagatgatgcacatgacctggttgttaaccttcacgataaaatctgatctgggtggtgagtgctgctctttgctctaacggcggagcaggtgtaagcctcaacagaaggaaaaatattgtggttcctttaccacctactgaaagtattctattatctgctattcattcccagcacggaaccaacttctaggtatagagaatgttgttaacttagagtgaggactcgagtgtcctcgcaaagaaaatgctgaaagattgtttggtgttagtgaggcactgtaaactgttcgttgtttaacttgttataggcaaaaacagagtttcctgggatggcaccc

SEQ ID NO: 11563 - protein, 158 aa, Zea mays subsp. mays
  peptide (1)..(158): Ceres Seq. ID no. 12342309
  misc_feature (1)..(158): Homolog of NCBI NO: 15238237 NR Description: GTPase activator protein of Rab-like small
  misc_feature (1)..(158): Homolog of NCBI NO: 15229125 NR Description: GTPase activating -like protein; protein id:
  misc_feature (1)..(158): Homolog of NCBI NO: 37536102 NR Description: putative GTPase activating protein [Oryza sativa
  misc_feature (1)..(158): Homolog of NCBI NO: 9759196 NR Description: GTPase activator protein of Rab-like small
  misc_feature (1)..(158): Homolog of NCBI NO: 15238777 NR Description: GTPase activator protein of Rab-like small protein; protein id: At5g53570.1, supported by cDNA: gi_14517421, by cDNA: gi_20908079 [Arabidopsis thaliana]
  misc_feature (1)..(158): Homolog of NCBI NO: 15238518 NR Description: GTPase activator-like protein of Rab-like small protein id: At5g24390.1 [Arabidopsis thaliana]
  misc_feature (1)..(74): Homolog of NCBI NO: 30688016 NR Description: expressed protein [Arabidopsis thaliana]
  misc_feature (1)..(74): Homolog of NCBI NO: 34893986 NR Description: P0672D08.1 [Oryza sativa (japonica
  misc_feature (1)..(74): Homolog of NCBI NO: 25407604 NR Description: hypothetical protein AT4g28550 [imported] - thaliana >gi|5701787|emb|CAB52161.1| putative protein thaliana] >gi|7269710|emb|CAB81443.1| putative protein
  misc_feature (1)..(74): Homolog of NCBI NO: 15225355 NR Description: unknown protein; protein id: At2g20440.1
MRKARHNFRLDEVGIRRQLKIVSQIIKRKDSHLYRHLQKLQAEDCFFVYRMVVVLFRRELTFEQTVCLWEVMWADQAAIRAGIGRSTWGRIRLRAPPTDDLLLYAIAACVLQRRKLIIEKYSSMDEILRECNSMAGQLDVWRLLDDAHDLVVNLHDKI

SEQ ID NO: 11564 - protein, 108 aa, Zea mays subsp. mays
  peptide (1)..(108): Ceres Seq. ID no. 12342310
  misc_feature (1)..(108): Homolog of NCBI NO: 15238237 NR Description: GTPase activator protein of Rab-like small
  misc_feature (1)..(108): Homolog of NCBI NO: 15229125 NR Description: GTPase activating -like protein; protein id:
  misc_feature (1)..(108): Homolog of NCBI NO: 37536102 NR Description: putative GTPase activating protein [Oryza sativa
  misc_feature (1)..(108): Homolog of NCBI NO: 9759196 NR Description: GTPase activator protein of Rab-like small
  misc_feature (1)..(108): Homolog of NCBI NO: 15238777 NR Description: GTPase activator protein of Rab-like small protein; protein id: At5g53570.1, supported by cDNA: gi_14517421, by cDNA: gi_20908079 [Arabidopsis thaliana]
  misc_feature (1)..(108): Homolog of NCBI NO: 15238518 NR Description: GTPase activator-like protein of Rab-like small protein id: At5g24390.1 [Arabidopsis thaliana]
  misc_feature (1)..(24): Homolog of NCBI NO: 30688016 NR Description: expressed protein [Arabidopsis thaliana]
  misc_feature (1)..(24): Homolog of NCBI NO: 34893986 NR Description: P0672D08.1 [Oryza sativa (japonica
  misc_feature (1)..(24): Homolog of NCBI NO: 25407604 NR Description: hypothetical protein AT4g28550 [imported] - thaliana >gi|5701787|emb|CAB52161.1| putative protein thaliana] >gi|7269710|emb|CAB81443.1| putative protein
  misc_feature (1)..(24): Homolog of NCBI NO: 15225355 NR Description: unknown protein; protein id: At2g20440.1
MVVVLFRRELTFEQTVCLWEVMWADQAAIRAGIGRSTWGRIRLRAPPTDDLLLYAIAACVLQRRKLIIEKYSSMDEILRECNSMAGQLDVWRLLDDAHDLVVNLHDKI

SEQ ID NO: 11565 - protein, 87 aa, Zea mays subsp. mays
  peptide (1)..(87): Ceres Seq. ID no. 12342311
  misc_feature (1)..(87): Homolog of NCBI NO: 15238237 NR Description: GTPase activator protein of Rab-like small
  misc_feature (1)..(87): Homolog of NCBI NO: 15229125 NR Description: GTPase activating -like protein; protein id:
  misc_feature (1)..(87): Homolog of NCBI NO: 37536102 NR Description: putative GTPase activating protein [Oryza sativa
  misc_feature (1)..(87): Homolog of NCBI NO: 9759196 NR Description: GTPase activator protein of Rab-like small
  misc_feature (1)..(87): Homolog of NCBI NO: 15238777 NR Description: GTPase activator protein of Rab-like small protein; protein id: At5g53570.1, supported by cDNA: gi_14517421, by cDNA: gi_20908079 [Arabidopsis thaliana]
  misc_feature (1)..(87): Homolog of NCBI NO: 15238518 NR Description: GTPase activator-like protein of Rab-like small protein id: At5g24390.1 [Arabidopsis thaliana]
MWADQAAIRAGIGRSTWGRIRLRAPPTDDLLLYAIAACVLQRRKLIIEKYSSMDEILRECNSMAGQLDVWRLLDDAHDLVVNLHDKI

SEQ ID NO: 11566 - DNA, 1191 bp, Zea mays subsp. mays
  misc_feature (1)..(1191): Ceres Seq. ID no. 12376280
  misc_feature: MA Experiment ID: 108526 Result: Down-regulated in Transcription
  misc_feature: MA Experiment 108526 PARAMETER Experiment Name: Zm_5mM_NO_P Parameter: Age (day) Value: 8
  misc_feature: MA Experiment 108526 PARAMETER Experiment Name: Zm_5mM_NO_P Parameter: Organism Value: Zea mays
  misc_feature: MA Experiment 108526 PARAMETER Experiment Name: Zm_5mM_NO_P Parameter: Plant Line Value: 35A19
  misc_feature: MA Experiment 108526 PARAMETER Experiment Name: Zm_5mM_NO_P Parameter: Timepoint (hr) Value: 1
  misc_feature: MA Experiment 108526 PARAMETER Experiment Name: Zm_5mM_NO_P Parameter: Tissue Value: Aerial
  misc_feature: MA Experiment 108526 PARAMETER Experiment Name: Zm_5mM_NO_P Parameter: Treatment Value: 5mM NO vs. No Treatment
  misc_feature: MA Experiment ID: 108527 Result: Down-regulated in Transcription
  misc_feature: MA Experiment 108527 PARAMETER Experiment Name: Zm_5mM_NO_P Parameter: Age (day) Value: 8
  misc_feature: MA Experiment 108527 PARAMETER Experiment Name: Zm_5mM_NO_P Parameter: Organism Value: Zea mays
  misc_feature: MA Experiment 108527 PARAMETER Experiment Name: Zm_5mM_NO_P Parameter: Plant Line Value: 35A19
  misc_feature: MA Experiment 108527 PARAMETER Experiment Name: Zm_5mM_NO_P Parameter: Timepoint (hr) Value: 6
  misc_feature: MA Experiment 108527 PARAMETER Experiment Name: Zm_5mM_NO_P Parameter: Tissue Value: Aerial
  misc_feature: MA Experiment 108527 PARAMETER Experiment Name: Zm_5mM_NO_P Parameter: Treatment Value: 5mM NO vs. No Treatment
  misc_feature: MA Experiment ID: 108529 Result: Up-regulated in Transcription
  misc_feature: MA Experiment 108529 PARAMETER Experiment Name: Zm_Imbibed_Seeds_P Parameter: Age (day) Value: 5 vs. 2
  misc_feature: MA Experiment 108529 PARAMETER Experiment Name: Zm_Imbibed_Seeds_P Parameter: Organism Value: Zea mays
  misc_feature: MA Experiment 108529 PARAMETER Experiment Name: Zm_Imbibed_Seeds_P Parameter: Plant Line Value: 35A19
  misc_feature: MA Experiment 108529 PARAMETER Experiment Name: Zm_Imbibed_Seeds_P Parameter: Tissue Value: Roots vs. Embryo
  misc_feature: MA Experiment ID: 108544 Result: Down-regulated in Transcription
  misc_feature: MA Experiment ID: 20000477 Result: Up-regulated in Transcription
  misc_feature: MA Experiment 20000477 PARAMETER Experiment Name: Zm_5mM_SA_P Parameter: Age (day) Value: 10
  misc_feature: MA Experiment 20000477 PARAMETER Experiment Name: Zm_5mM_SA_P Parameter: Organism Value: Zea mays
  misc_feature: MA Experiment 20000477 PARAMETER Experiment Name: Zm_5mM_SA_P Parameter: Plant Line Value: 35A19
  misc_feature: MA Experiment 20000477 PARAMETER Experiment Name: Zm_5mM_SA_P Parameter: Timepoint (hr) Value: 48
  misc_feature: MA Experiment 20000477 PARAMETER Experiment Name: Zm_5mM_SA_P Parameter: Tissue Value: Aerial
  misc_feature: MA Experiment 20000477 PARAMETER Experiment Name: Zm_5mM_SA_P Parameter: Treatment Value: 5mM SA vs. No Treatment
  misc_feature: MA Experiment ID: 20000535 Result: Down-regulated in Transcription
  misc_feature: MA Experiment 20000535 PARAMETER Experiment Name: Zm_Hybrid_Seed_Dev_P Parameter: DAP Value: 30 vs. 12
  misc_feature: MA Experiment 20000535 PARAMETER Experiment Name: Zm_Hybrid_Seed_Dev_P Parameter: Organism Value: Zea mays
  misc_feature: MA Experiment 20000535 PARAMETER Experiment Name: Zm_Hybrid_Seed_Dev_P Parameter: Plant Line Value: 35A19
  misc_feature: MA Experiment 20000535 PARAMETER Experiment Name: Zm_Hybrid_Seed_Dev_P Parameter: Tissue Value: Embryo vs. Unfert Floret
  misc_feature: MA Experiment ID: 20000626 Result: Down-regulated in Transcription
  misc_feature: MA Experiment 20000626 PARAMETER Experiment Name: Zm_Herbicide-Treatments_P Parameter: Timepoint (hr) Value: 12
  misc_feature: MA Experiment 20000626 PARAMETER Experiment Name: Zm_Herbicide-Treatments_P Parameter: Tissue Value: Aerial
  misc_feature: MA Experiment 20000626 PARAMETER Experiment Name: Zm_Herbicide-Treatments_P Parameter: Treatment Value: Roundup vs. No Treatment
  misc_feature: MA Experiment ID: 20000627 Result: Down-regulated in Transcription
  misc_feature: MA Experiment 20000627 PARAMETER Experiment Name: Zm_Herbicide-Treatments_P Parameter: Timepoint (hr) Value: 12
  misc_feature: MA Experiment 20000627 PARAMETER Experiment Name: Zm_Herbicide-Treatments_P Parameter: Tissue Value: Aerial
  misc_feature: MA Experiment 20000627 PARAMETER Experiment Name: Zm_Herbicide-Treatments_P Parameter: Treatment Value: Finale vs. No Treatment
  misc_feature: MA Experiment ID: 20000628 Result: Down-regulated in Transcription
  misc_feature: MA Experiment 20000628 PARAMETER Experiment Name: Zm_Herbicide-Treatments_P Parameter: Timepoint (hr) Value: 12
  misc_feature: MA Experiment 20000628 PARAMETER Experiment Name: Zm_Herbicide-Treatments_P Parameter: Tissue Value: Aerial
  misc_feature: MA Experiment 20000628 PARAMETER Experiment Name: Zm_Herbicide-Treatments_P Parameter: Treatment Value: Glean vs. No Treatment
  misc_feature: MA Experiment ID: 20000629 Result: Down-regulated in Transcription
  misc_feature: MA Experiment 20000629 PARAMETER Experiment Name: Zm_Herbicide-Treatments_P Parameter: Timepoint (hr) Value: 12
  misc_feature: MA Experiment 20000629 PARAMETER Experiment Name: Zm_Herbicide-Treatments_P Parameter: Tissue Value: Aerial
  misc_feature: MA Experiment 20000629 PARAMETER Experiment Name: Zm_Herbicide-Treatments_P Parameter: Treatment Value: Trimec vs. No Treatment
gcacgagaccattacctagaacatcctaatcgaaaaattccattgacttgacacgctataaaatcccagctccatggccgcaaaccagcagctgcagcatcagcatcgttccatccatccatcctactatccagcttcagcccgggccagccgctccacagcagcaagcaagcaaggctgagaacgaacgaagcagcccgcatccgcatccatggccgccgtgctggtggcgaggcaggggcgcgagctgcagcggtacagccagagcacgggcgggcgcatcgtggtgggctgcatcccgtaccgcgtgcggcgcgacggcgagctggaggtgctggtgatcacgtcccagaaggggcacggcatgatgttccccaagggcgggtgggaggtggacgagtccatggacgaggccgcccggcgcgaggccctcgaggaggccggcgtgctcggcgacaccgagccggtcctcggcctctggcactacaagagccgccgctacgtggaccagacctacgagggcttcatgttcccgctccgcgtcgccgacgagctccaccagtggcccgagatggcgtcccgcaagcgcacctgggcaacggtgcagcaggcgatggacgggtgcccgcactggtggatgcgcgaggcgctggagcggctcgtcgcgcggcaagccgtgctgcagtctgccctctgatcgccgtcatcgactggggtaacaacagaggcggggaggcgcgaggcaccatgtgcgcacgccgccacggctctctctctctctctgtctcggtgcagcggcaggccggccggcccggcgttccgggtctggaatttggtcgccctcaccgggagagtcgaacggcgcgccgcgcggctcgtgtgctctggcgatgctttcttgtgaccccccctgaccccgaggcgcggagtcgtcgttggcaaataaaatcatcagatcgtttttagagggcggatggtttagacgaaatggaaaacaaaatctgaactggacgcctagtggaaggaaaagaaaaggaatagaacagcagcgcgaaacaattcggcgattctttcgagtaactgcacaaattgtaaaattttagtggtgactcgtttcttgaccttgggtggcaccgtggcagaattgttacgagctgttcaattcaaaaaagaagaagaagaaaaagtttc

SEQ ID NO: 11567 - protein, 161 aa, Zea mays subsp. mays
  peptide (1)..(161): Ceres Seq. ID no. 12376281
  misc_feature (23)..(153): Pfam Name: NUDIX domain Pfam Description: NUDIX domain
  misc_feature (5)..(157): Homolog of NCBI NO: 15223919 NR Description: hypothetical protein; protein id: At1g14860.1
  misc_feature (5)..(153): Homolog of NCBI NO: 18379275 NR Description: expressed protein; protein id: At2g01670.1, by cDNA: 8247., supported by cDNA: gi_13272382, supported by gi_15293192, supported by cDNA: gi_15724325 [Arabidopsis
  misc_feature (5)..(153): Homolog of NCBI NO: 21595695 NR Description: unknown [Arabidopsis thaliana]
  misc_feature (1)..(151): Homolog of NCBI NO: 15221055 NR Description: unknown protein; protein id: At1g18300.1 thaliana] >gi|6714298|gb|AAF25994.1|AC013354_13 F15H18.18 thaliana] >gi|8671772|gb|AAF78378.1|AC069551_11 T10O22.27
  misc_feature (1)..(158): Homolog of NCBI NO: 22330598 NR Description: unknown protein; protein id: At1g73540.1, by cDNA: gi_18252868 [Arabidopsis thaliana] unknown protein [Arabidopsis thaliana]
  misc_feature (1)..(158): Homolog of NCBI NO: 25367539 NR Description: unknown protein [imported] - Arabidopsis thaliana
  misc_feature (5)..(147): Homolog of NCBI NO: 38175436 NR Description: MutT-like protein [Oryza sativa (japonica
  misc_feature (5)..(147): Homolog of NCBI NO: 34900054 NR Description: MutT-like protein~contains ESTs
  misc_feature (5)..(147): Homolog of NCBI NO: 18399682 NR Description: expressed protein; protein id: At3g12600.1 thaliana] >gi|9294354|dbj|BAB02251.1| to unknown protein [Arabidopsis thaliana]
  misc_feature (3)..(151): Homolog of NCBI NO: 18391450 NR Description: expressed protein; protein id: At1g12880.1, by cDNA: gi_15810278, supported by cDNA: gi_20258974 [Arabidopsis >gi|15810279|gb|AAL07027.1| unknown protein [Arabidopsis
MAAVLVARQGRELQRYSQSTGGRIVVGCIPYRVRRDGELEVLVITSQKGHGMMFPKGGWEVDESMDEAARREALEEAGVLGDTEPVLGLWHYKSRRYVDQTYEGFMFPLRVADELHQWPEMASRKRTWATVQQAMDGCPHWWMREALERLVARQAVLQSAL

SEQ ID NO: 11568 - protein, 110 aa, Zea mays subsp. mays
  peptide (1)..(110): Ceres Seq. ID no. 12376282
  misc_feature (1)..(102): Pfam Name: NUDIX domain Pfam Description: NUDIX domain
  misc_feature (1)..(106): Homolog of NCBI NO: 15223919 NR Description: hypothetical protein; protein id: At1g14860.1
  misc_feature (1)..(102): Homolog of NCBI NO: 18379275 NR Description: expressed protein; protein id: At2g01670.1, by cDNA: 8247., supported by cDNA: gi_13272382, supported by gi_15293192, supported by cDNA: gi_15724325 [Arabidopsis
  misc_feature (1)..(102): Homolog of NCBI NO: 21595695 NR Description: unknown [Arabidopsis thaliana]
  misc_feature (1)..(100): Homolog of NCBI NO: 15221055 NR Description: unknown protein; protein id: At1g18300.1 thaliana] >gi|6714298|gb|AAF25994.1|AC013354_13 F15H18.18 thaliana] >gi|8671772|gb|AAF78378.1|AC069551_11 T10O22.27
  misc_feature (1)..(107): Homolog of NCBI NO: 22330598 NR Description: unknown protein; protein id: At1g73540.1, by cDNA: gi_18252868 [Arabidopsis thaliana] unknown protein [Arabidopsis thaliana]
  misc_feature (1)..(107): Homolog of NCBI NO: 25367539 NR Description: unknown protein [imported] - Arabidopsis thaliana
  misc_feature (1)..(96): Homolog of NCBI NO: 38175436 NR Description: MutT-like protein [Oryza sativa (japonica
  misc_feature (1)..(96): Homolog of NCBI NO: 34900054 NR Description: MutT-like protein~contains ESTs
  misc_feature (1)..(96): Homolog of NCBI NO: 18399682 NR Description: expressed protein; protein id: At3g12600.1 thaliana] >gi|9294354|dbj|BAB02251.1| to unknown protein [Arabidopsis thaliana]
  misc_feature (1)..(100): Homolog of NCBI NO: 18391450 NR Description: expressed protein; protein id: At1g12880.1, by cDNA: gi_15810278, supported by cDNA: gi_20258974 [Arabidopsis >gi|15810279|gb|AAL07027.1| unknown protein [Arabidopsis
MMFPKGGWEVDESMDEAARREALEEAGVLGDTEPVLGLWHYKSRRYVDQTYEGFMFPLRVADELHQWPEMASRKRTWATVQQAMDGCPHWWMREALERLVARQAVLQSAL

SEQ ID NO: 11569 - protein, 109 aa, Zea mays subsp. mays
  peptide (1)..(109): Ceres Seq. ID no. 12376283
  misc_feature (1)..(101): Pfam Name: NUDIX domain Pfam Description: NUDIX domain
  misc_feature (1)..(106): Homolog of NCBI NO: 22330598 NR Description: unknown protein; protein id: At1g73540.1, by cDNA: gi_18252868 [Arabidopsis thaliana] unknown protein [Arabidopsis thaliana]
  misc_feature (1)..(106): Homolog of NCBI NO: 25367539 NR Description: unknown protein [imported] - Arabidopsis thaliana
  misc_feature (1)..(95): Homolog of NCBI NO: 38175436 NR Description: MutT-like protein [Oryza sativa (japonica
  misc_feature (1)..(105): Homolog of NCBI NO: 15223919 NR Description: hypothetical protein; protein id: At1g14860.1
  misc_feature (1)..(101): Homolog of NCBI NO: 21595695 NR Description: unknown [Arabidopsis thaliana]
  misc_feature (1)..(99): Homolog of NCBI NO: 15221055 NR Description: unknown protein; protein id: At1g18300.1 thaliana] >gi|6714298|gb|AAF25994.1|AC013354_13 F15H18.18 thaliana] >gi|8671772|gb|AAF78378.1|AC069551_11 T10O22.27
  misc_feature (1)..(101): Homolog of NCBI NO: 18379275 NR Description: expressed protein; protein id: At2g01670.1, by cDNA: 8247., supported by cDNA: gi_13272382, supported by gi_15293192, supported by cDNA: gi_15724325 [Arabidopsis
  misc_feature (1)..(95): Homolog of NCBI NO: 34900054 NR Description: MutT-like protein~contains ESTs
  misc_feature (1)..(95): Homolog of NCBI NO: 18399682 NR Description: expressed protein; protein id: At3g12600.1 thaliana] >gi|9294354|dbj|BAB02251.1| to unknown protein [Arabidopsis thaliana]
  misc_feature (1)..(99): Homolog of NCBI NO: 18391450 NR Description: expressed protein; protein id: At1g12880.1, by cDNA: gi_15810278, supported by cDNA: gi_20258974 [Arabidopsis >gi|15810279|gb|AAL07027.1| unknown protein [Arabidopsis
MFPKGGWEVDESMDEAARREALEEAGVLGDTEPVLGLWHYKSRRYVDQTYEGFMFPLRVADELHQWPEMASRKRTWATVQQAMDGCPHWWMREALERLVARQAVLQSAL

SEQ ID NO: 11570 - DNA, 1310 bp, Zea mays subsp. mays
  misc_feature (1)..(1310): Ceres Seq. ID no. 12347716
  misc_feature: MA Experiment ID: 108535 Result: Up-regulated in Transcription
  misc_feature: MA Experiment 108535 PARAMETER Experiment Name: Zm_Meristem_P Parameter: Age (day) Value: 8
  misc_feature: MA Experiment 108535 PARAMETER Experiment Name: Zm_Meristem_P Parameter: Organism Value: Zea mays
  misc_feature: MA Experiment 108535 PARAMETER Experiment Name: Zm_Meristem_P Parameter: Plant Line Value: 35A19
  misc_feature: MA Experiment 108535 PARAMETER Experiment Name: Zm_Meristem_P Parameter: Tissue Value: Root Meristem vs. Above Root Meristem
catttaccactgaccctgtatttcgtgtcaccttgcgactccgacgaaccccaatcccgcgcgccggtgaccatggagttcatcgacccctgggactcccagtcccgcgctcgcgtcgtccattccggcgccaactccacttcgttctcctcctccaccgccaaagcacccctctccctccgccacgccgcatcttgcgccgccgcggccgtcgcacttctcgccgccgcgttctacctcctcccgacctaccagatcctctcctccctcctcatatggatcgcttcgtccctgctcctcgctcccttcgcgcccttgtcggccactggcggcgacatctccgtcggccgaggccgcgtcgttccggctccagaaccggccccagaacccacgccggaacccacgcccgccccccgccgcggccgtcgccagaacccagtcccgacgcccacaaaaccctcagatccgggcactccccccgtccaatcggccgcatcactgcatccgttgcagaaggcgacaactgcgggtggagccgtggtggacggcggcgagagggaggaggacgccggcgagtggactgaccaagagctggagctgctccggcggcagatggtgaagcacccggcgggtgagccccagcgctgggagaagatcgccgcggtgtttggcggccgccgcacgccggagaatgtcatccgggcggcaaagtcgggcgctcccgcggcgggaggaagctcgttcgagcagttcctacgcaagcggaagccgctcgatccgagggccgaggttgctgacactgcggacgatgcgggaggcgccgagagtgcggacgccgcttggagcgccggggatgaccgggccttgctgaatgctcttaaggagttcccgaaggacactgcaatgaggtgggagaaggtggcggcctctgtacccgggaagacaaaggccgcgtgcatgaagaggatcaccgagctcaagcgagacttcaggagcaccaagacggcatcggaagcagcaccataggcgaaacctgagaattttggtaggggtgccggactgaatgacatgcgctgcactggtttggctagcgaggaagaactttacatggctagctccagtgaaccatggaaacggcagaggattaactacactacggagagggccggagctatagaacagatcatgtaattttcctattgaactagagacagggtatcccttgatataggagaaactttgacttactactggacacatggcatgagacaggaagaacctgttcttgtttcaaactaaagcatgttttc

SEQ ID NO: 11571 - protein, 341 aa, Zea mays subsp. mays
  peptide (1)..(341): Ceres Seq. ID no. 12347717
  misc_feature (281)..(327): Pfam Name: Myb-like DNA-binding domain Pfam Description: Myb-like DNA-binding domain
  misc_feature (25)..(341): Homolog of NCBI NO: 34905190 NR Description: P0498E12.13 [Oryza sativa (japonica
  misc_feature (24)..(335): Homolog of NCBI NO: 9758732 NR Description: gene_id:MFC19.9~unknown protein [Arabidopsis
  misc_feature (25)..(335): Homolog of NCBI NO: 18422552 NR Description: expressed protein; protein id: At5g45420.1, by cDNA: gi_13605892 [Arabidopsis thaliana] AT5g45420/MFC19_9 [Arabidopsis thaliana]
  misc_feature (193)..(272): Homolog of NCBI NO: 15229761 NR Description: putative cell division related protein; protein At3g11450.1 [Arabidopsis thaliana]
  misc_feature (262)..(335): Homolog of NCBI NO: 15229761 NR Description: putative cell division related protein; protein At3g11450.1 [Arabidopsis thaliana]
  misc_feature (179)..(272): Homolog of NCBI NO: 15239928 NR Description: cell division related protein-like; protein id: [Arabidopsis thaliana] >gi|8978347|dbj|BAA98200.1| cell division
  misc_feature (268)..(334): Homolog of NCBI NO: 15239928 NR Description: cell division related protein-like; protein id: [Arabidopsis thaliana] >gi|8978347|dbj|BAA98200.1| cell division
  misc_feature (165)..(338): Homolog of NCBI NO: 32766539 NR Description: Unknown (protein for IMAGE:2640354) [Danio rerio]
  misc_feature (192)..(271): Homolog of NCBI NO: 4633127 NR Description: GlsA [Volvox carteri f. nagariensis]
  misc_feature (262)..(337): Homolog of NCBI NO: 4633127 NR Description: GlsA [Volvox carteri f. nagariensis]
HLPLTLYFVSPCDSDEPQSRAPVTMEFIDPWDSQSRARVVHSGANSTSFSSSTAKAPLSLRHAASCAAAAVALLAAAFYLLPTYQILSSLLIWIASSLLLAPFAPLSATGGDISVGRGRVVPAPEPAPEPTPEPTPAPRRGRRQNPVPTPTKPSDPGTPPVQSAASLHPLQKATTAGGAVVDGGEREEDAGEWTDQELELLRRQMVKHPAGEPQRWEKIAAVFGGRRTPENVIRAAKSGAPAAGGSSFEQFLRKRKPLDPRAEVADTADDAGGAESADAAWSAGDDRALLNALKEFPKDTAMRWEKVAASVPGKTKAACMKRITELKRDFRSTKTASEAAP

SEQ ID NO: 11572 - protein, 317 aa, Zea mays subsp. mays
  peptide (1)..(317): Ceres Seq. ID no. 12347718
  misc_feature (257)..(303): Pfam Name: Myb-like DNA-binding domain Pfam Description: Myb-like DNA-binding domain
  misc_feature (1)..(317): Homolog of NCBI NO: 34905190 NR Description: P0498E12.13 [Oryza sativa (japonica
  misc_feature (1)..(311): Homolog of NCBI NO: 9758732 NR Description: gene_id:MFC19.9~unknown protein [Arabidopsis
  misc_feature (1)..(311): Homolog of NCBI NO: 18422552 NR Description: expressed protein; protein id: At5g45420.1, by cDNA: gi_13605892 [Arabidopsis thaliana] AT5g45420/MFC19_9 [Arabidopsis thaliana]
  misc_feature (169)..(248): Homolog of NCBI NO: 15229761 NR Description: putative cell division related protein; protein At3g11450.1 [Arabidopsis thaliana]
  misc_feature (238)..(311): Homolog of NCBI NO: 15229761 NR Description: putative cell division related protein; protein At3g11450.1 [Arabidopsis thaliana]
  misc_feature (155)..(248): Homolog of NCBI NO: 15239928 NR Description: cell division related protein-like; protein id: [Arabidopsis thaliana] >gi|8978347|dbj|BAA98200.1| cell division
  misc_feature (244)..(310): Homolog of NCBI NO: 15239928 NR Description: cell division related protein-like; protein id: [Arabidopsis thaliana] >gi|8978347|dbj|BAA98200.1| cell division
  misc_feature (141)..(314): Homolog of NCBI NO: 32766539 NR Description: Unknown (protein for IMAGE:2640354) [Danio rerio]
  misc_feature (168)..(247): Homolog of NCBI NO: 4633127 NR Description: GlsA [Volvox carteri f. nagariensis]
  misc_feature (238)..(313): Homolog of NCBI NO: 4633127 NR Description: GlsA [Volvox carteri f. nagariensis]
MEFIDPWDSQSRARVVHSGANSTSFSSSTAKAPLSLRHAASCAAAAVALLAAAFYLLPTYQILSSLLIWIASSLLLAPFAPLSATGGDISVGRGRVVPAPEPAPEPTPEPTPAPRRGRRQNPVPTPTKPSDPGTPPVQSAASLHPLQKATTAGGAVVDGGEREEDAGEWTDQELELLRRQMVKHPAGEPQRWEKIAAVFGGRRTPENVIRAAKSGAPAAGGSSFEQFLRKRKPLDPRAEVADTADDAGGAESADAAWSAGDDRALLNALKEFPKDTAMRWEKVAASVPGKTKAACMKRITELKRDFRSTKTASEAAP

SEQ ID NO: 11573 - protein, 193 aa, Zea mays subsp. mays
  peptide (1)..(193): Ceres Seq. ID no. 12347719
FTTDPVFRVTLRLRRTPIPRAGDHGVHRPLGLPVPRSRRPFRRQLHFVLLLHRQSTPLPPPRRILRRRGRRTSRRRVLPPPDLPDPLLPPHMDRFVPAPRSLRALVGHWRRHLRRPRPRRSGSRTGPRTHAGTHARPPPRPSPEPSPDAHKTLRSGHSPRPIGRITASVAEGDNCGWSRGGRRREGGGRRRVD

SEQ ID NO: 11574 - DNA, 1162 bp, Zea mays subsp. mays; identical to SEQ ID NO: 8643
  misc_feature (1)..(1162): Ceres Seq. ID no. 12344858
  misc_feature: MA Experiment ID: 108535 Result: Up-regulated in Transcription
  misc_feature: MA Experiment 108535 PARAMETER Experiment Name: Zm_Meristem_P Parameter: Age (day) Value: 8
  misc_feature: MA Experiment 108535 PARAMETER Experiment Name: Zm_Meristem_P Parameter: Organism Value: Zea mays
  misc_feature: MA Experiment 108535 PARAMETER Experiment Name: Zm_Meristem_P Parameter: Plant Line Value: 35A19
  misc_feature: MA Experiment 108535 PARAMETER Experiment Name: Zm_Meristem_P Parameter: Tissue Value: Root Meristem vs. Above Root Meristem
  misc_feature: MA Experiment ID: 108544 Result: Down-regulated in Transcription
  misc_feature: MA Experiment ID: 108556 Result: Down-regulated in Transcription
  misc_feature: MA Experiment 108556 PARAMETER Experiment Name: Zm_Drought_P Parameter: Age (day) Value: 9
  misc_feature: MA Experiment 108556 PARAMETER Experiment Name: Zm_Drought_P Parameter: Organism Value: Zea mays
  misc_feature: MA Experiment 108556 PARAMETER Experiment Name: Zm_Drought_P Parameter: Plant Line Value: 35A19
  misc_feature: MA Experiment 108556 PARAMETER Experiment Name: Zm_Drought_P Parameter: Timepoint (hr) Value: 24
  misc_feature: MA Experiment 108556 PARAMETER Experiment Name: Zm_Drought_P Parameter: Tissue Value: Aerial
  misc_feature: MA Experiment 108556 PARAMETER Experiment Name: Zm_Drought_P Parameter: Treatment Value: Drought vs. No Drought
  misc_feature: MA Experiment ID: 20000477 Result: Down-regulated in Transcription
  misc_feature: MA Experiment 20000477 PARAMETER Experiment Name: Zm_5mM_SA_P Parameter: Age (day) Value: 10
  misc_feature: MA Experiment 20000477 PARAMETER Experiment Name: Zm_5mM_SA_P Parameter: Organism Value: Zea mays
  misc_feature: MA Experiment 20000477 PARAMETER Experiment Name: Zm_5mM_SA_P Parameter: Plant Line Value: 35A19
  misc_feature: MA Experiment 20000477 PARAMETER Experiment Name: Zm_5mM_SA_P Parameter: Timepoint (hr) Value: 48
  misc_feature: MA Experiment 20000477 PARAMETER Experiment Name: Zm_5mM_SA_P Parameter: Tissue Value: Aerial
  misc_feature: MA Experiment 20000477 PARAMETER Experiment Name: Zm_5mM_SA_P Parameter: Treatment Value: 5mM SA vs. No Treatment
  misc_feature: MA Experiment ID: 20000478 Result: Down-regulated in Transcription
  misc_feature: MA Experiment 20000478 PARAMETER Experiment Name: Zm_5mM_SA_P Parameter: Age (day) Value: 11
  misc_feature: MA Experiment 20000478 PARAMETER Experiment Name: Zm_5mM_SA_P Parameter: Organism Value: Zea mays
  misc_feature: MA Experiment 20000478 PARAMETER Experiment Name: Zm_5mM_SA_P Parameter: Plant Line Value: 35A19
  misc_feature: MA Experiment 20000478 PARAMETER Experiment Name: Zm_5mM_SA_P Parameter: Timepoint (hr) Value: 72
  misc_feature: MA Experiment 20000478 PARAMETER Experiment Name: Zm_5mM_SA_P Parameter: Tissue Value: Aerial
  misc_feature: MA Experiment 20000478 PARAMETER Experiment Name: Zm_5mM_SA_P Parameter: Treatment Value: 5mM SA vs. No Treatment
  misc_feature: MA Experiment ID: 20000479 Result: Down-regulated in Transcription
  misc_feature: MA Experiment 20000479 PARAMETER Experiment Name: Zm_Drought_P Parameter: Age (day) Value: 10
  misc_feature: MA Experiment 20000479 PARAMETER Experiment Name: Zm_Drought_P Parameter: Organism Value: Zea mays
  misc_feature: MA Experiment 20000479 PARAMETER Experiment Name: Zm_Drought_P Parameter: Plant Line Value: 35A19
  misc_feature: MA Experiment 20000479 PARAMETER Experiment Name: Zm_Drought_P Parameter: Timepoint (hr) Value: 48
  misc_feature: MA Experiment 20000479 PARAMETER Experiment Name: Zm_Drought_P Parameter: Tissue Value: Aerial
  misc_feature: MA Experiment 20000479 PARAMETER Experiment Name: Zm_Drought_P Parameter: Treatment Value: Drought vs. No Drought
  misc_feature: MA Experiment ID: 20000492 Result: Up-regulated in Transcription
  misc_feature: MA Experiment 20000492 PARAMETER Experiment Name: Zm_Hybrid_Seed_Dev_P Parameter: DAP Value: 12
  misc_feature: MA Experiment 20000492 PARAMETER Experiment Name: Zm_Hybrid_Seed_Dev_P Parameter: Organism Value: Zea mays
  misc_feature: MA Experiment 20000492 PARAMETER Experiment Name: Zm_Hybrid_Seed_Dev_P Parameter: Plant Line Value: 35A19
  misc_feature: MA Experiment 20000492 PARAMETER Experiment Name: Zm_Hybrid_Seed_Dev_P Parameter: Tissue Value: Fert Kernel vs. Unfert Floret
  misc_feature: MA Experiment ID: 20000632 Result: Down-regulated in Transcription
  misc_feature: MA Experiment 20000632 PARAMETER Experiment Name: Zm_Herbicide-Treatments_P Parameter: Timepoint (hr) Value: 4
  misc_feature: MA Experiment 20000632 PARAMETER Experiment Name: Zm_Herbicide-Treatments_P Parameter: Tissue Value: Aerial
  misc_feature: MA Experiment 20000632 PARAMETER Experiment Name: Zm_Herbicide-Treatments_P Parameter: Treatment Value: Glean vs. No Treatment

SEQ ID NO: 11575 - protein, 180 aa, Zea mays subsp. mays; identical to SEQ ID NO: 8644
  peptide (1)..(180): Ceres Seq. ID no. 12344859
  misc_feature (51)..(179): Pfam Name: Mpp10 protein Pfam Description: Mpp10 protein
  misc_feature (51)..(179): Pfam Name: Mpp10 protein Pfam Description: Mpp10 protein
  misc_feature (79)..(179): Homolog of NCBI NO: 35210494 NR Description: aspartic acid-rich protein aspolin2 [Theragra
  misc_feature (79)..(179): Homolog of NCBI NO: 23481405 NR Description: hypothetical protein [Plasmodium yoelii yoelii]
  misc_feature (76)..(172): Homolog of NCBI NO: 35210492 NR Description: aspartic acid-rich protein aspolin1 [Theragra
  misc_feature (76)..(172): Homolog of NCBI NO: 35210494 NR Description: aspartic acid-rich protein aspolin2 [Theragra
  misc_feature (69)..(172): Homolog of NCBI NO: 33284873 NR Description: SI:bZ1G18.2 (novel protein similar to human
  misc_feature (79)..(179): Homolog of NCBI NO: 23481405 NR Description: hypothetical protein [Plasmodium yoelii yoelii]
  misc_feature (76)..(172): Homolog of NCBI NO: 35210494 NR Description: aspartic acid-rich protein aspolin2 [Theragra
  misc_feature (79)..(172): Homolog of NCBI NO: 35210492 NR Description: aspartic acid-rich protein aspolin1 [Theragra
  misc_feature (79)..(172): Homolog of NCBI NO: 35210492 NR Description: aspartic acid-rich protein aspolin1 [Theragra
  misc_feature (79)..(172): Homolog of NCBI NO: 35210492 NR Description: aspartic acid-rich protein aspolin1 [Theragra
  misc_feature (79)..(172): Homolog of NCBI NO: 35210492 NR Description: aspartic acid-rich protein aspolin1 [Theragra
  misc_feature (79)..(172): Homolog of NCBI NO: 35210492 NR Description: aspartic acid-rich protein aspolin1 [Theragra
  misc_feature (69)..(172): Homolog of NCBI NO: 33284873 NR Description: SI:bZ1G18.2 (novel protein similar to human
  misc_feature (76)..(172): Homolog of NCBI NO: 35210492 NR Description: aspartic acid-rich protein aspolin1 [Theragra
  misc_feature (79)..(179): Homolog of NCBI NO: 35210494 NR Description: aspartic acid-rich protein aspolin2 [Theragra
  misc_feature (79)..(172): Homolog of NCBI NO: 35210492 NR Description: aspartic acid-rich protein aspolin1 [Theragra
  misc_feature (79)..(172): Homolog of NCBI NO: 35210492 NR Description: aspartic acid-rich protein aspolin1 [Theragra
  misc_feature (79)..(172): Homolog of NCBI NO: 35210492 NR Description: aspartic acid-rich protein aspolin1 [Theragra
  misc_feature (79)..(172): Homolog of NCBI NO: 35210492 NR Description: aspartic acid-rich protein aspolin1 [Theragra
  misc_feature (79)..(172): Homolog of NCBI NO: 35210492 NR Description: aspartic acid-rich protein aspolin1 [Theragra

SEQ ID NO: 11576 - protein, 143 aa, Zea mays subsp. mays; identical to SEQ ID NO: 8645
  peptide (1)..(143): Ceres Seq. ID no. 12344860

SEQ ID NO: 11577 - protein, 132 aa, Zea mays subsp. mays; identical to SEQ ID NO: 8646
  peptide (1)..(132): Ceres Seq. ID no. 12344861

SEQ ID NO: 11578 - DNA, 740 bp, Zea mays subsp. mays
  misc_feature (1)..(740): Ceres Seq. ID no. 12404680
  misc_feature: MA Experiment ID: 108522 Result: Down-regulated in Transcription
  misc_feature: MA Experiment 108522 PARAMETER Experiment Name: Zm_42deg_Heat_P Parameter: Age (day) Value: 8
  misc_feature: MA Experiment 108522 PARAMETER Experiment Name: Zm_42deg_Heat_P Parameter: Organism Value: Zea mays
  misc_feature: MA Experiment 108522 PARAMETER Experiment Name: Zm_42deg_Heat_P Parameter: Plant Line Value: 35A19
  misc_feature: MA Experiment 108522 PARAMETER Experiment Name: Zm_42deg_Heat_P Parameter: Temperature (deg C) Value: 42 vs. 22
  misc_feature: MA Experiment 108522 PARAMETER Experiment Name: Zm_42deg_Heat_P Parameter: Timepoint (hr) Value: 1
  misc_feature: MA Experiment 108522 PARAMETER Experiment Name: Zm_42deg_Heat_P Parameter: Tissue Value: Aerial
  misc_feature: MA Experiment ID: 108527 Result: Down-regulated in Transcription
  misc_feature: MA Experiment 108527 PARAMETER Experiment Name: Zm_5mM_NO_P Parameter: Age (day) Value: 8
  misc_feature: MA Experiment 108527 PARAMETER Experiment Name: Zm_5mM_NO_P Parameter: Organism Value: Zea mays
  misc_feature: MA Experiment 108527 PARAMETER Experiment Name: Zm_5mM_NO_P Parameter: Plant Line Value: 35A19
  misc_feature: MA Experiment 108527 PARAMETER Experiment Name: Zm_5mM_NO_P Parameter: Timepoint (hr) Value: 6
  misc_feature: MA Experiment 108527 PARAMETER Experiment Name: Zm_5mM_NO_P Parameter: Tissue Value: Aerial
  misc_feature: MA Experiment 108527 PARAMETER Experiment Name: Zm_5mM_NO_P Parameter: Treatment Value: 5mM NO vs. No Treatment
  misc_feature: MA Experiment ID: 108529 Result: Up-regulated in Transcription
  misc_feature: MA Experiment 108529 PARAMETER Experiment Name: Zm_Imbibed_Seeds_P Parameter: Age (day) Value: 5 vs. 2
  misc_feature: MA Experiment 108529 PARAMETER Experiment Name: Zm_Imbibed_Seeds_P Parameter: Organism Value: Zea mays
  misc_feature: MA Experiment 108529 PARAMETER Experiment Name: Zm_Imbibed_Seeds_P Parameter: Plant Line Value: 35A19
  misc_feature: MA Experiment 108529 PARAMETER Experiment Name: Zm_Imbibed_Seeds_P Parameter: Tissue Value: Roots vs. Embryo
  misc_feature: MA Experiment ID: 108533 Result: Down-regulated in Transcription
  misc_feature: MA Experiment 108533 PARAMETER Experiment Name: Zm_4deg_Cold_P Parameter: Age (hr) Value: 8
  misc_feature: MA Experiment 108533 PARAMETER Experiment Name: Zm_4deg_Cold_P Parameter: Organism Value: Zea mays
  misc_feature: MA Experiment 108533 PARAMETER Experiment Name: Zm_4deg_Cold_P Parameter: Plant Line Value: 35A19
  misc_feature: MA Experiment 108533 PARAMETER Experiment Name: Zm_4deg_Cold_P Parameter: Temperature (deg C) Value: 4 vs. 22
  misc_feature: MA Experiment 108533 PARAMETER Experiment Name: Zm_4deg_Cold_P Parameter: Timepoint (hr) Value: 1
  misc_feature: MA Experiment 108533 PARAMETER Experiment Name: Zm_4deg_Cold_P Parameter: Tissue Value: Aerial
  misc_feature: MA Experiment ID: 108534 Result: Down-regulated in Transcription
  misc_feature: MA Experiment 108534 PARAMETER Experiment Name: Zm_4deg_Cold_P Parameter: Age (hr) Value: 8
  misc_feature: MA Experiment 108534 PARAMETER Experiment Name: Zm_4deg_Cold_P Parameter: Organism Value: Zea mays
  misc_feature: MA Experiment 108534 PARAMETER Experiment Name: Zm_4deg_Cold_P Parameter: Plant Line Value: 35A19
  misc_feature: MA Experiment 108534 PARAMETER Experiment Name: Zm_4deg_Cold_P Parameter: Temperature (deg C) Value: 4 vs. 22
  misc_feature: MA Experiment 108534 PARAMETER Experiment Name: Zm_4deg_Cold_P Parameter: Timepoint (hr) Value: 6
  misc_feature: MA Experiment 108534 PARAMETER Experiment Name: Zm_4deg_Cold_P Parameter: Tissue Value: Aerial
  misc_feature: MA Experiment ID: 108535 Result: Down-regulated in Transcription
  misc_feature: MA Experiment 108535 PARAMETER Experiment Name: Zm_Meristem_P Parameter: Age (day) Value: 8
  misc_feature: MA Experiment 108535 PARAMETER Experiment Name: Zm_Meristem_P Parameter: Organism Value: Zea mays
  misc_feature: MA Experiment 108535 PARAMETER Experiment Name: Zm_Meristem_P Parameter: Plant Line Value: 35A19
  misc_feature: MA Experiment 108535 PARAMETER Experiment Name: Zm_Meristem_P Parameter: Tissue Value: Root Meristem vs. Above Root Meristem
  misc_feature: MA Experiment ID: 108536 Result: Up-regulated in Transcription
  misc_feature: MA Experiment 108536 PARAMETER Experiment Name: Zm_Meristem_P Parameter: Age (day) Value: 8
  misc_feature: MA Experiment 108536 PARAMETER Experiment Name: Zm_Meristem_P Parameter: Organism Value: Zea mays
  misc_feature: MA Experiment 108536 PARAMETER Experiment Name: Zm_Meristem_P Parameter: Plant Line Value: 35A19
  misc_feature: MA Experiment 108536 PARAMETER Experiment Name: Zm_Meristem_P Parameter: Tissue Value: Shoot Meristem vs. Above Shoot Meristem
  misc_feature: MA Experiment ID: 108543 Result: Up-regulated in Transcription
  misc_feature: MA Experiment ID: 108544 Result: Up-regulated in Transcription
  misc_feature: MA Experiment ID: 108597 Result: Up-regulated in Transcription
  misc_feature: MA Experiment 108597 PARAMETER Experiment Name: Zm_100uM_ABA_P Parameter: Age (day) Value: 9
  misc_feature: MA Experiment 108597 PARAMETER Experiment Name: Zm_100uM_ABA_P Parameter: Organism Value: Zea mays
  misc_feature: MA Experiment 108597 PARAMETER Experiment Name: Zm_100uM_ABA_P Parameter: Plant Line Value: 35A19
  misc_feature: MA Experiment 108597 PARAMETER Experiment Name: Zm_100uM_ABA_P Parameter: Timepoint (hr) Value: 24
  misc_feature: MA Experiment 108597 PARAMETER Experiment Name: Zm_100uM_ABA_P Parameter: Tissue Value: Aerial
  misc_feature: MA Experiment 108597 PARAMETER Experiment Name: Zm_100uM_ABA_P Parameter: Treatment Value: 100uM ABA vs. No Treatment
  misc_feature: MA Experiment ID: 20000477 Result: Up-regulated in Transcription
  misc_feature: MA Experiment 20000477 PARAMETER Experiment Name: Zm_5mM_SA_P Parameter: Age (day) Value: 10
  misc_feature: MA Experiment 20000477 PARAMETER Experiment Name: Zm_5mM_SA_P Parameter: Organism Value: Zea mays
  misc_feature: MA Experiment 20000477 PARAMETER Experiment Name: Zm_5mM_SA_P Parameter: Plant Line Value: 35A19
  misc_feature: MA Experiment 20000477 PARAMETER Experiment Name: Zm_5mM_SA_P Parameter: Timepoint (hr) Value: 48
  misc_feature: MA Experiment 20000477 PARAMETER Experiment Name: Zm_5mM_SA_P Parameter: Tissue Value: Aerial
  misc_feature: MA Experiment 20000477 PARAMETER Experiment Name: Zm_5mM_SA_P Parameter: Treatment Value: 5mM SA vs. No Treatment
  misc_feature: MA Experiment ID: 20000478 Result: Up-regulated in Transcription
  misc_feature: MA Experiment 20000478 PARAMETER Experiment Name: Zm_5mM_SA_P Parameter: Age (day) Value: 11
  misc_feature: MA Experiment 20000478 PARAMETER Experiment Name: Zm_5mM_SA_P Parameter: Organism Value: Zea mays
  misc_feature: MA Experiment 20000478 PARAMETER Experiment Name: Zm_5mM_SA_P Parameter: Plant Line Value: 35A19
  misc_feature: MA Experiment 20000478 PARAMETER Experiment Name: Zm_5mM_SA_P Parameter: Timepoint (hr) Value: 72
  misc_feature: MA Experiment 20000478 PARAMETER Experiment Name: Zm_5mM_SA_P Parameter: Tissue Value: Aerial
  misc_feature: MA Experiment 20000478 PARAMETER Experiment Name: Zm_5mM_SA_P Parameter: Treatment Value: 5mM SA vs. No Treatment
  misc_feature: MA Experiment ID: 20000535 Result: Down-regulated in Transcription
  misc_feature: MA Experiment 20000535 PARAMETER Experiment Name: Zm_Hybrid_Seed_Dev_P Parameter: DAP Value: 30 vs. 12
  misc_feature: MA Experiment 20000535 PARAMETER Experiment Name: Zm_Hybrid_Seed_Dev_P Parameter: Organism Value: Zea mays
  misc_feature: MA Experiment 20000535 PARAMETER Experiment Name: Zm_Hybrid_Seed_Dev_P Parameter: Plant Line Value: 35A19
  misc_feature: MA Experiment 20000535 PARAMETER Experiment Name: Zm_Hybrid_Seed_Dev_P Parameter: Tissue Value: Embryo vs. Unfert Floret
aacacaggcaccacagctgagagacgatagaagcacgcagcagctgaaagggaggggaactaggaatgaaggggagcaaggtccacgagcacgaggcagacgtccccgcctccgacctctgggcgatctacggctccctccgcgccgcgagactcctgccggagctgctcccgcacgtgctcgccaaggtggagctcgtcagcggcgacggcggtgttggtaccatcttgcagctaatatttcctcccggtgagtataagatacgtgtgtatgctgccataatatctttgatgttggatatgctaagatactagtagtaaagttttaattgctctgctccgctccgctcctagggattcctgggctacagagttacaaggagaagttcatcaaagttgacaacgagaactatatcaaggaggcagaagccattgatggcgacattttgaagctggggttcgaggcatacatgatacggtttgagatcattccaaaaggggccaattcgtctgtcatcaggtcgactatcgagtatgtgattgctgatgcgcacccggagctcgaagctatggtgagcacagcaactttggctgaaactgctcagaaattttccgagtttgctaaggcgaagtaggtcccataaggaatgtcttgaaatatatatatatatatctcgagagcggagtttatgtttatcatgaaacaagtgaaatacagtttcagcgctttcgtgttgcgcc

SEQ ID NO: 11579 - protein, 83 aa, Zea mays subsp. mays
  peptide (1)..(83): Ceres Seq. ID no. 12404681
TQAPQLRDDRSTQQLKGRGTRNEGEQGPRARGRRPRLRPLGDLRLPPRRETPAGAAPARARQGGARQRRRRCWYHLAANISSR

SEQ ID NO: 11580 - protein, 82 aa, Zea mays subsp. mays
  peptide (1)..(82): Ceres Seq. ID no. 12404682
  misc_feature (1)..(63): Pfam Name: Pathogenesis-related protein Bet v I family Pfam Description: Pathogenesis-related protein Bet v I family
  misc_feature (1)..(62): Homolog of NCBI NO: 38347061 NR Description: OSJNBa0006A01.2 [Oryza sativa (japonica
  misc_feature (1)..(64): Homolog of NCBI NO: 38347062 NR Description: OSJNBa0006A01.3 [Oryza sativa (japonica
MKGSKVHEHEADVPASDLWAIYGSLRAARLLPELLPHVLAKVELVSGDGGVGTILQLIFPPGEYKIRVYAAIISLMLDMLRY

SEQ ID NO: 11581 - protein, 54 aa, Zea mays subsp. mays
  peptide (1)..(54): Ceres Seq. ID no. 12404683
  misc_feature (1)..(52): Homolog of NCBI NO: 38347061 NR Description: OSJNBa0006A01.2 [Oryza sativa (japonica
  misc_feature (1)..(52): Homolog of NCBI NO: 38347062 NR Description: OSJNBa0006A01.3 [Oryza sativa (japonica
MIRFEIIPKGANSSVIRSTIEYVIADAHPELEAMVSTATLAETAQKFSEFAKAK

SEQ ID NO: 11582 - DNA, 923 bp, Zea mays subsp. mays
  misc_feature (1)..(923): Ceres Seq. ID no. 12342226
  misc_feature: MA Experiment ID: 108515 Result: Up-regulated in Transcription
  misc_feature: MA Experiment 108515 PARAMETER Experiment Name: Zm_2mM_SA_P Parameter: Age (day) Value: 8
  misc_feature: MA Experiment 108515 PARAMETER Experiment Name: Zm_2mM_SA_P Parameter: Organism Value: Zea mays
  misc_feature: MA Experiment 108515 PARAMETER Experiment Name: Zm_2mM_SA_P Parameter: Plant Line Value: 35A19
  misc_feature: MA Experiment 108515 PARAMETER Experiment Name: Zm_2mM_SA_P Parameter: Timepoint (hr) Value: 12
  misc_feature: MA Experiment 108515 PARAMETER Experiment Name: Zm_2mM_SA_P Parameter: Tissue Value: Aerial
  misc_feature: MA Experiment 108515 PARAMETER Experiment Name: Zm_2mM_SA_P Parameter: Treatment Value: 2mM SA vs. No Treatment
  misc_feature: MA Experiment ID: 108523 Result: Down-regulated in Transcription
  misc_feature: MA Experiment 108523 PARAMETER Experiment Name: Zm_42deg_Heat_P Parameter: Age (day) Value: 8
  misc_feature: MA Experiment 108523 PARAMETER Experiment Name: Zm_42deg_Heat_P Parameter: Organism Value: Zea mays
  misc_feature: MA Experiment 108523 PARAMETER Experiment Name: Zm_42deg_Heat_P Parameter: Plant Line Value: 35A19
  misc_feature: MA Experiment 108523 PARAMETER Experiment Name: Zm_42deg_Heat_P Parameter: Temperature (deg C) Value: 42 vs. 22
  misc_feature: MA Experiment 108523 PARAMETER Experiment Name: Zm_42deg_Heat_P Parameter: Timepoint (hr) Value: 6
  misc_feature: MA Experiment 108523 PARAMETER Experiment Name: Zm_42deg_Heat_P Parameter: Tissue Value: Aerial
  misc_feature: MA Experiment ID: 108527 Result: Up-regulated in Transcription
  misc_feature: MA Experiment 108527 PARAMETER Experiment Name: Zm_5mM_NO_P Parameter: Age (day) Value: 8
  misc_feature: MA Experiment 108527 PARAMETER Experiment Name: Zm_5mM_NO_P Parameter: Organism Value: Zea mays
  misc_feature: MA Experiment 108527 PARAMETER Experiment Name: Zm_5mM_NO_P Parameter: Plant Line Value: 35A19
  misc_feature: MA Experiment 108527 PARAMETER Experiment Name: Zm_5mM_NO_P Parameter: Timepoint (hr) Value: 6
  misc_feature: MA Experiment 108527 PARAMETER Experiment Name: Zm_5mM_NO_P Parameter: Tissue Value: Aerial
  misc_feature: MA Experiment 108527 PARAMETER Experiment Name: Zm_5mM_NO_P Parameter: Treatment Value: 5mM NO vs. No Treatment
  misc_feature: MA Experiment ID: 108528 Result: Down-regulated in Transcription
  misc_feature: MA Experiment 108528 PARAMETER Experiment Name: Zm_Imbibed_Seeds_P Parameter: Age (day) Value: 5 vs. 2
  misc_feature: MA Experiment 108528 PARAMETER Experiment Name: Zm_Imbibed_Seeds_P Parameter: Organism Value: Zea mays
  misc_feature: MA Experiment 108528 PARAMETER Experiment Name: Zm_Imbibed_Seeds_P Parameter: Plant Line Value: 35A19
  misc_feature: MA Experiment 108528 PARAMETER Experiment Name: Zm_Imbibed_Seeds_P Parameter: Tissue Value: Aerial vs. Embryo
  misc_feature: MA Experiment ID: 108535 Result: Down-regulated in Transcription
  misc_feature: MA Experiment 108535 PARAMETER Experiment Name: Zm_Meristem_P Parameter: Age (day) Value: 8
  misc_feature: MA Experiment 108535 PARAMETER Experiment Name: Zm_Meristem_P Parameter: Organism Value: Zea mays
  misc_feature: MA Experiment 108535 PARAMETER Experiment Name: Zm_Meristem_P Parameter: Plant Line Value: 35A19
  misc_feature: MA Experiment 108535 PARAMETER Experiment Name: Zm_Meristem_P Parameter: Tissue Value: Root Meristem vs. Above Root Meristem
  misc_feature: MA Experiment ID: 108544 Result: Up-regulated in Transcription
  misc_feature: MA Experiment ID: 108545 Result: Down-regulated in Transcription
  misc_feature: MA Experiment 108545 PARAMETER Experiment Name: Zm_Imbibed_Seeds_P Parameter: Age (day) Value: 3 vs. 2
  misc_feature: MA Experiment 108545 PARAMETER Experiment Name: Zm_Imbibed_Seeds_P Parameter: Organism Value: Zea mays
  misc_feature: MA Experiment 108545 PARAMETER Experiment Name: Zm_Imbibed_Seeds_P Parameter: Plant Line Value: 35A19
  misc_feature: MA Experiment 108545 PARAMETER Experiment Name: Zm_Imbibed_Seeds_P Parameter: Tissue Value: Aerial vs. Embryo
  misc_feature: MA Experiment ID: 108546 Result: Up-regulated in Transcription
  misc_feature: MA Experiment 108546 PARAMETER Experiment Name: Zm_Imbibed_Seeds_P Parameter: Age (day) Value: 3 vs. 2
  misc_feature: MA Experiment 108546 PARAMETER Experiment Name: Zm_Imbibed_Seeds_P Parameter: Organism Value: Zea mays
  misc_feature: MA Experiment 108546 PARAMETER Experiment Name: Zm_Imbibed_Seeds_P Parameter: Plant Line Value: 35A19
  misc_feature: MA Experiment 108546 PARAMETER Experiment Name: Zm_Imbibed_Seeds_P Parameter: Tissue Value: Roots vs. Embryo
  misc_feature: MA Experiment ID: 108547 Result: Down-regulated in Transcription
  misc_feature: MA Experiment 108547 PARAMETER Experiment Name: Zm_Imbibed_Seeds_P Parameter: Age (day) Value: 4 vs. 2
  misc_feature: MA Experiment 108547 PARAMETER Experiment Name: Zm_Imbibed_Seeds_P Parameter: Organism Value: Zea mays
  misc_feature: MA Experiment 108547 PARAMETER Experiment Name: Zm_Imbibed_Seeds_P Parameter: Plant Line Value: 35A19
  misc_feature: MA Experiment 108547 PARAMETER Experiment Name: Zm_Imbibed_Seeds_P Parameter: Tissue Value: Aerial vs. Embryo
  misc_feature: MA Experiment ID: 20000108 Result: Down-regulated in Transcription
  misc_feature: MA Experiment 20000108 PARAMETER Experiment Name: Zm_Root-Tips_P Parameter: Age (day) Value: 12
  misc_feature: MA Experiment 20000108 PARAMETER Experiment Name: Zm_Root-Tips_P Parameter: Organism Value: Zea mays
  misc_feature: MA Experiment 20000108 PARAMETER Experiment Name: Zm_Root-Tips_P Parameter: Tissue Value: Root tips vs. Root mid region    35
  misc_feature: MA Experiment 20000108 PARAMETER Experiment Name: Zm_Root-Tips_P Parameter: Tissue Value: Root tips vs. Root mid region   Sequence Listing-Misc Features (4)
  misc_feature: MA Experiment ID: 20000478 Result: Up-regulated in Transcription
  misc_feature: MA Experiment 20000478 PARAMETER Experiment Name: Zm_5mM_SA_P Parameter: Age (day) Value: 11
  misc_feature: MA Experiment 20000478 PARAMETER Experiment Name: Zm_5mM_SA_P Parameter: Organism Value: Zea mays
  misc_feature: MA Experiment 20000478 PARAMETER Experiment Name: Zm_5mM_SA_P Parameter: Plant Line Value: 35A19
  misc_feature: MA Experiment 20000478 PARAMETER Experiment Name: Zm_5mM_SA_P Parameter: Timepoint (hr) Value: 72
  misc_feature: MA Experiment 20000478 PARAMETER Experiment Name: Zm_5mM_SA_P Parameter: Tissue Value: Aerial
  misc_feature: MA Experiment 20000478 PARAMETER Experiment Name: Zm_5mM_SA_P Parameter: Treatment Value: 5mM SA vs. No Treatment
  misc_feature: MA Experiment ID: 20000479 Result: Up-regulated in Transcription
  misc_feature: MA Experiment 20000479 PARAMETER Experiment Name: Zm_Drought_P Parameter: Age (day) Value: 10
  misc_feature: MA Experiment 20000479 PARAMETER Experiment Name: Zm_Drought_P Parameter: Organism Value: Zea mays
  misc_feature: MA Experiment 20000479 PARAMETER Experiment Name: Zm_Drought_P Parameter: Plant Line Value: 35A19
  misc_feature: MA Experiment 20000479 PARAMETER Experiment Name: Zm_Drought_P Parameter: Timepoint (hr) Value: 48
  misc_feature: MA Experiment 20000479 PARAMETER Experiment Name: Zm_Drought_P Parameter: Tissue Value: Aerial
  misc_feature: MA Experiment 20000479 PARAMETER Experiment Name: Zm_Drought_P Parameter: Treatment Value: Drought vs. No Drought
  misc_feature: MA Experiment ID: 20000535 Result: Down-regulated in Transcription
  misc_feature: MA Experiment 20000535 PARAMETER Experiment Name: Zm_Hybrid_Seed_Dev_P Parameter: DAP Value: 30 vs. 12
  misc_feature: MA Experiment 20000535 PARAMETER Experiment Name: Zm_Hybrid_Seed_Dev_P Parameter: Organism Value: Zea mays
  misc_feature: MA Experiment 20000535 PARAMETER Experiment Name: Zm_Hybrid_Seed_Dev_P Parameter: Plant Line Value: 35A19
  misc_feature: MA Experiment 20000535 PARAMETER Experiment Name: Zm_Hybrid_Seed_Dev_P Parameter: Tissue Value: Embryo vs. Unfert Floret
  misc_feature: MA Experiment ID: 20000626 Result: Up-regulated in Transcription
  misc_feature: MA Experiment 20000626 PARAMETER Experiment Name: Zm_Herbicide-Treatments_P Parameter: Timepoint (hr) Value: 12
  misc_feature: MA Experiment 20000626 PARAMETER Experiment Name: Zm_Herbicide-Treatments_P Parameter: Tissue Value: Aerial
  misc_feature: MA Experiment 20000626 PARAMETER Experiment Name: Zm_Herbicide-Treatments_P Parameter: Treatment Value: Roundup vs. No Treatment
acaaaagttttagttccaactgggagagctagcatggcaagttcgcgctgctttgagaacccgccggtgctggagccggccagcggaggaggcgaggtggttgacgacttcggcgggcagaaggcctacgtcagcggctccgccgggtccaaggccgccgtcgtcctcatctccgacgccttcgggttcgaagcgccaaacctgaggaagatagccgacaaagttgcttcgctcggttacttcgttgtggtgcccgatttcctgcatggggatccatatgaccccagcaataatgcccatagcaatcctggaacgtggatacagtcgcacaatccgcaaacggcattcgaagaggcaaaaccggtaattgcggctataaaggagaagggtgtgtcgagcatcggagctgcaggttactgttggggcgcaaaggtggttgtggaactggcgaaagttcacgagatccaggctgctgtgttggcacacccttctttactaactgtcgatgatatgaaagatgtcaagtgccccatttccatacttggagctgaaatcgacaggtcagccccgcctgaattgctaaagcagtttgagcaagttctttcagcgaaccccgaggtcgatcactttgtcaaggtttttcctggcgtagcgcatggatgggctgtgaggtacagcgacgacgacgcagcggctgtcacgagtgcggaggaagctttgcgcgacatgagccactggttcaacaagtacctgaactgaattatgtggcggcatatgtgcgtgcaataagctcctaatggtgaacattatgcagggcccccatgctatgcgtgtgttttaaaagtcctcttagtggtggtatttgtactggtctcttacgcaatttttataacatttatcgagaataaagtgatgacacggtg

SEQ ID NO: 11583 - protein, 252 aa, Zea mays subsp. mays
  peptide (1)..(252): Ceres Seq. ID no. 12342227
  misc_feature (42)..(251): Pfam Name: Dienelactone hydrolase family Pfam Description: Dienelactone hydrolase family
  misc_feature (12)..(251): Homolog of NCBI NO: 18403820 NR Description: expressed protein; protein id: At3g23600.1, by cDNA: 11339., supported by cDNA: gi_17381243, supported by gi_20453364 [Arabidopsis thaliana] >gi|9294516|dbj|BAB02778.1|
  misc_feature (12)..(251): Homolog of NCBI NO: 18403812 NR Description: expressed protein; protein id: At3g23570.1, by cDNA: gi_13899072 [Arabidopsis thaliana]
  misc_feature (12)..(251): Homolog of NCBI NO: 24899687 NR Description: Unknown protein [Arabidopsis thaliana]
  misc_feature (3)..(251): Homolog of NCBI NO: 40253303 NR Description: putative Endo-1,3;1,4-beta-D-glucanase precursor
  misc_feature (8)..(251): Homolog of NCBI NO: 40253306 NR Description: putative Endo-1,3;1,4-beta-D-glucanase precursor
  misc_feature (69)..(251): Homolog of NCBI NO: 9294513 NR Description: contains similarity to endo-1,3-1,4-beta-D-
  misc_feature (13)..(207): Homolog of NCBI NO: 8928122 NR Description: Endo-1,3;1,4-beta-D-glucanase precursor
  misc_feature (81)..(251): Homolog of NCBI NO: 40253308 NR Description: Endo-1,3;1,4-beta-D-glucanase precursor-like
  misc_feature (41)..(252): Homolog of NCBI NO: 38181938 NR Description: Unknown (protein for MGC:76315) [Silurana
  misc_feature (41)..(251): Homolog of NCBI NO: 31712014 NR Description: RIKEN cDNA 2310016A09 [Mus musculus]
TKVLVPTGRASMASSRCFENPPVLEPASGGGEVVDDFGGQKAYVSGSAGSKAAVVLISDAFGFEAPNLRKIADKVASLGYFVVVPDFLHGDPYDPSNNAHSNPGTWIQSHNPQTAFEEAKPVIAAIKEKGVSSIGAAGYCWGAKVVVELAKVHEIQAAVLAHPSLLTVDDMKDVKCPISILGAEIDRSAPPELLKQFEQVLSANPEVDHFVKVFPGVAHGWAVRYSDDDAAAVTSAEEALRDMSHWFNKYLN

SEQ ID NO: 11584 - protein, 241 aa, Zea mays subsp. mays
  peptide (1)..(241): Ceres Seq. ID no. 12342228
  misc_feature (31)..(240): Pfam Name: Dienelactone hydrolase family Pfam Description: Dienelactone hydrolase family
  misc_feature (1)..(240): Homolog of NCBI NO: 18403820 NR Description: expressed protein; protein id: At3g23600.1, by cDNA: 11339., supported by cDNA: gi_17381243, supported by gi_20453364 [Arabidopsis thaliana] >gi|9294516|dbj|BAB02778.1|
  misc_feature (1)..(240): Homolog of NCBI NO: 18403812 NR Description: expressed protein; protein id: At3g23570.1, by cDNA: gi_13899072 [Arabidopsis thaliana]
  misc_feature (1)..(240): Homolog of NCBI NO: 24899687 NR Description: Unknown protein [Arabidopsis thaliana]
  misc_feature (1)..(240): Homolog of NCBI NO: 40253303 NR Description: putative Endo-1,3;1,4-beta-D-glucanase precursor
  misc_feature (1)..(240): Homolog of NCBI NO: 40253306 NR Description: putative Endo-1,3;1,4-beta-D-glucanase precursor
  misc_feature (58)..(240): Homolog of NCBI NO: 9294513 NR Description: contains similarity to endo-1,3-1,4-beta-D-
  misc_feature (2)..(196): Homolog of NCBI NO: 8928122 NR Description: Endo-1,3;1,4-beta-D-glucanase precursor
  misc_feature (70)..(240): Homolog of NCBI NO: 40253308 NR Description: Endo-1,3;1,4-beta-D-glucanase precursor-like
  misc_feature (30)..(241): Homolog of NCBI NO: 38181938 NR Description: Unknown (protein for MGC:76315) [Silurana
  misc_feature (30)..(240): Homolog of NCBI NO: 31712014 NR Description: RIKEN cDNA 2310016A09 [Mus musculus]
MASSRCFENPPVLEPASGGGEVVDDFGGQKAYVSGSAGSKAAVVLISDAFGFEAPNLRKIADKVASLGYFVVVPDFLHGDPYDPSNNAHSNPGTWIQSHNPQTAFEEAKPVIAAIKEKGVSSIGAAGYCWGAKVVVELAKVHEIQAAVLAHPSLLTVDDMKDVKCPISILGAEIDRSAPPELLKQFEQVLSANPEVDHFVKVFPGVAHGWAVRYSDDDAAAVTSAEEALRDMSHWFNKYLN

SEQ ID NO: 11585 - DNA, 771 bp, Zea mays subsp. mays
  misc_feature (1)..(771): Ceres Seq. ID no. 13492223
  misc_feature: MA Experiment ID: 108527 Result: Down-regulated in Transcription
  misc_feature: MA Experiment 108527 PARAMETER Experiment Name: Zm_5mM_NO_P Parameter: Age (day) Value: 8
  misc_feature: MA Experiment 108527 PARAMETER Experiment Name: Zm_5mM_NO_P Parameter: Organism Value: Zea mays
  misc_feature: MA Experiment 108527 PARAMETER Experiment Name: Zm_5mM_NO_P Parameter: Plant Line Value: 35A19
  misc_feature: MA Experiment 108527 PARAMETER Experiment Name: Zm_5mM_NO_P Parameter: Timepoint (hr) Value: 6
  misc_feature: MA Experiment 108527 PARAMETER Experiment Name: Zm_5mM_NO_P Parameter: Tissue Value: Aerial
  misc_feature: MA Experiment 108527 PARAMETER Experiment Name: Zm_5mM_NO_P Parameter: Treatment Value: 5mM NO vs. No Treatment
  misc_feature: MA Experiment ID: 108528 Result: Up-regulated in Transcription
  misc_feature: MA Experiment 108528 PARAMETER Experiment Name: Zm_Imbibed_Seeds_P Parameter: Age (day) Value: 5 vs. 2
  misc_feature: MA Experiment 108528 PARAMETER Experiment Name: Zm_Imbibed_Seeds_P Parameter: Organism Value: Zea mays
  misc_feature: MA Experiment 108528 PARAMETER Experiment Name: Zm_Imbibed_Seeds_P Parameter: Plant Line Value: 35A19
  misc_feature: MA Experiment 108528 PARAMETER Experiment Name: Zm_Imbibed_Seeds_P Parameter: Tissue Value: Aerial vs. Embryo
  misc_feature: MA Experiment ID: 108529 Result: Down-regulated in Transcription
  misc_feature: MA Experiment 108529 PARAMETER Experiment Name: Zm_Imbibed_Seeds_P Parameter: Age (day) Value: 5 vs. 2
  misc_feature: MA Experiment 108529 PARAMETER Experiment Name: Zm_Imbibed_Seeds_P Parameter: Organism Value: Zea mays
  misc_feature: MA Experiment 108529 PARAMETER Experiment Name: Zm_Imbibed_Seeds_P Parameter: Plant Line Value: 35A19
  misc_feature: MA Experiment 108529 PARAMETER Experiment Name: Zm_Imbibed_Seeds_P Parameter: Tissue Value: Roots vs. Embryo
  misc_feature: MA Experiment ID: 108530 Result: Up-regulated in Transcription
  misc_feature: MA Experiment 108530 PARAMETER Experiment Name: Zm_Imbibed_Seeds_P Parameter: Age (day) Value: 6 vs. 2
  misc_feature: MA Experiment 108530 PARAMETER Experiment Name: Zm_Imbibed_Seeds_P Parameter: Organism Value: Zea mays
  misc_feature: MA Experiment 108530 PARAMETER Experiment Name: Zm_Imbibed_Seeds_P Parameter: Plant Line Value: 35A19
  misc_feature: MA Experiment 108530 PARAMETER Experiment Name: Zm_Imbibed_Seeds_P Parameter: Tissue Value: Aerial vs. Embryo
  misc_feature: MA Experiment ID: 108536 Result: Down-regulated in Transcription
  misc_feature: MA Experiment 108536 PARAMETER Experiment Name: Zm_Meristem_P Parameter: Age (day) Value: 8
  misc_feature: MA Experiment 108536 PARAMETER Experiment Name: Zm_Meristem_P Parameter: Organism Value: Zea mays
  misc_feature: MA Experiment 108536 PARAMETER Experiment Name: Zm_Meristem_P Parameter: Plant Line Value: 35A19
  misc_feature: MA Experiment 108536 PARAMETER Experiment Name: Zm_Meristem_P Parameter: Tissue Value: Shoot Meristem vs. Above Shoot Meristem
  misc_feature: MA Experiment ID: 108543 Result: Up-regulated in Transcription
  misc_feature: MA Experiment ID: 108545 Result: Up-regulated in Transcription
  misc_feature: MA Experiment 108545 PARAMETER Experiment Name: Zm_Imbibed_Seeds_P Parameter: Age (day) Value: 3 vs. 2
  misc_feature: MA Experiment 108545 PARAMETER Experiment Name: Zm_Imbibed_Seeds_P Parameter: Organism Value: Zea mays
  misc_feature: MA Experiment 108545 PARAMETER Experiment Name: Zm_Imbibed_Seeds_P Parameter: Plant Line Value: 35A19
  misc_feature: MA Experiment 108545 PARAMETER Experiment Name: Zm_Imbibed_Seeds_P Parameter: Tissue Value: Aerial vs. Embryo
  misc_feature: MA Experiment ID: 108546 Result: Down-regulated in Transcription
  misc_feature: MA Experiment 108546 PARAMETER Experiment Name: Zm_Imbibed_Seeds_P Parameter: Age (day) Value: 3 vs. 2
  misc_feature: MA Experiment 108546 PARAMETER Experiment Name: Zm_Imbibed_Seeds_P Parameter: Organism Value: Zea mays
  misc_feature: MA Experiment 108546 PARAMETER Experiment Name: Zm_Imbibed_Seeds_P Parameter: Plant Line Value: 35A19
  misc_feature: MA Experiment 108546 PARAMETER Experiment Name: Zm_Imbibed_Seeds_P Parameter: Tissue Value: Roots vs. Embryo
  misc_feature: MA Experiment ID: 108547 Result: Up-regulated in Transcription
  misc_feature: MA Experiment 108547 PARAMETER Experiment Name: Zm_Imbibed_Seeds_P Parameter: Age (day) Value: 4 vs. 2
  misc_feature: MA Experiment 108547 PARAMETER Experiment Name: Zm_Imbibed_Seeds_P Parameter: Organism Value: Zea mays
  misc_feature: MA Experiment 108547 PARAMETER Experiment Name: Zm_Imbibed_Seeds_P Parameter: Plant Line Value: 35A19
  misc_feature: MA Experiment 108547 PARAMETER Experiment Name: Zm_Imbibed_Seeds_P Parameter: Tissue Value: Aerial vs. Embryo
  misc_feature: MA Experiment ID: 108556 Result: Down-regulated in Transcription
  misc_feature: MA Experiment 108556 PARAMETER Experiment Name: Zm_Drought_P Parameter: Age (day) Value: 9
  misc_feature: MA Experiment 108556 PARAMETER Experiment Name: Zm_Drought_P Parameter: Organism Value: Zea mays
  misc_feature: MA Experiment 108556 PARAMETER Experiment Name: Zm_Drought_P Parameter: Plant Line Value: 35A19
  misc_feature: MA Experiment 108556 PARAMETER Experiment Name: Zm_Drought_P Parameter: Timepoint (hr) Value: 24
  misc_feature: MA Experiment 108556 PARAMETER Experiment Name: Zm_Drought_P Parameter: Tissue Value: Aerial
  misc_feature: MA Experiment 108556 PARAMETER Experiment Name: Zm_Drought_P Parameter: Treatment Value: Drought vs. No Drought
  misc_feature: MA Experiment ID: 108559 Result: Down-regulated in Transcription
  misc_feature: MA Experiment 108559 PARAMETER Experiment Name: Zm_5mM_NO_P Parameter: Age (day) Value: 8
  misc_feature: MA Experiment 108559 PARAMETER Experiment Name: Zm_5mM_NO_P Parameter: Organism Value: Zea mays
  misc_feature: MA Experiment 108559 PARAMETER Experiment Name: Zm_5mM_NO_P Parameter: Plant Line Value: 35A19
  misc_feature: MA Experiment 108559 PARAMETER Experiment Name: Zm_5mM_NO_P Parameter: Timepoint (hr) Value: 12
  misc_feature: MA Experiment 108559 PARAMETER Experiment Name: Zm_5mM_NO_P Parameter: Tissue Value: Aerial
  misc_feature: MA Experiment 108559 PARAMETER Experiment Name: Zm_5mM_NO_P Parameter: Treatment Value: 5mM NO vs. No Treatment
  misc_feature: MA Experiment ID: 108687 Result: Down-regulated in Transcription
  misc_feature: MA Experiment 108687 PARAMETER Experiment Name: Zm_Embryos-Flowers__P Parameter: Tissue Value: Embryo vs. Aerial+
  misc_feature: MA Experiment ID: 108688 Result: Down-regulated in Transcription
  misc_feature: MA Experiment 108688 PARAMETER Experiment Name: Zm_Embryos-Flowers__P Parameter: Tissue Value: Immature Flowers vs. Aerial+
  misc_feature: MA Experiment ID: 20000478 Result: Down-regulated in Transcription
  misc_feature: MA Experiment 20000478 PARAMETER Experiment Name: Zm_5mM_SA_P Parameter: Age (day) Value: 11
  misc_feature: MA Experiment 20000478 PARAMETER Experiment Name: Zm_5mM_SA_P Parameter: Organism Value: Zea mays
  misc_feature: MA Experiment 20000478 PARAMETER Experiment Name: Zm_5mM_SA_P Parameter: Plant Line Value: 35A19
  misc_feature: MA Experiment 20000478 PARAMETER Experiment Name: Zm_5mM_SA_P Parameter: Timepoint (hr) Value: 72
  misc_feature: MA Experiment 20000478 PARAMETER Experiment Name: Zm_5mM_SA_P Parameter: Tissue Value: Aerial
  misc_feature: MA Experiment 20000478 PARAMETER Experiment Name: Zm_5mM_SA_P Parameter: Treatment Value: 5mM SA vs. No Treatment
  misc_feature: MA Experiment ID: 20000480 Result: Down-regulated in Transcription
  misc_feature: MA Experiment 20000480 PARAMETER Experiment Name: Zm_Drought_P Parameter: Age (day) Value: 11
  misc_feature: MA Experiment 20000480 PARAMETER Experiment Name: Zm_Drought_P Parameter: Organism Value: Zea mays
  misc_feature: MA Experiment 20000480 PARAMETER Experiment Name: Zm_Drought_P Parameter: Plant Line Value: 35A19
  misc_feature: MA Experiment 20000480 PARAMETER Experiment Name: Zm_Drought_P Parameter: Timepoint (hr) Value: 72
  misc_feature: MA Experiment 20000480 PARAMETER Experiment Name: Zm_Drought_P Parameter: Tissue Value: Aerial
  misc_feature: MA Experiment 20000480 PARAMETER Experiment Name: Zm_Drought_P Parameter: Treatment Value: Drought vs. No Drought
  misc_feature: MA Experiment ID: 20000534 Result: Down-regulated in Transcription
  misc_feature: MA Experiment 20000534 PARAMETER Experiment Name: Zm_Hybrid_Pollen_P Parameter: Age (day) Value: 8
  misc_feature: MA Experiment 20000534 PARAMETER Experiment Name: Zm_Hybrid_Pollen_P Parameter: Organism Value: Zea mays
  misc_feature: MA Experiment 20000534 PARAMETER Experiment Name: Zm_Hybrid_Pollen_P Parameter: Plant Line Value: 35A19
  misc_feature: MA Experiment 20000534 PARAMETER Experiment Name: Zm_Hybrid_Pollen_P Parameter: Tissue Value: Pollen vs. Aerial
  misc_feature: MA Experiment ID: 20000626 Result: Down-regulated in Transcription
  misc_feature: MA Experiment 20000626 PARAMETER Experiment Name: Zm_Herbicide-Treatments_P Parameter: Timepoint (hr) Value: 12
  misc_feature: MA Experiment 20000626 PARAMETER Experiment Name: Zm_Herbicide-Treatments_P Parameter: Tissue Value: Aerial
  misc_feature: MA Experiment 20000626 PARAMETER Experiment Name: Zm_Herbicide-Treatments_P Parameter: Treatment Value: Roundup vs. No Treatment
gcgaaaacgcgagcgctgcggaacaacgatggcgacgatgtctcttgccgcggcgtcacccctcgcctccattccccgcggcatcgccgctcaggctccttgcgcggcattcctgtccatccgcttaggtggcgcgacggcgacgcggttcgctggactggcggtggcctcgcagccagcggagcgtcgcgccgcggcgatggtcgcgatggcgaagagggagcaggagctggaggagatccgggccatgacgacggaacagatggaagaggaggtggtagacctcaagggggagcttttcctgctccgccttaagcgctcggcgcgccaggagttcaagaacagcgagttcagccgcatgcgcaagaggattgctcgtatgctaaccgtgaaaagagagcgggaaattgaacaaggaatcaataaaagattgtctaggaagcttgataggaaatggaagcagagcattgtggtcagaccaccaccatctctaagggggaacaaagaggagtagaaagccgcaaaaagagggcaatgtgcaaaagtcgtttcatgcgagtgttgcaggaaggtcccttcatgatttcaacccttattgcgttgttatgtattccatgtttacattttgctaagcattgctatctgaatctgaatttcagttgttagtctcttctgtaaattttgacttatttaaatttacacttctatctgtgttatcagtaattgaggatggccagtcatttgcacctggaaggtgcatgcttccttgcc

SEQ ID NO: 11586 - protein, 170 aa, Zea mays subsp. mays
  peptide (1)..(170): Ceres Seq. ID no. 13492224
  misc_feature (10)..(170): Homolog of NCBI NO: 5739218 NR Description: ribosomal protein L29 [Zea mays]
  misc_feature (10)..(170): Homolog of NCBI NO: 15238369 NR Description: ribosomal protein L29p family [Arabidopsis >gi|10178184|dbj|BAB11658.1| 50S ribosomal protein L29 thaliana] >gi|15028327|gb|AAK76640.1| putative 50S ribosomal
  misc_feature (73)..(138): Homolog of NCBI NO: 21283890 NR Description: 50S ribosomal protein L29 [Staphylococcus aureus aureus MW2] >gi|21205332|dbj|BAB96026.1| 50S ribosomal protein
RKRERCGTTMATMSLAAASPLASIPRGIAAQAPCAAFLSIRLGGATATRFAGLAVASQPAERRAAAMVAMAKREQELEEIRAMTTEQMEEEVVDLKGELFLLRLKRSARQEFKNSEFSRMRKRIARMLTVKREREIEQGINKRLSRKLDRKWKQSIVVRPPPSLRGNKEE

SEQ ID NO: 11587 - protein, 161 aa, Zea mays subsp. mays
  peptide (1)..(161): Ceres Seq. ID no. 13492225
  misc_feature (1)..(161): Homolog of NCBI NO: 5739218 NR Description: ribosomal protein L29 [Zea mays]
  misc_feature (1)..(161): Homolog of NCBI NO: 15238369 NR Description: ribosomal protein L29p family [Arabidopsis >gi|10178184|dbj|BAB11658.1| 50S ribosomal protein L29 thaliana] >gi|15028327|gb|AAK76640.1| putative 50S ribosomal
  misc_feature (64)..(129): Homolog of NCBI NO: 21283890 NR Description: 50S ribosomal protein L29 [Staphylococcus aureus aureus MW2] >gi|21205332|dbj|BAB96026.1| 50S ribosomal protein
MATMSLAAASPLASIPRGIAAQAPCAAFLSIRLGGATATRFAGLAVASQPAERRAAAMVAMAKREQELEEIRAMTTEQMEEEVVDLKGELFLLRLKRSARQEFKNSEFSRMRKRIARMLTVKREREIEQGINKRLSRKLDRKWKQSIVVRPPPSLRGNKEE

SEQ ID NO: 11588 - protein, 158 aa, Zea mays subsp. mays
  peptide (1)..(158): Ceres Seq. ID no. 13492226
  misc_feature (1)..(158): Homolog of NCBI NO: 5739218 NR Description: ribosomal protein L29 [Zea mays]
  misc_feature (1)..(158): Homolog of NCBI NO: 15238369 NR Description: ribosomal protein L29p family [Arabidopsis >gi|10178184|dbj|BAB11658.1| 50S ribosomal protein L29 thaliana] >gi|15028327|gb|AAK76640.1| putative 50S ribosomal
  misc_feature (61)..(126): Homolog of NCBI NO: 21283890 NR Description: 50S ribosomal protein L29 [Staphylococcus aureus aureus MW2] >gi|21205332|dbj|BAB96026.1| 50S ribosomal protein
MSLAAASPLASIPRGIAAQAPCAAFLSIRLGGATATRFAGLAVASQPAERRAAAMVAMAKREQELEEIRAMTTEQMEEEVVDLKGELFLLRLKRSARQEFKNSEFSRMRKRIARMLTVKREREIEQGINKRLSRKLDRKWKQSIVVRPPPSLRGNKEE

SEQ ID NO: 11589 - DNA, 1136 bp, Zea mays subsp. mays
  misc_feature (1)..(1136): Ceres Seq. ID no. 12411807
  misc_feature: MA Experiment ID: 108522 Result: Up-regulated in Transcription
  misc_feature: MA Experiment 108522 PARAMETER Experiment Name: Zm_42deg_Heat_P Parameter: Age (day) Value: 8
  misc_feature: MA Experiment 108522 PARAMETER Experiment Name: Zm_42deg_Heat_P Parameter: Organism Value: Zea mays
  misc_feature: MA Experiment 108522 PARAMETER Experiment Name: Zm_42deg_Heat_P Parameter: Plant Line Value: 35A19
  misc_feature: MA Experiment 108522 PARAMETER Experiment Name: Zm_42deg_Heat_P Parameter: Temperature (deg C) Value: 42 vs. 22
  misc_feature: MA Experiment 108522 PARAMETER Experiment Name: Zm_42deg_Heat_P Parameter: Timepoint (hr) Value: 1
  misc_feature: MA Experiment 108522 PARAMETER Experiment Name: Zm_42deg_Heat_P Parameter: Tissue Value: Aerial
  misc_feature: MA Experiment ID: 108523 Result: Up-regulated in Transcription
  misc_feature: MA Experiment 108523 PARAMETER Experiment Name: Zm_42deg_Heat_P Parameter: Age (day) Value: 8
  misc_feature: MA Experiment 108523 PARAMETER Experiment Name: Zm_42deg_Heat_P Parameter: Organism Value: Zea mays
  misc_feature: MA Experiment 108523 PARAMETER Experiment Name: Zm_42deg_Heat_P Parameter: Plant Line Value: 35A19
  misc_feature: MA Experiment 108523 PARAMETER Experiment Name: Zm_42deg_Heat_P Parameter: Temperature (deg C) Value: 42 vs. 22
  misc_feature: MA Experiment 108523 PARAMETER Experiment Name: Zm_42deg_Heat_P Parameter: Timepoint (hr) Value: 6
  misc_feature: MA Experiment 108523 PARAMETER Experiment Name: Zm_42deg_Heat_P Parameter: Tissue Value: Aerial
  misc_feature: MA Experiment ID: 108530 Result: Down-regulated in Transcription
  misc_feature: MA Experiment 108530 PARAMETER Experiment Name: Zm_Imbibed_Seeds_P Parameter: Age (day) Value: 6 vs. 2
  misc_feature: MA Experiment 108530 PARAMETER Experiment Name: Zm_Imbibed_Seeds_P Parameter: Organism Value: Zea mays
  misc_feature: MA Experiment 108530 PARAMETER Experiment Name: Zm_Imbibed_Seeds_P Parameter: Plant Line Value: 35A19
  misc_feature: MA Experiment 108530 PARAMETER Experiment Name: Zm_Imbibed_Seeds_P Parameter: Tissue Value: Aerial vs. Embryo
  misc_feature: MA Experiment ID: 20000534 Result: Down-regulated in Transcription
  misc_feature: MA Experiment 20000534 PARAMETER Experiment Name: Zm_Hybrid_Pollen_P Parameter: Age (day) Value: 8
  misc_feature: MA Experiment 20000534 PARAMETER Experiment Name: Zm_Hybrid_Pollen_P Parameter: Organism Value: Zea mays
  misc_feature: MA Experiment 20000534 PARAMETER Experiment Name: Zm_Hybrid_Pollen_P Parameter: Plant Line Value: 35A19
  misc_feature: MA Experiment 20000534 PARAMETER Experiment Name: Zm_Hybrid_Pollen_P Parameter: Tissue Value: Pollen vs. Aerial
atcctcgctggctatacgtctcccctccgcgcacaaaaaccctagcacgcaggcgcagccaggcctgcacccaaagcttccggagaattcctcccttgccccgccgtcgcatcctcttcgaagttcgaatcgaatcgcgccgcgatcacccacctcatggcggacaaggagcctgtcgtggagcggccagaggcgggtgaggaggaggaggacgcctcagccgccgccgccgcgggggaggaggaggacacgggcgcccaggtggctcccatcgtgcggcttgaggaggtagccgtcaccaccggcgaggaggacgaggacgtcctgctcgacatgaaggcgaagctgtaccgattcgacaaagacggtaaccaatggaaggaacggggcacgggcgctgtcaagcttctcaagcacaagcagaccggcaaggtccgcctagtcatgcgccaggctaaaacgcttaagatctgcgcgaaccacctcgtggcctccaccacgaagatgcaggagcatgcgggcagcgacaagtcgtgtgtttggcacgctgctgactttgccgatggcgaacttaaggaggagatgtttgccatcaggtttggttcggtagaaaactgcaagaagttcaaggagttggttgaggagatagctgagtcgcttacaaagaacgagggcaaggaaggtgaagatggtggttccacggctggattgctggcgaagctcactgtgagcgagggcaaatctgagggaagtggcaagtctgagtccactgattctggcaaagtgactgaaaccaaagccgacacagccccagctgagtagttggtgtggttgcacttgcacgcagattcgcctggtgctgaactagtttgtctgtccgcgtccagtggaagtttggtgccctttagccatggaatacgattgctatcatttgggcccgggccgagttggaggagtctcaggtgttcggtctggtttggtccgggcttgattttgctaaaaacttgggagtccatgggggttgggaacgtttgatatgtgagtcgctagtatttaactgcatggatcgttgtggattgcggtaaattcataaagtggaccctatatattttttatttcgttcaatacacattcat

SEQ ID NO: 11590 - protein, 221 aa, Zea mays subsp. mays
  peptide (1)..(221): Ceres Seq. ID no. 12411808
  misc_feature (46)..(167): Pfam Name: RanBP1 domain Pfam Description: RanBP1 domain
  misc_feature (1)..(216): Homolog of NCBI NO: 15222310 NR Description: Ran-binding protein (atranbp1a); protein id: supported by cDNA: gi_13877580, supported by cDNA: gi_15294205,
  misc_feature (1)..(216): Homolog of NCBI NO: 2058282 NR Description: atranbp1a [Arabidopsis thaliana]
  misc_feature (5)..(216): Homolog of NCBI NO: 14091665 NR Description: Ran binding protein-1 [Lycopersicon esculentum]
  misc_feature (7)..(214): Homolog of NCBI NO: 2058284 NR Description: atranbp1b [Arabidopsis thaliana]
  misc_feature (7)..(214): Homolog of NCBI NO: 15227700 NR Description: Ran binding protein (AtRanBP1b); protein id: supported by cDNA: gi_20260399 [Arabidopsis thaliana]
  misc_feature (1)..(216): Homolog of NCBI NO: 5106769 NR Description: Ran-binding protein siRanBP [Arabidopsis thaliana]
  misc_feature (12)..(214): Homolog of NCBI NO: 20260400 NR Description: Ran binding protein [Arabidopsis thaliana]
  misc_feature (16)..(221): Homolog of NCBI NO: 8843780 NR Description: contains similarity to small GTPase Ran binding
  misc_feature (16)..(221): Homolog of NCBI NO: 30697102 NR Description: Ran binding protein 1 homolog - like [Arabidopsis >gi|1732511|gb|AAB38776.1| Ran binding protein 1 homolog
  misc_feature (13)..(203): Homolog of NCBI NO: 20891965 NR Description: RAN binding protein 1 [Mus musculus] unnamed protein product [Mus musculus] unnamed protein product [Mus musculus]
MADKEPVVERPEAGEEEEDASAAAAAGEEEDTGAQVAPIVRLEEVAVTTGEEDEDVLLDMKAKLYRFDKDGNQWKERGTGAVKLLKHKQTGKVRLVMRQAKTLKICANHLVASTTKMQEHAGSDKSCVWHAADFADGELKEEMFAIRFGSVENCKKFKELVEEIAESLTKNEGKEGEDGGSTAGLLAKLTVSEGKSEGSGKSESTDSGKVTETKADTAPAE

SEQ ID NO: 11591 - protein, 162 aa, Zea mays subsp. mays
  peptide (1)..(162): Ceres Seq. ID no. 12411809
  misc_feature (1)..(108): Pfam Name: RanBP1 domain Pfam Description: RanBP1 domain
  misc_feature (1)..(157): Homolog of NCBI NO: 15222310 NR Description: Ran-binding protein (atranbp1a); protein id: supported by cDNA: gi_13877580, supported by cDNA: gi_15294205,
  misc_feature (1)..(157): Homolog of NCBI NO: 2058282 NR Description: atranbp1a [Arabidopsis thaliana]
  misc_feature (1)..(157): Homolog of NCBI NO: 14091665 NR Description: Ran binding protein-1 [Lycopersicon esculentum]
  misc_feature (1)..(155): Homolog of NCBI NO: 2058284 NR Description: atranbp1b [Arabidopsis thaliana]
  misc_feature (1)..(155): Homolog of NCBI NO: 15227700 NR Description: Ran binding protein (AtRanBP1b); protein id: supported by cDNA: gi_20260399 [Arabidopsis thaliana]
  misc_feature (1)..(157): Homolog of NCBI NO: 5106769 NR Description: Ran-binding protein siRanBP [Arabidopsis thaliana]
  misc_feature (1)..(155): Homolog of NCBI NO: 20260400 NR Description: Ran binding protein [Arabidopsis thaliana]
  misc_feature (1)..(162): Homolog of NCBI NO: 8843780 NR Description: contains similarity to small GTPase Ran binding
  misc_feature (1)..(162): Homolog of NCBI NO: 30697102 NR Description: Ran binding protein 1 homolog - like [Arabidopsis >gi|1732511|gb|AAB38776.1| Ran binding protein 1 homolog
  misc_feature (1)..(144): Homolog of NCBI NO: 20891965 NR Description: RAN binding protein 1 [Mus musculus] unnamed protein product [Mus musculus] unnamed protein product [Mus musculus]
MKAKLYRFDKDGNQWKERGTGAVKLLKHKQTGKVRLVMRQAKTLKICANHLVASTTKMQEHAGSDKSCVWHAADFADGELKEEMFAIRFGSVENCKKFKELVEEIAESLTKNEGKEGEDGGSTAGLLAKLTVSEGKSEGSGKSESTDSGKVTETKADTAPAE

SEQ ID NO: 11592 - protein, 125 aa, Zea mays subsp. mays
  peptide (1)..(125): Ceres Seq. ID no. 12411810
  misc_feature (1)..(71): Pfam Name: RanBP1 domain Pfam Description: RanBP1 domain
  misc_feature (1)..(120): Homolog of NCBI NO: 15222310 NR Description: Ran-binding protein (atranbp1a); protein id: supported by cDNA: gi_13877580, supported by cDNA: gi_15294205,
  misc_feature (1)..(120): Homolog of NCBI NO: 2058282 NR Description: atranbp1a [Arabidopsis thaliana]
  misc_feature (1)..(120): Homolog of NCBI NO: 14091665 NR Description: Ran binding protein-1 [Lycopersicon esculentum]
  misc_feature (1)..(118): Homolog of NCBI NO: 2058284 NR Description: atranbp1b [Arabidopsis thaliana]
  misc_feature (1)..(118): Homolog of NCBI NO: 15227700 NR Description: Ran binding protein (AtRanBP1b); protein id: supported by cDNA: gi_20260399 [Arabidopsis thaliana]
  misc_feature (1)..(120): Homolog of NCBI NO: 5106769 NR Description: Ran-binding protein siRanBP [Arabidopsis thaliana]
  misc_feature (1)..(118): Homolog of NCBI NO: 20260400 NR Description: Ran binding protein [Arabidopsis thaliana]
  misc_feature (1)..(125): Homolog of NCBI NO: 8843780 NR Description: contains similarity to small GTPase Ran binding
  misc_feature (1)..(125): Homolog of NCBI NO: 30697102 NR Description: Ran binding protein 1 homolog - like [Arabidopsis >gi|1732511|gb|AAB38776.1| Ran binding protein 1 homolog
  misc_feature (1)..(107): Homolog of NCBI NO: 20891965 NR Description: RAN binding protein 1 [Mus musculus] unnamed protein product [Mus musculus] unnamed protein product [Mus musculus]
MRQAKTLKICANHLVASTTKMQEHAGSDKSCVWHAADFADGELKEEMFAIRFGSVENCKKFKELVEEIAESLTKNEGKEGEDGGSTAGLLAKLTVSEGKSEGSGKSESTDSGKVTETKADTAPAE

SEQ ID NO: 11593 - DNA, 1135 bp, Zea mays subsp. mays
  misc_feature (1)..(1135): Ceres Seq. ID no. 12408002
  misc_feature: MA Experiment ID: 108528 Result: Up-regulated in Transcription
  misc_feature: MA Experiment 108528 PARAMETER Experiment Name: Zm_Imbibed_Seeds_P Parameter: Age (day) Value: 5 vs. 2
  misc_feature: MA Experiment 108528 PARAMETER Experiment Name: Zm_Imbibed_Seeds_P Parameter: Organism Value: Zea mays
  misc_feature: MA Experiment 108528 PARAMETER Experiment Name: Zm_Imbibed_Seeds_P Parameter: Plant Line Value: 35A19
  misc_feature: MA Experiment 108528 PARAMETER Experiment Name: Zm_Imbibed_Seeds_P Parameter: Tissue Value: Aerial vs. Embryo
  misc_feature: MA Experiment ID: 108530 Result: Up-regulated in Transcription
  misc_feature: MA Experiment 108530 PARAMETER Experiment Name: Zm_Imbibed_Seeds_P Parameter: Age (day) Value: 6 vs. 2
  misc_feature: MA Experiment 108530 PARAMETER Experiment Name: Zm_Imbibed_Seeds_P Parameter: Organism Value: Zea mays
  misc_feature: MA Experiment 108530 PARAMETER Experiment Name: Zm_Imbibed_Seeds_P Parameter: Plant Line Value: 35A19
  misc_feature: MA Experiment 108530 PARAMETER Experiment Name: Zm_Imbibed_Seeds_P Parameter: Tissue Value: Aerial vs. Embryo
  misc_feature: MA Experiment ID: 108544 Result: Down-regulated in Transcription
  misc_feature: MA Experiment ID: 108547 Result: Up-regulated in Transcription
  misc_feature: MA Experiment 108547 PARAMETER Experiment Name: Zm_Imbibed_Seeds_P Parameter: Age (day) Value: 4 vs. 2
  misc_feature: MA Experiment 108547 PARAMETER Experiment Name: Zm_Imbibed_Seeds_P Parameter: Organism Value: Zea mays
  misc_feature: MA Experiment 108547 PARAMETER Experiment Name: Zm_Imbibed_Seeds_P Parameter: Plant Line Value: 35A19
  misc_feature: MA Experiment 108547 PARAMETER Experiment Name: Zm_Imbibed_Seeds_P Parameter: Tissue Value: Aerial vs. Embryo
  misc_feature: MA Experiment ID: 108556 Result: Down-regulated in Transcription
  misc_feature: MA Experiment 108556 PARAMETER Experiment Name: Zm_Drought_P Parameter: Age (day) Value: 9
  misc_feature: MA Experiment 108556 PARAMETER Experiment Name: Zm_Drought_P Parameter: Organism Value: Zea mays
  misc_feature: MA Experiment 108556 PARAMETER Experiment Name: Zm_Drought_P Parameter: Plant Line Value: 35A19
  misc_feature: MA Experiment 108556 PARAMETER Experiment Name: Zm_Drought_P Parameter: Timepoint (hr) Value: 24
  misc_feature: MA Experiment 108556 PARAMETER Experiment Name: Zm_Drought_P Parameter: Tissue Value: Aerial
  misc_feature: MA Experiment 108556 PARAMETER Experiment Name: Zm_Drought_P Parameter: Treatment Value: Drought vs. No Drought
  misc_feature: MA Experiment ID: 108559 Result: Down-regulated in Transcription
  misc_feature: MA Experiment 108559 PARAMETER Experiment Name: Zm_5mM_NO_P Parameter: Age (day) Value: 8
  misc_feature: MA Experiment 108559 PARAMETER Experiment Name: Zm_5mM_NO_P Parameter: Organism Value: Zea mays
  misc_feature: MA Experiment 108559 PARAMETER Experiment Name: Zm_5mM_NO_P Parameter: Plant Line Value: 35A19
  misc_feature: MA Experiment 108559 PARAMETER Experiment Name: Zm_5mM_NO_P Parameter: Timepoint (hr) Value: 12
  misc_feature: MA Experiment 108559 PARAMETER Experiment Name: Zm_5mM_NO_P Parameter: Tissue Value: Aerial
  misc_feature: MA Experiment 108559 PARAMETER Experiment Name: Zm_5mM_NO_P Parameter: Treatment Value: 5mM NO vs. No Treatment
  misc_feature: MA Experiment ID: 20000477 Result: Down-regulated in Transcription
  misc_feature: MA Experiment 20000477 PARAMETER Experiment Name: Zm_5mM_SA_P Parameter: Age (day) Value: 10
  misc_feature: MA Experiment 20000477 PARAMETER Experiment Name: Zm_5mM_SA_P Parameter: Organism Value: Zea mays
  misc_feature: MA Experiment 20000477 PARAMETER Experiment Name: Zm_5mM_SA_P Parameter: Plant Line Value: 35A19
  misc_feature: MA Experiment 20000477 PARAMETER Experiment Name: Zm_5mM_SA_P Parameter: Timepoint (hr) Value: 48
  misc_feature: MA Experiment 20000477 PARAMETER Experiment Name: Zm_5mM_SA_P Parameter: Tissue Value: Aerial
  misc_feature: MA Experiment 20000477 PARAMETER Experiment Name: Zm_5mM_SA_P Parameter: Treatment Value: 5mM SA vs. No Treatment
  misc_feature: MA Experiment ID: 20000478 Result: Down-regulated in Transcription
  misc_feature: MA Experiment 20000478 PARAMETER Experiment Name: Zm_5mM_SA_P Parameter: Age (day) Value: 11
  misc_feature: MA Experiment 20000478 PARAMETER Experiment Name: Zm_5mM_SA_P Parameter: Organism Value: Zea mays
  misc_feature: MA Experiment 20000478 PARAMETER Experiment Name: Zm_5mM_SA_P Parameter: Plant Line Value: 35A19
  misc_feature: MA Experiment 20000478 PARAMETER Experiment Name: Zm_5mM_SA_P Parameter: Timepoint (hr) Value: 72
  misc_feature: MA Experiment 20000478 PARAMETER Experiment Name: Zm_5mM_SA_P Parameter: Tissue Value: Aerial
  misc_feature: MA Experiment 20000478 PARAMETER Experiment Name: Zm_5mM_SA_P Parameter: Treatment Value: 5mM SA vs. No Treatment
acgacgccgccaccacctgccccagcagcggcacgctccgacaacgtcgaccatggcggtgcgggcgcgggggctggggagtctgttccctgctagatccagtagatggccgactcatcgaggccctccgtgaacatcatctgcgccggtcgtctgctcggctgcagtggattaggtgagcggggttccggtagaggattgtttagtttgggattctaggttcctcgctcccgtgccggagacgacgctagacgatgaggtcagtgccgcggcggcgcggcgcgtcgcagagatgaaggcgcggaagcggtccgagcggcgcacctacctggtggccgccgtgatgtccaggctcggggtcacgtccatggccgtcgccgccgtgtactatcgcttcagctggcaaatggagggcggcgcggtcccggtgagcgagatgttcggcacgtttgcgctctccgtcggcgcggcggtcgggatggagttctgggcgcggtgggcgcaccgggcgctatggcacgcctccctgtggcacatgcacgagtcgcaccaccggtcgtgcgagggcccattcgagctcaacgacgtgttcgccatcgtcaacgccgtgccggccatctccctcctcggtgacgtcgcgagcagatacaccatatggacaattttgagggcgtcccgtatgggctcttcctgggaccaaaggagctggaggaggtcggtggcctggacgagctggaaaaggagctcgcgcgaatcggccagaccatctgatggatttgtccggattccggcgcggcgatctccgctccgctccgtgattccggcgcagcctcatggttggggagccgacgaccagaacctccagaagggatttggtttggatgcgcgagcgtagatcttgacctgcatttcggatggtctgtggaggcatagctcgtacctggagatgtctggtgccatggaattacttttcttttcttcttttcctgacattttcatgccggcgtctttatttgtggagacgtcgcacgttctggcccctgtattactgttcttatggctaggattctgtatataacttgtagagacatgttatgaaccaccagctcaatgaagctaaaaattcggtggttgg

SEQ ID NO: 11594 - protein, 200 aa, Zea mays subsp. mays
  peptide (1)..(200): Ceres Seq. ID no. 12408003
  misc_feature (50)..(112): Pfam Name: Carotene hydroxylase Pfam Description: Carotene hydroxylase
  misc_feature (1)..(112): Homolog of NCBI NO: 2956717 NR Description: beta-carotene hydroxylase 2 [Capsicum annuum]
  misc_feature (1)..(112): Homolog of NCBI NO: 21734857 NR Description: beta-carotene hydroxylase [Vitis vinifera]
  misc_feature (1)..(112): Homolog of NCBI NO: 5870600 NR Description: beta-carotene hydroxylase [Lycopersicon
  misc_feature (1)..(112): Homolog of NCBI NO: 37536402 NR Description: putative beta-carotene hydroxylase [Oryza sativa
  misc_feature (1)..(112): Homolog of NCBI NO: 33145986 NR Description: beta-carotene hydroxylase [Crocus sativus]
  misc_feature (1)..(112): Homolog of NCBI NO: 9988836 NR Description: beta-carotene hydroxylase [Citrus unshiu]
  misc_feature (1)..(112): Homolog of NCBI NO: 11245486 NR Description: beta-carotene hydroxylase [Citrus unshiu]
  misc_feature (1)..(112): Homolog of NCBI NO: 5870598 NR Description: beta-carotene hydroxylase [Lycopersicon
  misc_feature (1)..(110): Homolog of NCBI NO: 2956671 NR Description: beta-carotene hydrolase [Capsicum annuum]
  misc_feature (1)..(112): Homolog of NCBI NO: 9971820 NR Description: beta hydroxylase [Tagetes erecta]
MKARKRSERRTYLVAAVMSRLGVTSMAVAAVYYRFSWQMEGGAVPVSEMFGTFALSVGAAVGMEFWARWAHRALWHASLWHMHESHHRSCEGPFELNDVFAIVNAVPAISLLGDVASRYTIWTILRASRMGSSWDQRSWRRSVAWTSWKRSSRESARPSDGFVRIPARRSPLRSVIPAQPHGWGADDQNLQKGFGLDARA

SEQ ID NO: 11595 - protein, 183 aa, Zea mays subsp. mays
  peptide (1)..(183): Ceres Seq. ID no. 12408004
  misc_feature (33)..(95): Pfam Name: Carotene hydroxylase Pfam Description: Carotene hydroxylase
  misc_feature (1)..(95): Homolog of NCBI NO: 11245486 NR Description: beta-carotene hydroxylase [Citrus unshiu]
  misc_feature (1)..(95): Homolog of NCBI NO: 33145986 NR Description: beta-carotene hydroxylase [Crocus sativus]
  misc_feature (1)..(95): Homolog of NCBI NO: 9988836 NR Description: beta-carotene hydroxylase [Citrus unshiu]
  misc_feature (1)..(95): Homolog of NCBI NO: 2956717 NR Description: beta-carotene hydroxylase 2 [Capsicum annuum]
  misc_feature (1)..(95): Homolog of NCBI NO: 21734857 NR Description: beta-carotene hydroxylase [Vitis vinifera]
  misc_feature (1)..(95): Homolog of NCBI NO: 5870600 NR Description: beta-carotene hydroxylase [Lycopersicon
  misc_feature (1)..(95): Homolog of NCBI NO: 37536402 NR Description: putative beta-carotene hydroxylase [Oryza sativa
  misc_feature (1)..(95): Homolog of NCBI NO: 5870598 NR Description: beta-carotene hydroxylase [Lycopersicon
  misc_feature (1)..(93): Homolog of NCBI NO: 2956671 NR Description: beta-carotene hydrolase [Capsicum annuum]
  misc_feature (1)..(95): Homolog of NCBI NO: 9971820 NR Description: beta hydroxylase [Tagetes erecta]
MSRLGVTSMAVAAVYYRFSWQMEGGAVPVSEMFGTFALSVGAAVGMEFWARWAHRALWHASLWHMHESHHRSCEGPFELNDVFAIVNAVPAISLLGDVASRYTIWTILRASRMGSSWDQRSWRRSVAWTSWKRSSRESARPSDGFVRIPARRSPLRSVIPAQPHGWGADDQNLQKGFGLDARA

SEQ ID NO: 11596 - protein, 175 aa, Zea mays subsp. mays
  peptide (1)..(175): Ceres Seq. ID no. 12408005
  misc_feature (25)..(87): Pfam Name: Carotene hydroxylase Pfam Description: Carotene hydroxylase
  misc_feature (1)..(87): Homolog of NCBI NO: 11245486 NR Description: beta-carotene hydroxylase [Citrus unshiu]
  misc_feature (1)..(87): Homolog of NCBI NO: 33145986 NR Description: beta-carotene hydroxylase [Crocus sativus]
  misc_feature (1)..(87): Homolog of NCBI NO: 9988836 NR Description: beta-carotene hydroxylase [Citrus unshiu]
  misc_feature (1)..(87): Homolog of NCBI NO: 2956717 NR Description: beta-carotene hydroxylase 2 [Capsicum annuum]
  misc_feature (1)..(87): Homolog of NCBI NO: 21734857 NR Description: beta-carotene hydroxylase [Vitis vinifera]
  misc_feature (1)..(87): Homolog of NCBI NO: 5870600 NR Description: beta-carotene hydroxylase [Lycopersicon
  misc_feature (1)..(87): Homolog of NCBI NO: 37536402 NR Description: putative beta-carotene hydroxylase [Oryza sativa
  misc_feature (1)..(87): Homolog of NCBI NO: 5870598 NR Description: beta-carotene hydroxylase [Lycopersicon
  misc_feature (1)..(85): Homolog of NCBI NO: 2956671 NR Description: beta-carotene hydrolase [Capsicum annuum]
  misc_feature (1)..(87): Homolog of NCBI NO: 9971820 NR Description: beta hydroxylase [Tagetes erecta]
MAVAAVYYRFSWQMEGGAVPVSEMFGTFALSVGAAVGMEFWARWAHRALWHASLWHMHESHHRSCEGPFELNDVFAIVNAVPAISLLGDVASRYTIWTILRASRMGSSWDQRSWRRSVAWTSWKRSSRESARPSDGFVRIPARRSPLRSVIPAQPHGWGADDQNLQKGFGLDARA

SEQ ID NO: 11597 - DNA, 1682 bp, Zea mays subsp. mays; identical to SEQ ID NO: 1677
  misc_feature (1)..(1682): Ceres Seq. ID no. 13577771
  misc_feature: MA Experiment ID: 108515 Result: Up-regulated in Transcription
  misc_feature: MA Experiment 108515 PARAMETER Experiment Name: Zm_2mM_SA_P Parameter: Age (day) Value: 8
  misc_feature: MA Experiment 108515 PARAMETER Experiment Name: Zm_2mM_SA_P Parameter: Organism Value: Zea mays
  misc_feature: MA Experiment 108515 PARAMETER Experiment Name: Zm_2mM_SA_P Parameter: Plant Line Value: 35A19
  misc_feature: MA Experiment 108515 PARAMETER Experiment Name: Zm_2mM_SA_P Parameter: Timepoint (hr) Value: 12
  misc_feature: MA Experiment 108515 PARAMETER Experiment Name: Zm_2mM_SA_P Parameter: Tissue Value: Aerial
  misc_feature: MA Experiment 108515 PARAMETER Experiment Name: Zm_2mM_SA_P Parameter: Treatment Value: 2mM SA vs. No Treatment
  misc_feature: MA Experiment ID: 108527 Result: Up-regulated in Transcription
  misc_feature: MA Experiment 108527 PARAMETER Experiment Name: Zm_5mM_NO_P Parameter: Age (day) Value: 8
  misc_feature: MA Experiment 108527 PARAMETER Experiment Name: Zm_5mM_NO_P Parameter: Organism Value: Zea mays
  misc_feature: MA Experiment 108527 PARAMETER Experiment Name: Zm_5mM_NO_P Parameter: Plant Line Value: 35A19
  misc_feature: MA Experiment 108527 PARAMETER Experiment Name: Zm_5mM_NO_P Parameter: Timepoint (hr) Value: 6
  misc_feature: MA Experiment 108527 PARAMETER Experiment Name: Zm_5mM_NO_P Parameter: Tissue Value: Aerial
  misc_feature: MA Experiment 108527 PARAMETER Experiment Name: Zm_5mM_NO_P Parameter: Treatment Value: 5mM NO vs. No Treatment
  misc_feature: MA Experiment ID: 108535 Result: Up-regulated in Transcription
  misc_feature: MA Experiment 108535 PARAMETER Experiment Name: Zm_Meristem_P Parameter: Age (day) Value: 8
  misc_feature: MA Experiment 108535 PARAMETER Experiment Name: Zm_Meristem_P Parameter: Organism Value: Zea mays
  misc_feature: MA Experiment 108535 PARAMETER Experiment Name: Zm_Meristem_P Parameter: Plant Line Value: 35A19
  misc_feature: MA Experiment 108535 PARAMETER Experiment Name: Zm_Meristem_P Parameter: Tissue Value: Root Meristem vs. Above Root Meristem
  misc_feature: MA Experiment ID: 108556 Result: Up-regulated in Transcription
  misc_feature: MA Experiment 108556 PARAMETER Experiment Name: Zm_Drought_P Parameter: Age (day) Value: 9
  misc_feature: MA Experiment 108556 PARAMETER Experiment Name: Zm_Drought_P Parameter: Organism Value: Zea mays
  misc_feature: MA Experiment 108556 PARAMETER Experiment Name: Zm_Drought_P Parameter: Plant Line Value: 35A19
  misc_feature: MA Experiment 108556 PARAMETER Experiment Name: Zm_Drought_P Parameter: Timepoint (hr) Value: 24
  misc_feature: MA Experiment 108556 PARAMETER Experiment Name: Zm_Drought_P Parameter: Tissue Value: Aerial
  misc_feature: MA Experiment 108556 PARAMETER Experiment Name: Zm_Drought_P Parameter: Treatment Value: Drought vs. No Drought
  misc_feature: MA Experiment ID: 20000108 Result: Up-regulated in Transcription
  misc_feature: MA Experiment 20000108 PARAMETER Experiment Name: Zm_Root-Tips_P Parameter: Age (day) Value: 12
  misc_feature: MA Experiment 20000108 PARAMETER Experiment Name: Zm_Root-Tips_P Parameter: Organism Value: Zea mays
  misc_feature: MA Experiment 20000108 PARAMETER Experiment Name: Zm_Root-Tips_P Parameter: Tissue Value: Root tips vs. Root mid region    35
  misc_feature: MA Experiment 20000108 PARAMETER Experiment Name: Zm_Root-Tips_P Parameter: Tissue Value: Root tips vs. Root mid region   Sequence Listing-Misc Features (4)
  misc_feature: MA Experiment ID: 20000479 Result: Up-regulated in Transcription
  misc_feature: MA Experiment 20000479 PARAMETER Experiment Name: Zm_Drought_P Parameter: Age (day) Value: 10
  misc_feature: MA Experiment 20000479 PARAMETER Experiment Name: Zm_Drought_P Parameter: Organism Value: Zea mays
  misc_feature: MA Experiment 20000479 PARAMETER Experiment Name: Zm_Drought_P Parameter: Plant Line Value: 35A19
  misc_feature: MA Experiment 20000479 PARAMETER Experiment Name: Zm_Drought_P Parameter: Timepoint (hr) Value: 48
  misc_feature: MA Experiment 20000479 PARAMETER Experiment Name: Zm_Drought_P Parameter: Tissue Value: Aerial
  misc_feature: MA Experiment 20000479 PARAMETER Experiment Name: Zm_Drought_P Parameter: Treatment Value: Drought vs. No Drought
  misc_feature: MA Experiment ID: 20000626 Result: Up-regulated in Transcription
  misc_feature: MA Experiment 20000626 PARAMETER Experiment Name: Zm_Herbicide-Treatments_P Parameter: Timepoint (hr) Value: 12
  misc_feature: MA Experiment 20000626 PARAMETER Experiment Name: Zm_Herbicide-Treatments_P Parameter: Tissue Value: Aerial
  misc_feature: MA Experiment 20000626 PARAMETER Experiment Name: Zm_Herbicide-Treatments_P Parameter: Treatment Value: Roundup vs. No Treatment

SEQ ID NO: 11598 - protein, 319 aa, Zea mays subsp. mays; identical to SEQ ID NO: 1678
  peptide (1)..(319): Ceres Seq. ID no. 13577772
  misc_feature (8)..(271): Pfam Name: Thiolase, N-terminal domain Pfam Description: Thiolase, N-terminal domain
  misc_feature (1)..(301): Homolog of NCBI NO: 8777413 NR Description: acetyl-CoA C-acetyltransferase [Arabidopsis
  misc_feature (1)..(301): Homolog of NCBI NO: 30695411 NR Description: acetyl-CoA C-acetyltransferase A thiolase), putative [Arabidopsis thaliana]
  misc_feature (10)..(301): Homolog of NCBI NO: 30695409 NR Description: acetyl-CoA C-acetyltransferase A thiolase), putative [Arabidopsis thaliana]
  misc_feature (1)..(301): Homolog of NCBI NO: 34894172 NR Description: putative acetoacyl-CoA-thiolase [Oryza sativa
  misc_feature (1)..(311): Homolog of NCBI NO: 15238793 NR Description: acetoacyl-CoA-thiolase; protein id: At5g47720.1,
  misc_feature (1)..(311): Homolog of NCBI NO: 30695277 NR Description: acetyl-CoA C-acetyltransferase
  misc_feature (2)..(301): Homolog of NCBI NO: 16417944 NR Description: acetyl Co-A acetyltransferase [Hevea brasiliensis]
  misc_feature (1)..(301): Homolog of NCBI NO: 7433657 NR Description: acetyl-CoA C-acetyltransferase (EC 2.3.1.9),
  misc_feature (10)..(314): Homolog of NCBI NO: 19113478 NR Description: acetyl-coa acetyltransferase (EC 2.3.1.9)
  misc_feature (10)..(314): Homolog of NCBI NO: 11257345 NR Description: probable acetyl-CoA C-acetyltransferase (EC - fission yeast (Schizosaccharomyces pombe)

SEQ ID NO: 11599 - protein, 299 aa, Zea mays subsp. mays; identical to SEQ ID NO: 1679
  peptide (1)..(299): Ceres Seq. ID no. 13577773
  misc_feature (1)..(251): Pfam Name: Thiolase, N-terminal domain Pfam Description: Thiolase, N-terminal domain
  misc_feature (1)..(281): Homolog of NCBI NO: 8777413 NR Description: acetyl-CoA C-acetyltransferase [Arabidopsis
  misc_feature (1)..(281): Homolog of NCBI NO: 30695411 NR Description: acetyl-CoA C-acetyltransferase A thiolase), putative [Arabidopsis thaliana]
  misc_feature (1)..(281): Homolog of NCBI NO: 30695409 NR Description: acetyl-CoA C-acetyltransferase A thiolase), putative [Arabidopsis thaliana]
  misc_feature (1)..(281): Homolog of NCBI NO: 34894172 NR Description: putative acetoacyl-CoA-thiolase [Oryza sativa
  misc_feature (1)..(291): Homolog of NCBI NO: 15238793 NR Description: acetoacyl-CoA-thiolase; protein id: At5g47720.1,
  misc_feature (1)..(291): Homolog of NCBI NO: 30695277 NR Description: acetyl-CoA C-acetyltransferase
  misc_feature (1)..(281): Homolog of NCBI NO: 16417944 NR Description: acetyl Co-A acetyltransferase [Hevea brasiliensis]
  misc_feature (1)..(281): Homolog of NCBI NO: 7433657 NR Description: acetyl-CoA C-acetyltransferase (EC 2.3.1.9),
  misc_feature (1)..(294): Homolog of NCBI NO: 19113478 NR Description: acetyl-coa acetyltransferase (EC 2.3.1.9)
  misc_feature (1)..(294): Homolog of NCBI NO: 11257345 NR Description: probable acetyl-CoA C-acetyltransferase (EC - fission yeast (Schizosaccharomyces pombe)

SEQ ID NO: 11600 - protein, 221 aa, Zea mays subsp. mays; identical to SEQ ID NO: 1680
  peptide (1)..(221): Ceres Seq. ID no. 13577774
  misc_feature (1)..(173): Pfam Name: Thiolase, N-terminal domain Pfam Description: Thiolase, N-terminal domain
  misc_feature (1)..(203): Homolog of NCBI NO: 8777413 NR Description: acetyl-CoA C-acetyltransferase [Arabidopsis
  misc_feature (1)..(203): Homolog of NCBI NO: 30695411 NR Description: acetyl-CoA C-acetyltransferase A thiolase), putative [Arabidopsis thaliana]
  misc_feature (1)..(203): Homolog of NCBI NO: 30695409 NR Description: acetyl-CoA C-acetyltransferase A thiolase), putative [Arabidopsis thaliana]
  misc_feature (1)..(203): Homolog of NCBI NO: 34894172 NR Description: putative acetoacyl-CoA-thiolase [Oryza sativa
  misc_feature (1)..(213): Homolog of NCBI NO: 15238793 NR Description: acetoacyl-CoA-thiolase; protein id: At5g47720.1,
  misc_feature (1)..(213): Homolog of NCBI NO: 30695277 NR Description: acetyl-CoA C-acetyltransferase
  misc_feature (1)..(203): Homolog of NCBI NO: 16417944 NR Description: acetyl Co-A acetyltransferase [Hevea brasiliensis]
  misc_feature (1)..(203): Homolog of NCBI NO: 7433657 NR Description: acetyl-CoA C-acetyltransferase (EC 2.3.1.9),
  misc_feature (1)..(216): Homolog of NCBI NO: 19113478 NR Description: acetyl-coa acetyltransferase (EC 2.3.1.9)
  misc_feature (1)..(216): Homolog of NCBI NO: 11257345 NR Description: probable acetyl-CoA C-acetyltransferase (EC - fission yeast (Schizosaccharomyces pombe)

SEQ ID NO: 11601 - DNA, 625 bp, Zea mays subsp. mays
  misc_feature (1)..(625): Ceres Seq. ID no. 12414401
  misc_feature: MA Experiment ID: 108535 Result: Up-regulated in Transcription
  misc_feature: MA Experiment 108535 PARAMETER Experiment Name: Zm_Meristem_P Parameter: Age (day) Value: 8
  misc_feature: MA Experiment 108535 PARAMETER Experiment Name: Zm_Meristem_P Parameter: Organism Value: Zea mays
  misc_feature: MA Experiment 108535 PARAMETER Experiment Name: Zm_Meristem_P Parameter: Plant Line Value: 35A19
  misc_feature: MA Experiment 108535 PARAMETER Experiment Name: Zm_Meristem_P Parameter: Tissue Value: Root Meristem vs. Above Root Meristem
  misc_feature: MA Experiment ID: 20000108 Result: Up-regulated in Transcription
  misc_feature: MA Experiment 20000108 PARAMETER Experiment Name: Zm_Root-Tips_P Parameter: Age (day) Value: 12
  misc_feature: MA Experiment 20000108 PARAMETER Experiment Name: Zm_Root-Tips_P Parameter: Organism Value: Zea mays
  misc_feature: MA Experiment 20000108 PARAMETER Experiment Name: Zm_Root-Tips_P Parameter: Tissue Value: Root tips vs. Root mid region    35
  misc_feature: MA Experiment 20000108 PARAMETER Experiment Name: Zm_Root-Tips_P Parameter: Tissue Value: Root tips vs. Root mid region   Sequence Listing-Misc Features (4)
  misc_feature: MA Experiment ID: 20000626 Result: Down-regulated in Transcription
  misc_feature: MA Experiment 20000626 PARAMETER Experiment Name: Zm_Herbicide-Treatments_P Parameter: Timepoint (hr) Value: 12
  misc_feature: MA Experiment 20000626 PARAMETER Experiment Name: Zm_Herbicide-Treatments_P Parameter: Tissue Value: Aerial
  misc_feature: MA Experiment 20000626 PARAMETER Experiment Name: Zm_Herbicide-Treatments_P Parameter: Treatment Value: Roundup vs. No Treatment
aaaggaggcactggacgcggacatccaggaccgcgtcatgaaggagcgggagatgcagagctacatcgcggagcgcgagcgcgaggttgccgagagggaggccgcgtggaaggccgagctctcccgccgcgaggctgagatcgcgaggcaggaggcgaggctgaaggtggagagggagaacctggagaaagagaagagcgtcctcatggggacggcttcgagccaggacagccaagacggagcgctggagatcaccgtcagcggcgagaagtacaggtgcctccggttctcgaaggcgaagaagtgagaggttgaaccagaacgacacagtcactcagggtcaggggggtagtggtacaccgaaatctcagtttggaggctagtgtaagagtatctgtcaatctggcacacaggctgtcgctgtacgtgctggtttgatgctcactgcgtcgtgcgtcctcattgatgatttaacgatagggtcattgaaccagcgcacaacctgagaaaatggttgcgctgtccgtcctggggtcacggtagcatgaacctcacaactgataacctctgtttcggacggatacaatcgggttgaatgggagcctttcgtgtgcatgtggaaggt

SEQ ID NO: 11602 - protein, 101 aa, Zea mays subsp. mays
  peptide (1)..(101): Ceres Seq. ID no. 12414402
  misc_feature (1)..(101): Homolog of NCBI NO: 18398390 NR Description: expressed protein; protein id: At2g17350.1, by cDNA: 99231. [Arabidopsis thaliana] unknown [Arabidopsis thaliana] >gi|26449597|dbj|BAC41924.1|
  misc_feature (1)..(90): Homolog of NCBI NO: 25371273 NR Description: hypothetical protein At2g17350 [imported] -
KEALDADIQDRVMKEREMQSYIAEREREVAEREAAWKAELSRREAEIARQEARLKVERENLEKEKSVLMGTASSQDSQDGALEITVSGEKYRCLRFSKAKK

SEQ ID NO: 11603 - protein, 89 aa, Zea mays subsp. mays
  peptide (1)..(89): Ceres Seq. ID no. 12414403
  misc_feature (1)..(89): Homolog of NCBI NO: 18398390 NR Description: expressed protein; protein id: At2g17350.1, by cDNA: 99231. [Arabidopsis thaliana] unknown [Arabidopsis thaliana] >gi|26449597|dbj|BAC41924.1|
  misc_feature (1)..(78): Homolog of NCBI NO: 25371273 NR Description: hypothetical protein At2g17350 [imported] -
MKEREMQSYIAEREREVAEREAAWKAELSRREAEIARQEARLKVERENLEKEKSVLMGTASSQDSQDGALEITVSGEKYRCLRFSKAKK

SEQ ID NO: 11604 - protein, 84 aa, Zea mays subsp. mays
  peptide (1)..(84): Ceres Seq. ID no. 12414404
  misc_feature (1)..(84): Homolog of NCBI NO: 18398390 NR Description: expressed protein; protein id: At2g17350.1, by cDNA: 99231. [Arabidopsis thaliana] unknown [Arabidopsis thaliana] >gi|26449597|dbj|BAC41924.1|
  misc_feature (1)..(73): Homolog of NCBI NO: 25371273 NR Description: hypothetical protein At2g17350 [imported] -
MQSYIAEREREVAEREAAWKAELSRREAEIARQEARLKVERENLEKEKSVLMGTASSQDSQDGALEITVSGEKYRCLRFSKAKK

SEQ ID NO: 11605 - DNA, 592 bp, Zea mays subsp. mays
  misc_feature (1)..(592): Ceres Seq. ID no. 12566495
  misc_feature: MA Experiment ID: 108535 Result: Up-regulated in Transcription
  misc_feature: MA Experiment 108535 PARAMETER Experiment Name: Zm_Meristem_P Parameter: Age (day) Value: 8
  misc_feature: MA Experiment 108535 PARAMETER Experiment Name: Zm_Meristem_P Parameter: Organism Value: Zea mays
  misc_feature: MA Experiment 108535 PARAMETER Experiment Name: Zm_Meristem_P Parameter: Plant Line Value: 35A19
  misc_feature: MA Experiment 108535 PARAMETER Experiment Name: Zm_Meristem_P Parameter: Tissue Value: Root Meristem vs. Above Root Meristem
  misc_feature: MA Experiment ID: 20000534 Result: Down-regulated in Transcription
  misc_feature: MA Experiment 20000534 PARAMETER Experiment Name: Zm_Hybrid_Pollen_P Parameter: Age (day) Value: 8
  misc_feature: MA Experiment 20000534 PARAMETER Experiment Name: Zm_Hybrid_Pollen_P Parameter: Organism Value: Zea mays
  misc_feature: MA Experiment 20000534 PARAMETER Experiment Name: Zm_Hybrid_Pollen_P Parameter: Plant Line Value: 35A19
  misc_feature: MA Experiment 20000534 PARAMETER Experiment Name: Zm_Hybrid_Pollen_P Parameter: Tissue Value: Pollen vs. Aerial
aaaaagcccaaacccgcatctacgttctactcccactcgcggtcgcggtagccggcggcggcggaggaggaaagcaggcaggccatggcgtcgtcgtcgtcgaccccggcggccgtccgcgagatgcagaaggatctcgaggtccaggccaacgccctcagcaagatccagaaagacatcgccaagaaccaccaggtccgcaagcagtacaccatccaggtcggcgagaacgagctcgtcctcaaggagctggagctgctcagcgatggggccaacgtgtacaagctcatcggaccggtgctggtcaagcaggacctcgcggaggccaaggccaacgtcaagaagcgcatcgagtacatctccgcagagctgaagcggatggatcgggcgctcaaagacttggaggaaaagcaaaacagcaagaaggaatcgatattcaagttgcagcagaggatgcaggctgtacaagctaaggcttagacaactgtttgttggttgcaactagtccaaggccatgcttcatttcatcccaattccctccaggtttttttttggtggggaggaatcaggtgtctgatgttctcgtctccgc

SEQ ID NO: 11606 - protein, 156 aa, Zea mays subsp. mays
  peptide (1)..(156): Ceres Seq. ID no. 12566496
KAQTRIYVLLPLAVAVAGGGGGGKQAGHGVVVVDPGGRPRDAEGSRGPGQRPQQDPERHRQEPPGPQAVHHPGRRERARPQGAGAAQRWGQRVQAHRTGAGQAGPRGGQGQRQEAHRVHLRRAEADGSGAQRLGGKAKQQEGIDIQVAAEDAGCTS

SEQ ID NO: 11607 - protein, 131 aa, Zea mays subsp. mays
  peptide (1)..(131): Ceres Seq. ID no. 12566497
  misc_feature (18)..(125): Pfam Name: KE2 family protein Pfam Description: KE2 family protein
  misc_feature (18)..(125): Pfam Name: KE2 family protein Pfam Description: KE2 family protein
  misc_feature (4)..(129): Homolog of NCBI NO: 30691134 NR Description: hydrophilic protein -related [Arabidopsis
  misc_feature (4)..(129): Homolog of NCBI NO: 26450257 NR Description: unknown protein [Arabidopsis thaliana]
  misc_feature (4)..(96): Homolog of NCBI NO: 25403096 NR Description: probable hydrophilic protein, 29542-30030 - Arabidopsis thaliana >gi|12324172|gb|AAG52059.1|AC022455_13
  misc_feature (14)..(131): Homolog of NCBI NO: 33585747 NR Description: Unknown (protein for MGC:66282) [Danio rerio]
  misc_feature (14)..(131): Homolog of NCBI NO: 27704620 NR Description: similar to H2-K region expressed gene 2 [Mus
  misc_feature (4)..(129): Homolog of NCBI NO: 26450257 NR Description: unknown protein [Arabidopsis thaliana]
  misc_feature (14)..(131): Homolog of NCBI NO: 33585747 NR Description: Unknown (protein for MGC:66282) [Danio rerio]
  misc_feature (13)..(130): Homolog of NCBI NO: 39582756 NR Description: Hypothetical protein CBG21902 [Caenorhabditis
  misc_feature (14)..(129): Homolog of NCBI NO: 38048503 NR Description: similar to Drosophila melanogaster CG7770
  misc_feature (14)..(129): Homolog of NCBI NO: 24667085 NR Description: CG7770-PA [Drosophila melanogaster]
  misc_feature (14)..(129): Homolog of NCBI NO: 7657162 NR Description: HLA class II region expressed gene KE2; KE2 [Homo sapiens] >gi|6016432|sp|O15212|PFD6_HUMAN Prefoldin subunit (Protein Ke2) >gi|2648022|emb|CAB09993.1| cICF0811.5.1 (HLA class
  misc_feature (14)..(129): Homolog of NCBI NO: 6754128 NR Description: H2-K region expressed gene 2 [Mus musculus]
  misc_feature (14)..(131): Homolog of NCBI NO: 27704620 NR Description: similar to H2-K region expressed gene 2 [Mus
  misc_feature (4)..(96): Homolog of NCBI NO: 25403096 NR Description: probable hydrophilic protein, 29542-30030 - Arabidopsis thaliana >gi|12324172|gb|AAG52059.1|AC022455_13
  misc_feature (4)..(129): Homolog of NCBI NO: 30691134 NR Description: hydrophilic protein -related [Arabidopsis
  misc_feature (14)..(129): Homolog of NCBI NO: 6754128 NR Description: H2-K region expressed gene 2 [Mus musculus]
  misc_feature (14)..(129): Homolog of NCBI NO: 7657162 NR Description: HLA class II region expressed gene KE2; KE2 [Homo sapiens] >gi|6016432|sp|O15212|PFD6_HUMAN Prefoldin subunit (Protein Ke2) >gi|2648022|emb|CAB09993.1| cICF0811.5.1 (HLA class
  misc_feature (14)..(129): Homolog of NCBI NO: 24667085 NR Description: CG7770-PA [Drosophila melanogaster]
  misc_feature (14)..(129): Homolog of NCBI NO: 38048503 NR Description: similar to Drosophila melanogaster CG7770
  misc_feature (13)..(130): Homolog of NCBI NO: 39582756 NR Description: Hypothetical protein CBG21902 [Caenorhabditis
MASSSSTPAAVREMQKDLEVQANALSKIQKDIAKNHQVRKQYTIQVGENELVLKELELLSDGANVYKLIGPVLVKQDLAEAKANVKKRIEYISAELKRMDRALKDLEEKQNSKKESIFKLQQRMQAVQAKA

SEQ ID NO: 11608 - protein, 123 aa, Zea mays subsp. mays
  peptide (1)..(123): Ceres Seq. ID no. 12566498
  misc_feature (1)..(122): Pfam Name: Cupin Pfam Description: Cupin
  misc_feature (1)..(122): Pfam Name: Cupin Pfam Description: Cupin
  misc_feature (6)..(120): Homolog of NCBI NO: 29250446 NR Description: GLP_39_87477_88058 [Giardia lamblia ATCC 50803]
  misc_feature (1)..(123): Homolog of NCBI NO: 14017923 NR Description: KIAA1853 protein [Homo sapiens]
  misc_feature (8)..(123): Homolog of NCBI NO: 23490106 NR Description: FHA domain, putative [Plasmodium yoelii yoelii]
  misc_feature (8)..(123): Homolog of NCBI NO: 17137528 NR Description: CG4602-PA [Drosophila melanogaster]
  misc_feature (6)..(120): Homolog of NCBI NO: 29250446 NR Description: GLP_39_87477_88058 [Giardia lamblia ATCC 50803]
  misc_feature (8)..(123): Homolog of NCBI NO: 23490106 NR Description: FHA domain, putative [Plasmodium yoelii yoelii]
  misc_feature (19)..(123): Homolog of NCBI NO: 7949115 NR Description: Ser/Arg-related nuclear matrix protein;
  misc_feature (19)..(123): Homolog of NCBI NO: 23274133 NR Description: Similar to serine/arginine repetitive matrix 1
  misc_feature (10)..(123): Homolog of NCBI NO: 5821143 NR Description: RNA binding protein [Homo sapiens]
  misc_feature (10)..(123): Homolog of NCBI NO: 5821145 NR Description: RNA binding protein [Homo sapiens]
  misc_feature (8)..(123): Homolog of NCBI NO: 7532408 NR Description: splicing factor SRp54 [Drosophila melanogaster]
  misc_feature (8)..(123): Homolog of NCBI NO: 17137528 NR Description: CG4602-PA [Drosophila melanogaster]
  misc_feature (1)..(123): Homolog of NCBI NO: 14017923 NR Description: KIAA1853 protein [Homo sapiens]
  misc_feature (19)..(123): Homolog of NCBI NO: 7949115 NR Description: Ser/Arg-related nuclear matrix protein;
  misc_feature (8)..(123): Homolog of NCBI NO: 7532408 NR Description: splicing factor SRp54 [Drosophila melanogaster]
  misc_feature (10)..(123): Homolog of NCBI NO: 5821145 NR Description: RNA binding protein [Homo sapiens]
  misc_feature (10)..(123): Homolog of NCBI NO: 5821143 NR Description: RNA binding protein [Homo sapiens]
  misc_feature (19)..(123): Homolog of NCBI NO: 23274133 NR Description: Similar to serine/arginine repetitive matrix 1
KSPNPHLRSTPTRGRGSRRRRRRKAGRPWRRRRRPRRPSARCRRISRSRPTPSARSRKTSPRTTRSASSTPSRSARTSSSSRSWSCSAMGPTCTSSSDRCWSSRTSRRPRPTSRSASSTSPQS

SEQ ID NO: 11609 - DNA, 1295 bp, Zea mays subsp. mays
  misc_feature (1)..(1295): Ceres Seq. ID no. 12366636
  misc_feature: MA Experiment ID: 108522 Result: Up-regulated in Transcription
  misc_feature: MA Experiment 108522 PARAMETER Experiment Name: Zm_42deg_Heat_P Parameter: Age (day) Value: 8
  misc_feature: MA Experiment 108522 PARAMETER Experiment Name: Zm_42deg_Heat_P Parameter: Organism Value: Zea mays
  misc_feature: MA Experiment 108522 PARAMETER Experiment Name: Zm_42deg_Heat_P Parameter: Plant Line Value: 35A19
  misc_feature: MA Experiment 108522 PARAMETER Experiment Name: Zm_42deg_Heat_P Parameter: Temperature (deg C) Value: 42 vs. 22
  misc_feature: MA Experiment 108522 PARAMETER Experiment Name: Zm_42deg_Heat_P Parameter: Timepoint (hr) Value: 1
  misc_feature: MA Experiment 108522 PARAMETER Experiment Name: Zm_42deg_Heat_P Parameter: Tissue Value: Aerial
  misc_feature: MA Experiment ID: 108534 Result: Down-regulated in Transcription
  misc_feature: MA Experiment 108534 PARAMETER Experiment Name: Zm_4deg_Cold_P Parameter: Age (hr) Value: 8
  misc_feature: MA Experiment 108534 PARAMETER Experiment Name: Zm_4deg_Cold_P Parameter: Organism Value: Zea mays
  misc_feature: MA Experiment 108534 PARAMETER Experiment Name: Zm_4deg_Cold_P Parameter: Plant Line Value: 35A19
  misc_feature: MA Experiment 108534 PARAMETER Experiment Name: Zm_4deg_Cold_P Parameter: Temperature (deg C) Value: 4 vs. 22
  misc_feature: MA Experiment 108534 PARAMETER Experiment Name: Zm_4deg_Cold_P Parameter: Timepoint (hr) Value: 6
  misc_feature: MA Experiment 108534 PARAMETER Experiment Name: Zm_4deg_Cold_P Parameter: Tissue Value: Aerial
  misc_feature: MA Experiment ID: 108535 Result: Down-regulated in Transcription
  misc_feature: MA Experiment 108535 PARAMETER Experiment Name: Zm_Meristem_P Parameter: Age (day) Value: 8
  misc_feature: MA Experiment 108535 PARAMETER Experiment Name: Zm_Meristem_P Parameter: Organism Value: Zea mays
  misc_feature: MA Experiment 108535 PARAMETER Experiment Name: Zm_Meristem_P Parameter: Plant Line Value: 35A19
  misc_feature: MA Experiment 108535 PARAMETER Experiment Name: Zm_Meristem_P Parameter: Tissue Value: Root Meristem vs. Above Root Meristem
  misc_feature: MA Experiment ID: 20000626 Result: Up-regulated in Transcription
  misc_feature: MA Experiment 20000626 PARAMETER Experiment Name: Zm_Herbicide-Treatments_P Parameter: Timepoint (hr) Value: 12
  misc_feature: MA Experiment 20000626 PARAMETER Experiment Name: Zm_Herbicide-Treatments_P Parameter: Tissue Value: Aerial
  misc_feature: MA Experiment 20000626 PARAMETER Experiment Name: Zm_Herbicide-Treatments_P Parameter: Treatment Value: Roundup vs. No Treatment
aggctcaatcgatcagactccttttaactccaccactccattgtccattccctggctgcctctcgttgctgttgttgttgctgctcttctctaccttgctttcccccaataggcctctctgcactcttgagcttctttgccttgttggacttggtagctgtggcgctgcagaaatgggcgctccctaccacctccaatcaccaagaaccatcataaccaaggtaatgagcatgaagcagctgccaccggccctgccacagccgccgccggtggatcagtccgaggtaaccgagcagacaccggtgctgccacggtcgcagccggtggatccacccacgataaccgggcagccacaggcgccgcggcagccagcgcgggcgccttccaagttaatcctgcaaccgcgccagcggacctcgccggcgatgtggtgcgcggccatcggctgcttcgccttcagcatcctcctcatcgtcgcaggcgtcgtcaccctggtcgtcttcctggcggtgaagccgaggccgccgtccttcgacgccgccaacgccatcctcaacagcgtctacgtggactcgccggccccctacttcaacaatgacatgacgctcgttgccaacgtctccaaccccaaccgggagatcgacttggtgttccggtccgccactgtcgagctcttcttccaggacaggcccatggccgtgcaggcgctgcctccgttcgcgcagcggcgaggccagtcccagctcctgaacatgcacctgctctccagccgggtcctgctgccgccccaggtggcggtaaagatggtggaccaggtgaggagcaacagggtggtgtacacgatcagaggcgccttcaaagtggaggccaggttcaggttcggccactactcgtactggatgtacacggtctgtcagctggaactcactgcccctccttctggagttcttgttgcccggagatgcacaacaaaatgactggctctagaaaaaatcccctcgttttcttttgttattatatatcaaatcttagctatttttatactgatgatggaaatggcccgagaacagcggaacgtacctattgttgattcatgtgaattcgaagttggttcttcagctttgtcgatctcttggctgctcagttgttgctgcgtcctagtggctagctgcaacaacacacagtaggtcagtagcttagatcttaagcaacctgaacagagttcaacaaagtgtgtaatgtacagcatagaactctttgcttgagtgtaagcagtacagtggattttttttctc

SEQ ID NO: 11610 - protein, 324 aa, Zea mays subsp. mays
  peptide (1)..(324): Ceres Seq. ID no. 12366637
  misc_feature (85)..(324): Homolog of NCBI NO: 15241117 NR Description: unknown protein; protein id: At5g56050.1 thaliana] >gi|9758625|dbj|BAB09287.1| gene_id:MDA7.9~unknown
  misc_feature (164)..(324): Homolog of NCBI NO: 15236740 NR Description: hypothetical protein; protein id: At4g26490.1
  misc_feature (76)..(324): Homolog of NCBI NO: 15231546 NR Description: hypothetical protein; protein id: At3g26350.1 thaliana] >gi|9294293|dbj|BAB02195.1|
  misc_feature (63)..(324): Homolog of NCBI NO: 15222151 NR Description: hypothetical protein; protein id: At1g13050.1
  misc_feature (99)..(322): Homolog of NCBI NO: 20804932 NR Description: P0456E05.10 [Oryza sativa (japonica
  misc_feature (78)..(321): Homolog of NCBI NO: 20804896 NR Description: P0497A05.21 [Oryza sativa (japonica
  misc_feature (132)..(323): Homolog of NCBI NO: 15242362 NR Description: unknown protein; protein id: At5g45320.1 thaliana] >gi|10177003|dbj|BAB10253.1| gene_id:K9E15.10~unknown
AQSIRLLLTPPLHCPFPGCLSLLLLLLLFSTLLSPNRPLCTLELLCLVGLGSCGAAEMGAPYHLQSPRTIITKVMSMKQLPPALPQPPPVDQSEVTEQTPVLPRSQPVDPPTITGQPQAPRQPARAPSKLILQPRQRTSPAMWCAAIGCFAFSILLIVAGVVTLVVFLAVKPRPPSFDAANAILNSVYVDSPAPYFNNDMTLVANVSNPNREIDLVFRSATVELFFQDRPMAVQALPPFAQRRGQSQLLNMHLLSSRVLLPPQVAVKMVDQVRSNRVVYTIRGAFKVEARFRFGHYSYWMYTVCQLELTAPPSGVLVARRCTTK

SEQ ID NO: 11611 - protein, 267 aa, Zea mays subsp. mays
  peptide (1)..(267): Ceres Seq. ID no. 12366638
  misc_feature (28)..(267): Homolog of NCBI NO: 15241117 NR Description: unknown protein; protein id: At5g56050.1 thaliana] >gi|9758625|dbj|BAB09287.1| gene_id:MDA7.9~unknown
  misc_feature (107)..(267): Homolog of NCBI NO: 15236740 NR Description: hypothetical protein; protein id: At4g26490.1
  misc_feature (19)..(267): Homolog of NCBI NO: 15231546 NR Description: hypothetical protein; protein id: At3g26350.1 thaliana] >gi|9294293|dbj|BAB02195.1|
  misc_feature (6)..(267): Homolog of NCBI NO: 15222151 NR Description: hypothetical protein; protein id: At1g13050.1
  misc_feature (42)..(265): Homolog of NCBI NO: 20804932 NR Description: P0456E05.10 [Oryza sativa (japonica
  misc_feature (21)..(264): Homolog of NCBI NO: 20804896 NR Description: P0497A05.21 [Oryza sativa (japonica
  misc_feature (75)..(266): Homolog of NCBI NO: 15242362 NR Description: unknown protein; protein id: At5g45320.1 thaliana] >gi|10177003|dbj|BAB10253.1| gene_id:K9E15.10~unknown
MGAPYHLQSPRTIITKVMSMKQLPPALPQPPPVDQSEVTEQTPVLPRSQPVDPPTITGQPQAPRQPARAPSKLILQPRQRTSPAMWCAAIGCFAFSILLIVAGVVTLVVFLAVKPRPPSFDAANAILNSVYVDSPAPYFNNDMTLVANVSNPNREIDLVFRSATVELFFQDRPMAVQALPPFAQRRGQSQLLNMHLLSSRVLLPPQVAVKMVDQVRSNRVVYTIRGAFKVEARFRFGHYSYWMYTVCQLELTAPPSGVLVARRCTTK

SEQ ID NO: 11612 - protein, 250 aa, Zea mays subsp. mays
  peptide (1)..(250): Ceres Seq. ID no. 12366639
  misc_feature (11)..(250): Homolog of NCBI NO: 15241117 NR Description: unknown protein; protein id: At5g56050.1 thaliana] >gi|9758625|dbj|BAB09287.1| gene_id:MDA7.9~unknown
  misc_feature (90)..(250): Homolog of NCBI NO: 15236740 NR Description: hypothetical protein; protein id: At4g26490.1
  misc_feature (2)..(250): Homolog of NCBI NO: 15231546 NR Description: hypothetical protein; protein id: At3g26350.1 thaliana] >gi|9294293|dbj|BAB02195.1|
  misc_feature (1)..(250): Homolog of NCBI NO: 15222151 NR Description: hypothetical protein; protein id: At1g13050.1
  misc_feature (25)..(248): Homolog of NCBI NO: 20804932 NR Description: P0456E05.10 [Oryza sativa (japonica
  misc_feature (4)..(247): Homolog of NCBI NO: 20804896 NR Description: P0497A05.21 [Oryza sativa (japonica
  misc_feature (58)..(249): Homolog of NCBI NO: 15242362 NR Description: unknown protein; protein id: At5g45320.1 thaliana] >gi|10177003|dbj|BAB10253.1| gene_id:K9E15.10~unknown
MSMKQLPPALPQPPPVDQSEVTEQTPVLPRSQPVDPPTITGQPQAPRQPARAPSKLILQPRQRTSPAMWCAAIGCFAFSILLIVAGVVTLVVFLAVKPRPPSFDAANAILNSVYVDSPAPYFNNDMTLVANVSNPNREIDLVFRSATVELFFQDRPMAVQALPPFAQRRGQSQLLNMHLLSSRVLLPPQVAVKMVDQVRSNRVVYTIRGAFKVEARFRFGHYSYWMYTVCQLELTAPPSGVLVARRCTTK

SEQ ID NO: 11613 - DNA, 948 bp, Zea mays subsp. mays
  misc_feature (1)..(948): Ceres Seq. ID no. 12413666
  misc_feature: MA Experiment ID: 20000534 Result: Down-regulated in Transcription
  misc_feature: MA Experiment 20000534 PARAMETER Experiment Name: Zm_Hybrid_Pollen_P Parameter: Age (day) Value: 8
  misc_feature: MA Experiment 20000534 PARAMETER Experiment Name: Zm_Hybrid_Pollen_P Parameter: Organism Value: Zea mays
  misc_feature: MA Experiment 20000534 PARAMETER Experiment Name: Zm_Hybrid_Pollen_P Parameter: Plant Line Value: 35A19
  misc_feature: MA Experiment 20000534 PARAMETER Experiment Name: Zm_Hybrid_Pollen_P Parameter: Tissue Value: Pollen vs. Aerial
gcatttgcgcagcaaaaaggaggaaaaagtgaggagaaagaagagaggaaacaggaaagagtacaactcggcggcgacaccaccgctcgcagcctcccgccgcgatggcgatgcgttcgctcgccaggctccaccgccaactctccccttctctcctccaccgccatagcacacggcgtgggtggcctcccgcttctgacgcggcctttctctggcgcgggctcgcctcgtcatcaccttccgcggccggtcgggagaagagctcgagacggactttggggtaccttctcggcgttgcggtcgccatggtcggcgcctcgtacgccgccgtaccgctataccgtcgcttctgccaggctaccggctacggcggcaccgtccaacgacgcgagagtgtggaggagaagatctcacggcatgctcgagacggaactacgacatcacgagaaataattgttcaatttaatgctgatgttgctgatggaatgccgtggaagttcatccctacacagagagaggtcagggttaaacctggtgaaagtgctcttgctttttatactgctgagaatcgcagttcagctccaattactggtgtatccacgtataatgttgctcctatgaaggctgcgatttacttcaataagatacaatgtttctgctttgaggagcaaacacttcttcctggagaacagattgacatgccagtattcttctatatcgatcctgagtttgagacagaccccaaaatggacggggtgaacaatatcgttctttcgtacacattcttcaaggtgaacgatagttagaaaacgtgccaacagcattgttgtattaggaaaacaacacttgaacaatccatatgcagatatgctgcggaatagcatctcatgtaacaccaagagttttttttttgatagttagctcacatttgtctatggagaattttgc

SEQ ID NO: 11614 - protein, 233 aa, Zea mays subsp. mays
  peptide (1)..(233): Ceres Seq. ID no. 12413667
  misc_feature (75)..(230): Pfam Name: Cytochrome c oxidase assembly protein  CtaG / Cox11 Pfam Description: Cytochrome c oxidase assembly protein CtaG /
  misc_feature (5)..(233): Homolog of NCBI NO: 28301938 NR Description: putative cytochrome c oxidase assembly protein
  misc_feature (38)..(232): Homolog of NCBI NO: 15217755 NR Description: hypothetical protein; protein id: At1g02410.1 thaliana] >gi|26452392|dbj|BAC43281.1| unknown protein thaliana] >gi|28950841|gb|AAO63344.1| At1g02410 [Arabidopsis
  misc_feature (38)..(232): Homolog of NCBI NO: 25310029 NR Description: hypothetical protein T6A9.10 - Arabidopsis
  misc_feature (3)..(233): Homolog of NCBI NO: 24581944 NR Description: CG31648-PA [Drosophila melanogaster]
  misc_feature (54)..(232): Homolog of NCBI NO: 11466506 NR Description: component involved in Haem biosynthesis americana] >gi|8134373|sp|O21243|COXZ_RECAM CYTOCHROME C OXIDASE
  misc_feature (42)..(233): Homolog of NCBI NO: 4758034 NR Description: COX11 homolog; cytochrome c oxidase subunit 11; c oxidase assembly protein COX11 [Homo sapiens]
  misc_feature (42)..(233): Homolog of NCBI NO: 21264410 NR Description: Cytochrome c oxidase assembly protein COX11, precursor >gi|13543475|gb|AAH05895.1|AAH05895 COX11 (yeast)
  misc_feature (42)..(233): Homolog of NCBI NO: 39841021 NR Description: RIKEN cDNA 2010004I09 [Mus musculus]
  misc_feature (42)..(233): Homolog of NCBI NO: 34873027 NR Description: similar to COX11 homolog; cytochrome c oxidase
  misc_feature (53)..(229): Homolog of NCBI NO: 19114191 NR Description: putative cytochrome c oxidase assembly protein
MAMRSLARLHRQLSPSLLHRHSTRRGWPPASDAAFLWRGLASSSPSAAGREKSSRRTLGYLLGVAVAMVGASYAAVPLYRRFCQATGYGGTVQRRESVEEKISRHARDGTTTSREIIVQFNADVADGMPWKFIPTQREVRVKPGESALAFYTAENRSSAPITGVSTYNVAPMKAAIYFNKIQCFCFEEQTLLPGEQIDMPVFFYIDPEFETDPKMDGVNNIVLSYTFFKVNDS

SEQ ID NO: 11615 - protein, 231 aa, Zea mays subsp. mays
  peptide (1)..(231): Ceres Seq. ID no. 12413668
  misc_feature (73)..(228): Pfam Name: Cytochrome c oxidase assembly protein  CtaG / Cox11 Pfam Description: Cytochrome c oxidase assembly protein CtaG /
  misc_feature (1)..(231): Homolog of NCBI NO: 24581944 NR Description: CG31648-PA [Drosophila melanogaster]
  misc_feature (52)..(230): Homolog of NCBI NO: 11466506 NR Description: component involved in Haem biosynthesis americana] >gi|8134373|sp|O21243|COXZ_RECAM CYTOCHROME C OXIDASE
  misc_feature (40)..(231): Homolog of NCBI NO: 4758034 NR Description: COX11 homolog; cytochrome c oxidase subunit 11; c oxidase assembly protein COX11 [Homo sapiens]
  misc_feature (40)..(231): Homolog of NCBI NO: 21264410 NR Description: Cytochrome c oxidase assembly protein COX11, precursor >gi|13543475|gb|AAH05895.1|AAH05895 COX11 (yeast)
  misc_feature (36)..(230): Homolog of NCBI NO: 15217755 NR Description: hypothetical protein; protein id: At1g02410.1 thaliana] >gi|26452392|dbj|BAC43281.1| unknown protein thaliana] >gi|28950841|gb|AAO63344.1| At1g02410 [Arabidopsis
  misc_feature (36)..(230): Homolog of NCBI NO: 25310029 NR Description: hypothetical protein T6A9.10 - Arabidopsis
  misc_feature (3)..(231): Homolog of NCBI NO: 28301938 NR Description: putative cytochrome c oxidase assembly protein
  misc_feature (40)..(231): Homolog of NCBI NO: 39841021 NR Description: RIKEN cDNA 2010004I09 [Mus musculus]
  misc_feature (40)..(231): Homolog of NCBI NO: 34873027 NR Description: similar to COX11 homolog; cytochrome c oxidase
  misc_feature (51)..(227): Homolog of NCBI NO: 19114191 NR Description: putative cytochrome c oxidase assembly protein
MRSLARLHRQLSPSLLHRHSTRRGWPPASDAAFLWRGLASSSPSAAGREKSSRRTLGYLLGVAVAMVGASYAAVPLYRRFCQATGYGGTVQRRESVEEKISRHARDGTTTSREIIVQFNADVADGMPWKFIPTQREVRVKPGESALAFYTAENRSSAPITGVSTYNVAPMKAAIYFNKIQCFCFEEQTLLPGEQIDMPVFFYIDPEFETDPKMDGVNNIVLSYTFFKVNDS

SEQ ID NO: 11616 - protein, 166 aa, Zea mays subsp. mays
  peptide (1)..(166): Ceres Seq. ID no. 12413669
  misc_feature (8)..(163): Pfam Name: Cytochrome c oxidase assembly protein  CtaG / Cox11 Pfam Description: Cytochrome c oxidase assembly protein CtaG /
  misc_feature (1)..(166): Homolog of NCBI NO: 28301938 NR Description: putative cytochrome c oxidase assembly protein
  misc_feature (1)..(165): Homolog of NCBI NO: 15217755 NR Description: hypothetical protein; protein id: At1g02410.1 thaliana] >gi|26452392|dbj|BAC43281.1| unknown protein thaliana] >gi|28950841|gb|AAO63344.1| At1g02410 [Arabidopsis
  misc_feature (1)..(165): Homolog of NCBI NO: 25310029 NR Description: hypothetical protein T6A9.10 - Arabidopsis
  misc_feature (1)..(166): Homolog of NCBI NO: 24581944 NR Description: CG31648-PA [Drosophila melanogaster]
  misc_feature (1)..(165): Homolog of NCBI NO: 11466506 NR Description: component involved in Haem biosynthesis americana] >gi|8134373|sp|O21243|COXZ_RECAM CYTOCHROME C OXIDASE
  misc_feature (1)..(166): Homolog of NCBI NO: 4758034 NR Description: COX11 homolog; cytochrome c oxidase subunit 11; c oxidase assembly protein COX11 [Homo sapiens]
  misc_feature (1)..(166): Homolog of NCBI NO: 21264410 NR Description: Cytochrome c oxidase assembly protein COX11, precursor >gi|13543475|gb|AAH05895.1|AAH05895 COX11 (yeast)
  misc_feature (1)..(166): Homolog of NCBI NO: 39841021 NR Description: RIKEN cDNA 2010004I09 [Mus musculus]
  misc_feature (1)..(166): Homolog of NCBI NO: 34873027 NR Description: similar to COX11 homolog; cytochrome c oxidase
  misc_feature (1)..(162): Homolog of NCBI NO: 19114191 NR Description: putative cytochrome c oxidase assembly protein
MVGASYAAVPLYRRFCQATGYGGTVQRRESVEEKISRHARDGTTTSREIIVQFNADVADGMPWKFIPTQREVRVKPGESALAFYTAENRSSAPITGVSTYNVAPMKAAIYFNKIQCFCFEEQTLLPGEQIDMPVFFYIDPEFETDPKMDGVNNIVLSYTFFKVNDS

SEQ ID NO: 11617 - DNA, 1097 bp, Zea mays subsp. mays; identical to SEQ ID NO: 3807
  misc_feature (1)..(1097): Ceres Seq. ID no. 13494437
  misc_feature: MA Experiment ID: 108504 Result: Up-regulated in Transcription
  misc_feature: MA Experiment 108504 PARAMETER Experiment Name: Zm_Drought_P Parameter: Age (day) Value: 8
  misc_feature: MA Experiment 108504 PARAMETER Experiment Name: Zm_Drought_P Parameter: Organism Value: Zea mays
  misc_feature: MA Experiment 108504 PARAMETER Experiment Name: Zm_Drought_P Parameter: Plant Line Value: 35A19
  misc_feature: MA Experiment 108504 PARAMETER Experiment Name: Zm_Drought_P Parameter: Timepoint (hr) Value: 12
  misc_feature: MA Experiment 108504 PARAMETER Experiment Name: Zm_Drought_P Parameter: Tissue Value: Aerial
  misc_feature: MA Experiment 108504 PARAMETER Experiment Name: Zm_Drought_P Parameter: Treatment Value: Drought vs. No Drought
  misc_feature: MA Experiment ID: 108513 Result: Up-regulated in Transcription
  misc_feature: MA Experiment 108513 PARAMETER Experiment Name: Zm_100uM_ABA_P Parameter: Age (day) Value: 8
  misc_feature: MA Experiment 108513 PARAMETER Experiment Name: Zm_100uM_ABA_P Parameter: Organism Value: Zea mays
  misc_feature: MA Experiment 108513 PARAMETER Experiment Name: Zm_100uM_ABA_P Parameter: Plant Line Value: 35A19
  misc_feature: MA Experiment 108513 PARAMETER Experiment Name: Zm_100uM_ABA_P Parameter: Timepoint (hr) Value: 6
  misc_feature: MA Experiment 108513 PARAMETER Experiment Name: Zm_100uM_ABA_P Parameter: Tissue Value: Aerial
  misc_feature: MA Experiment 108513 PARAMETER Experiment Name: Zm_100uM_ABA_P Parameter: Treatment Value: 100uM ABA vs. No Treatment
  misc_feature: MA Experiment ID: 108522 Result: Up-regulated in Transcription
  misc_feature: MA Experiment 108522 PARAMETER Experiment Name: Zm_42deg_Heat_P Parameter: Age (day) Value: 8
  misc_feature: MA Experiment 108522 PARAMETER Experiment Name: Zm_42deg_Heat_P Parameter: Organism Value: Zea mays
  misc_feature: MA Experiment 108522 PARAMETER Experiment Name: Zm_42deg_Heat_P Parameter: Plant Line Value: 35A19
  misc_feature: MA Experiment 108522 PARAMETER Experiment Name: Zm_42deg_Heat_P Parameter: Temperature (deg C) Value: 42 vs. 22
  misc_feature: MA Experiment 108522 PARAMETER Experiment Name: Zm_42deg_Heat_P Parameter: Timepoint (hr) Value: 1
  misc_feature: MA Experiment 108522 PARAMETER Experiment Name: Zm_42deg_Heat_P Parameter: Tissue Value: Aerial
  misc_feature: MA Experiment ID: 108523 Result: Up-regulated in Transcription
  misc_feature: MA Experiment 108523 PARAMETER Experiment Name: Zm_42deg_Heat_P Parameter: Age (day) Value: 8
  misc_feature: MA Experiment 108523 PARAMETER Experiment Name: Zm_42deg_Heat_P Parameter: Organism Value: Zea mays
  misc_feature: MA Experiment 108523 PARAMETER Experiment Name: Zm_42deg_Heat_P Parameter: Plant Line Value: 35A19
  misc_feature: MA Experiment 108523 PARAMETER Experiment Name: Zm_42deg_Heat_P Parameter: Temperature (deg C) Value: 42 vs. 22
  misc_feature: MA Experiment 108523 PARAMETER Experiment Name: Zm_42deg_Heat_P Parameter: Timepoint (hr) Value: 6
  misc_feature: MA Experiment 108523 PARAMETER Experiment Name: Zm_42deg_Heat_P Parameter: Tissue Value: Aerial
  misc_feature: MA Experiment ID: 108532 Result: Up-regulated in Transcription
  misc_feature: MA Experiment 108532 PARAMETER Experiment Name: Zm_20uM_KNO3_H-to-L_P Parameter: Age (day) Value: 11
  misc_feature: MA Experiment 108532 PARAMETER Experiment Name: Zm_20uM_KNO3_H-to-L_P Parameter: Organism Value: Zea mays
  misc_feature: MA Experiment 108532 PARAMETER Experiment Name: Zm_20uM_KNO3_H-to-L_P Parameter: Plant Line Value: 35A19
  misc_feature: MA Experiment 108532 PARAMETER Experiment Name: Zm_20uM_KNO3_H-to-L_P Parameter: Timepoint (hr) Value: 16
  misc_feature: MA Experiment 108532 PARAMETER Experiment Name: Zm_20uM_KNO3_H-to-L_P Parameter: Tissue Value: Roots
  misc_feature: MA Experiment 108532 PARAMETER Experiment Name: Zm_20uM_KNO3_H-to-L_P Parameter: Treatment Value: 20uM KNO3 vs. 60mM KNO3
  misc_feature: MA Experiment ID: 108534 Result: Down-regulated in Transcription
  misc_feature: MA Experiment 108534 PARAMETER Experiment Name: Zm_4deg_Cold_P Parameter: Age (hr) Value: 8
  misc_feature: MA Experiment 108534 PARAMETER Experiment Name: Zm_4deg_Cold_P Parameter: Organism Value: Zea mays
  misc_feature: MA Experiment 108534 PARAMETER Experiment Name: Zm_4deg_Cold_P Parameter: Plant Line Value: 35A19
  misc_feature: MA Experiment 108534 PARAMETER Experiment Name: Zm_4deg_Cold_P Parameter: Temperature (deg C) Value: 4 vs. 22
  misc_feature: MA Experiment 108534 PARAMETER Experiment Name: Zm_4deg_Cold_P Parameter: Timepoint (hr) Value: 6
  misc_feature: MA Experiment 108534 PARAMETER Experiment Name: Zm_4deg_Cold_P Parameter: Tissue Value: Aerial
  misc_feature: MA Experiment ID: 108540 Result: Up-regulated in Transcription
  misc_feature: MA Experiment 108540 PARAMETER Experiment Name: Zm_20percent_PEG_P Parameter: Age (day) Value: 8
  misc_feature: MA Experiment 108540 PARAMETER Experiment Name: Zm_20percent_PEG_P Parameter: Organism Value: Zea mays
  misc_feature: MA Experiment 108540 PARAMETER Experiment Name: Zm_20percent_PEG_P Parameter: Plant Line Value: 35A19
  misc_feature: MA Experiment 108540 PARAMETER Experiment Name: Zm_20percent_PEG_P Parameter: Timepoint (hr) Value: 6
  misc_feature: MA Experiment 108540 PARAMETER Experiment Name: Zm_20percent_PEG_P Parameter: Tissue Value: Aerial
  misc_feature: MA Experiment 108540 PARAMETER Experiment Name: Zm_20percent_PEG_P Parameter: Treatment Value: 20percent PEG vs. No Treatment
  misc_feature: MA Experiment ID: 108543 Result: Up-regulated in Transcription
  misc_feature: MA Experiment ID: 108544 Result: Up-regulated in Transcription
  misc_feature: MA Experiment ID: 108548 Result: Up-regulated in Transcription
  misc_feature: MA Experiment 108548 PARAMETER Experiment Name: Zm_20uM_KNO3_H-to-L_P Parameter: Age (day) Value: 11
  misc_feature: MA Experiment 108548 PARAMETER Experiment Name: Zm_20uM_KNO3_H-to-L_P Parameter: Organism Value: Zea mays
  misc_feature: MA Experiment 108548 PARAMETER Experiment Name: Zm_20uM_KNO3_H-to-L_P Parameter: Plant Line Value: 35A19
  misc_feature: MA Experiment 108548 PARAMETER Experiment Name: Zm_20uM_KNO3_H-to-L_P Parameter: Timepoint (hr) Value: 4
  misc_feature: MA Experiment 108548 PARAMETER Experiment Name: Zm_20uM_KNO3_H-to-L_P Parameter: Tissue Value: Roots
  misc_feature: MA Experiment 108548 PARAMETER Experiment Name: Zm_20uM_KNO3_H-to-L_P Parameter: Treatment Value: 20uM KNO3 vs. 60mM KNO3
  misc_feature: MA Experiment ID: 108689 Result: Up-regulated in Transcription
  misc_feature: MA Experiment 108689 PARAMETER Experiment Name: Zm_Drought_Roots_P Parameter: Age (day) Value: 9
  misc_feature: MA Experiment 108689 PARAMETER Experiment Name: Zm_Drought_Roots_P Parameter: Organism Value: Zea mays
  misc_feature: MA Experiment 108689 PARAMETER Experiment Name: Zm_Drought_Roots_P Parameter: Plant Line Value: 35A19
  misc_feature: MA Experiment 108689 PARAMETER Experiment Name: Zm_Drought_Roots_P Parameter: Timepoint (hr) Value: 24
  misc_feature: MA Experiment 108689 PARAMETER Experiment Name: Zm_Drought_Roots_P Parameter: Tissue Value: Roots
  misc_feature: MA Experiment 108689 PARAMETER Experiment Name: Zm_Drought_Roots_P Parameter: Treatment Value: Drought vs. No Drought
  misc_feature: MA Experiment ID: 20000480 Result: Up-regulated in Transcription
  misc_feature: MA Experiment 20000480 PARAMETER Experiment Name: Zm_Drought_P Parameter: Age (day) Value: 11
  misc_feature: MA Experiment 20000480 PARAMETER Experiment Name: Zm_Drought_P Parameter: Organism Value: Zea mays
  misc_feature: MA Experiment 20000480 PARAMETER Experiment Name: Zm_Drought_P Parameter: Plant Line Value: 35A19
  misc_feature: MA Experiment 20000480 PARAMETER Experiment Name: Zm_Drought_P Parameter: Timepoint (hr) Value: 72
  misc_feature: MA Experiment 20000480 PARAMETER Experiment Name: Zm_Drought_P Parameter: Tissue Value: Aerial
  misc_feature: MA Experiment 20000480 PARAMETER Experiment Name: Zm_Drought_P Parameter: Treatment Value: Drought vs. No Drought
  misc_feature: MA Experiment ID: 20000487 Result: Down-regulated in Transcription
  misc_feature: MA Experiment 20000487 PARAMETER Experiment Name: Zm_50mM_NH4NO3_L_to_H_P Parameter: Organism Value: Zea mays
  misc_feature: MA Experiment 20000487 PARAMETER Experiment Name: Zm_50mM_NH4NO3_L_to_H_P Parameter: Timepoint (hr) Value: 4
  misc_feature: MA Experiment 20000487 PARAMETER Experiment Name: Zm_50mM_NH4NO3_L_to_H_P Parameter: Tissue Value: Leaves
  misc_feature: MA Experiment 20000487 PARAMETER Experiment Name: Zm_50mM_NH4NO3_L_to_H_P Parameter: Treatment Value: 50mM NH4NO3 vs. 100mM Mannitol
  misc_feature: MA Experiment ID: 20000535 Result: Up-regulated in Transcription
  misc_feature: MA Experiment 20000535 PARAMETER Experiment Name: Zm_Hybrid_Seed_Dev_P Parameter: DAP Value: 30 vs. 12
  misc_feature: MA Experiment 20000535 PARAMETER Experiment Name: Zm_Hybrid_Seed_Dev_P Parameter: Organism Value: Zea mays
  misc_feature: MA Experiment 20000535 PARAMETER Experiment Name: Zm_Hybrid_Seed_Dev_P Parameter: Plant Line Value: 35A19
  misc_feature: MA Experiment 20000535 PARAMETER Experiment Name: Zm_Hybrid_Seed_Dev_P Parameter: Tissue Value: Embryo vs. Unfert Floret
  misc_feature: MA Experiment ID: 20000626 Result: Up-regulated in Transcription
  misc_feature: MA Experiment 20000626 PARAMETER Experiment Name: Zm_Herbicide-Treatments_P Parameter: Timepoint (hr) Value: 12
  misc_feature: MA Experiment 20000626 PARAMETER Experiment Name: Zm_Herbicide-Treatments_P Parameter: Tissue Value: Aerial
  misc_feature: MA Experiment 20000626 PARAMETER Experiment Name: Zm_Herbicide-Treatments_P Parameter: Treatment Value: Roundup vs. No Treatment
  misc_feature: MA Experiment ID: 20001606 Result: Down-regulated in Transcription
  misc_feature: MA Experiment 20001606 PARAMETER Experiment Name: Zm_50ppm_KNO3_L-to-H_P Parameter: Age (day) Value: 19
  misc_feature: MA Experiment 20001606 PARAMETER Experiment Name: Zm_50ppm_KNO3_L-to-H_P Parameter: Organism Value: Zea mays
  misc_feature: MA Experiment 20001606 PARAMETER Experiment Name: Zm_50ppm_KNO3_L-to-H_P Parameter: Plant Line Value: 35A19
  misc_feature: MA Experiment 20001606 PARAMETER Experiment Name: Zm_50ppm_KNO3_L-to-H_P Parameter: Timepoint (hr) Value: 8
  misc_feature: MA Experiment 20001606 PARAMETER Experiment Name: Zm_50ppm_KNO3_L-to-H_P Parameter: Tissue Value: Shoots
  misc_feature: MA Experiment 20001606 PARAMETER Experiment Name: Zm_50ppm_KNO3_L-to-H_P Parameter: Treatment Value: 50ppm KNO3 vs. 50ppm KCl
  misc_feature: MA Experiment ID: 20001608 Result: Down-regulated in Transcription
  misc_feature: MA Experiment 20001608 PARAMETER Experiment Name: Zm_50ppm_KNO3_L-to-H_P Parameter: Age (day) Value: 21
  misc_feature: MA Experiment 20001608 PARAMETER Experiment Name: Zm_50ppm_KNO3_L-to-H_P Parameter: Organism Value: Zea mays
  misc_feature: MA Experiment 20001608 PARAMETER Experiment Name: Zm_50ppm_KNO3_L-to-H_P Parameter: Plant Line Value: 35A19
  misc_feature: MA Experiment 20001608 PARAMETER Experiment Name: Zm_50ppm_KNO3_L-to-H_P Parameter: Timepoint (hr) Value: 48
  misc_feature: MA Experiment 20001608 PARAMETER Experiment Name: Zm_50ppm_KNO3_L-to-H_P Parameter: Tissue Value: Shoots
  misc_feature: MA Experiment 20001608 PARAMETER Experiment Name: Zm_50ppm_KNO3_L-to-H_P Parameter: Treatment Value: 50ppm KNO3 vs. 50ppm KCl

SEQ ID NO: 11618 - protein, 225 aa, Zea mays subsp. mays; identical to SEQ ID NO: 3808
  peptide (1)..(225): Ceres Seq. ID no. 13494438
  misc_feature (70)..(141): Pfam Name: linker histone H1 and H5 family Pfam Description: linker histone H1 and H5 family
  misc_feature (70)..(141): Pfam Name: linker histone H1 and H5 family Pfam Description: linker histone H1 and H5 family
  misc_feature (70)..(141): Pfam Name: linker histone H1 and H5 family Pfam Description: linker histone H1 and H5 family
  misc_feature (1)..(225): Homolog of NCBI NO: 6006363 NR Description: ESTs AU078183(C62904),C73912(E21020) correspond a region of the predicted gene.~Similar to water stress inducible
  misc_feature (26)..(220): Homolog of NCBI NO: 7439658 NR Description: histone H1, stress-inducible - tomato
  misc_feature (27)..(220): Homolog of NCBI NO: 23506611 NR Description: histone H1D [Nicotiana tabacum]
  misc_feature (22)..(220): Homolog of NCBI NO: 7595978 NR Description: histone H1 variant [Lycopersicon chilense]
  misc_feature (21)..(220): Homolog of NCBI NO: 27529850 NR Description: stress-inducible H1 histone-like protein
  misc_feature (26)..(220): Homolog of NCBI NO: 7439658 NR Description: histone H1, stress-inducible - tomato
  misc_feature (22)..(220): Homolog of NCBI NO: 7595978 NR Description: histone H1 variant [Lycopersicon chilense]
  misc_feature (27)..(220): Homolog of NCBI NO: 23506611 NR Description: histone H1D [Nicotiana tabacum]
  misc_feature (26)..(220): Homolog of NCBI NO: 7439658 NR Description: histone H1, stress-inducible - tomato
  misc_feature (1)..(225): Homolog of NCBI NO: 6006363 NR Description: ESTs AU078183(C62904),C73912(E21020) correspond a region of the predicted gene.~Similar to water stress inducible
  misc_feature (15)..(225): Homolog of NCBI NO: 13540391 NR Description: histone H1 [Pisum sativum]
  misc_feature (1)..(225): Homolog of NCBI NO: 2623960 NR Description: histone H1 [Apium graveolens]
  misc_feature (77)..(215): Homolog of NCBI NO: 7489483 NR Description: histone H1 homolog - rice
  misc_feature (27)..(220): Homolog of NCBI NO: 5726575 NR Description: histone H1C [Nicotiana tabacum]
  misc_feature (27)..(220): Homolog of NCBI NO: 729668 NR Description: Histone H1 >gi|2147479|pir||S65059 histone H1,
  misc_feature (21)..(220): Homolog of NCBI NO: 27529850 NR Description: stress-inducible H1 histone-like protein
  misc_feature (15)..(225): Homolog of NCBI NO: 13540391 NR Description: histone H1 [Pisum sativum]
  misc_feature (1)..(225): Homolog of NCBI NO: 2623960 NR Description: histone H1 [Apium graveolens]
  misc_feature (77)..(215): Homolog of NCBI NO: 7489483 NR Description: histone H1 homolog - rice
  misc_feature (27)..(220): Homolog of NCBI NO: 5726575 NR Description: histone H1C [Nicotiana tabacum]
  misc_feature (27)..(220): Homolog of NCBI NO: 729668 NR Description: Histone H1 >gi|2147479|pir||S65059 histone H1,
  misc_feature (21)..(220): Homolog of NCBI NO: 27529850 NR Description: stress-inducible H1 histone-like protein
  misc_feature (22)..(220): Homolog of NCBI NO: 7595978 NR Description: histone H1 variant [Lycopersicon chilense]
  misc_feature (27)..(220): Homolog of NCBI NO: 23506611 NR Description: histone H1D [Nicotiana tabacum]
  misc_feature (1)..(225): Homolog of NCBI NO: 6006363 NR Description: ESTs AU078183(C62904),C73912(E21020) correspond a region of the predicted gene.~Similar to water stress inducible
  misc_feature (27)..(220): Homolog of NCBI NO: 729668 NR Description: Histone H1 >gi|2147479|pir||S65059 histone H1,
  misc_feature (27)..(220): Homolog of NCBI NO: 5726575 NR Description: histone H1C [Nicotiana tabacum]
  misc_feature (77)..(215): Homolog of NCBI NO: 7489483 NR Description: histone H1 homolog - rice
  misc_feature (1)..(225): Homolog of NCBI NO: 2623960 NR Description: histone H1 [Apium graveolens]
  misc_feature (15)..(225): Homolog of NCBI NO: 13540391 NR Description: histone H1 [Pisum sativum]

SEQ ID NO: 11619 - protein, 149 aa, Zea mays subsp. mays; identical to SEQ ID NO: 3809
  peptide (1)..(149): Ceres Seq. ID no. 13494439
  misc_feature (1)..(65): Pfam Name: linker histone H1 and H5 family Pfam Description: linker histone H1 and H5 family
  misc_feature (1)..(65): Pfam Name: linker histone H1 and H5 family Pfam Description: linker histone H1 and H5 family
  misc_feature (1)..(65): Pfam Name: linker histone H1 and H5 family Pfam Description: linker histone H1 and H5 family
  misc_feature (1)..(149): Homolog of NCBI NO: 6006363 NR Description: ESTs AU078183(C62904),C73912(E21020) correspond a region of the predicted gene.~Similar to water stress inducible
  misc_feature (1)..(144): Homolog of NCBI NO: 7439658 NR Description: histone H1, stress-inducible - tomato
  misc_feature (1)..(144): Homolog of NCBI NO: 23506611 NR Description: histone H1D [Nicotiana tabacum]
  misc_feature (1)..(144): Homolog of NCBI NO: 7595978 NR Description: histone H1 variant [Lycopersicon chilense]
  misc_feature (1)..(144): Homolog of NCBI NO: 27529850 NR Description: stress-inducible H1 histone-like protein
  misc_feature (1)..(144): Homolog of NCBI NO: 7439658 NR Description: histone H1, stress-inducible - tomato
  misc_feature (1)..(144): Homolog of NCBI NO: 7595978 NR Description: histone H1 variant [Lycopersicon chilense]
  misc_feature (1)..(144): Homolog of NCBI NO: 23506611 NR Description: histone H1D [Nicotiana tabacum]
  misc_feature (1)..(144): Homolog of NCBI NO: 7439658 NR Description: histone H1, stress-inducible - tomato
  misc_feature (1)..(149): Homolog of NCBI NO: 6006363 NR Description: ESTs AU078183(C62904),C73912(E21020) correspond a region of the predicted gene.~Similar to water stress inducible
  misc_feature (1)..(149): Homolog of NCBI NO: 13540391 NR Description: histone H1 [Pisum sativum]
  misc_feature (1)..(149): Homolog of NCBI NO: 2623960 NR Description: histone H1 [Apium graveolens]
  misc_feature (1)..(139): Homolog of NCBI NO: 7489483 NR Description: histone H1 homolog - rice
  misc_feature (1)..(144): Homolog of NCBI NO: 5726575 NR Description: histone H1C [Nicotiana tabacum]
  misc_feature (1)..(144): Homolog of NCBI NO: 729668 NR Description: Histone H1 >gi|2147479|pir||S65059 histone H1,
  misc_feature (1)..(144): Homolog of NCBI NO: 27529850 NR Description: stress-inducible H1 histone-like protein
  misc_feature (1)..(149): Homolog of NCBI NO: 13540391 NR Description: histone H1 [Pisum sativum]
  misc_feature (1)..(149): Homolog of NCBI NO: 2623960 NR Description: histone H1 [Apium graveolens]
  misc_feature (1)..(139): Homolog of NCBI NO: 7489483 NR Description: histone H1 homolog - rice
  misc_feature (1)..(144): Homolog of NCBI NO: 5726575 NR Description: histone H1C [Nicotiana tabacum]
  misc_feature (1)..(144): Homolog of NCBI NO: 729668 NR Description: Histone H1 >gi|2147479|pir||S65059 histone H1,
  misc_feature (1)..(144): Homolog of NCBI NO: 27529850 NR Description: stress-inducible H1 histone-like protein
  misc_feature (1)..(144): Homolog of NCBI NO: 7595978 NR Description: histone H1 variant [Lycopersicon chilense]
  misc_feature (1)..(144): Homolog of NCBI NO: 23506611 NR Description: histone H1D [Nicotiana tabacum]
  misc_feature (1)..(149): Homolog of NCBI NO: 6006363 NR Description: ESTs AU078183(C62904),C73912(E21020) correspond a region of the predicted gene.~Similar to water stress inducible
  misc_feature (1)..(144): Homolog of NCBI NO: 729668 NR Description: Histone H1 >gi|2147479|pir||S65059 histone H1,
  misc_feature (1)..(144): Homolog of NCBI NO: 5726575 NR Description: histone H1C [Nicotiana tabacum]
  misc_feature (1)..(139): Homolog of NCBI NO: 7489483 NR Description: histone H1 homolog - rice
  misc_feature (1)..(149): Homolog of NCBI NO: 2623960 NR Description: histone H1 [Apium graveolens]
  misc_feature (1)..(149): Homolog of NCBI NO: 13540391 NR Description: histone H1 [Pisum sativum]

SEQ ID NO: 11620 - protein, 125 aa, Zea mays subsp. mays; identical to SEQ ID NO: 3810
  peptide (1)..(125): Ceres Seq. ID no. 13494440
  misc_feature (1)..(125): Homolog of NCBI NO: 6006363 NR Description: ESTs AU078183(C62904),C73912(E21020) correspond a region of the predicted gene.~Similar to water stress inducible
  misc_feature (1)..(120): Homolog of NCBI NO: 7439658 NR Description: histone H1, stress-inducible - tomato
  misc_feature (1)..(120): Homolog of NCBI NO: 23506611 NR Description: histone H1D [Nicotiana tabacum]
  misc_feature (1)..(120): Homolog of NCBI NO: 7595978 NR Description: histone H1 variant [Lycopersicon chilense]
  misc_feature (1)..(120): Homolog of NCBI NO: 27529850 NR Description: stress-inducible H1 histone-like protein
  misc_feature (1)..(120): Homolog of NCBI NO: 729668 NR Description: Histone H1 >gi|2147479|pir||S65059 histone H1,
  misc_feature (1)..(120): Homolog of NCBI NO: 5726575 NR Description: histone H1C [Nicotiana tabacum]
  misc_feature (1)..(115): Homolog of NCBI NO: 7489483 NR Description: histone H1 homolog - rice
  misc_feature (1)..(125): Homolog of NCBI NO: 2623960 NR Description: histone H1 [Apium graveolens]
  misc_feature (1)..(125): Homolog of NCBI NO: 13540391 NR Description: histone H1 [Pisum sativum]
  misc_feature (1)..(125): Homolog of NCBI NO: 6006363 NR Description: ESTs AU078183(C62904),C73912(E21020) correspond a region of the predicted gene.~Similar to water stress inducible
  misc_feature (1)..(120): Homolog of NCBI NO: 7439658 NR Description: histone H1, stress-inducible - tomato
  misc_feature (1)..(120): Homolog of NCBI NO: 23506611 NR Description: histone H1D [Nicotiana tabacum]
  misc_feature (1)..(120): Homolog of NCBI NO: 7595978 NR Description: histone H1 variant [Lycopersicon chilense]
  misc_feature (1)..(120): Homolog of NCBI NO: 27529850 NR Description: stress-inducible H1 histone-like protein
  misc_feature (1)..(120): Homolog of NCBI NO: 729668 NR Description: Histone H1 >gi|2147479|pir||S65059 histone H1,
  misc_feature (1)..(120): Homolog of NCBI NO: 5726575 NR Description: histone H1C [Nicotiana tabacum]
  misc_feature (1)..(115): Homolog of NCBI NO: 7489483 NR Description: histone H1 homolog - rice
  misc_feature (1)..(125): Homolog of NCBI NO: 2623960 NR Description: histone H1 [Apium graveolens]
  misc_feature (1)..(125): Homolog of NCBI NO: 13540391 NR Description: histone H1 [Pisum sativum]
  misc_feature (1)..(120): Homolog of NCBI NO: 23506611 NR Description: histone H1D [Nicotiana tabacum]
  misc_feature (1)..(120): Homolog of NCBI NO: 7595978 NR Description: histone H1 variant [Lycopersicon chilense]
  misc_feature (1)..(120): Homolog of NCBI NO: 27529850 NR Description: stress-inducible H1 histone-like protein
  misc_feature (1)..(120): Homolog of NCBI NO: 729668 NR Description: Histone H1 >gi|2147479|pir||S65059 histone H1,
  misc_feature (1)..(120): Homolog of NCBI NO: 5726575 NR Description: histone H1C [Nicotiana tabacum]
  misc_feature (1)..(115): Homolog of NCBI NO: 7489483 NR Description: histone H1 homolog - rice
  misc_feature (1)..(125): Homolog of NCBI NO: 2623960 NR Description: histone H1 [Apium graveolens]
  misc_feature (1)..(125): Homolog of NCBI NO: 13540391 NR Description: histone H1 [Pisum sativum]
  misc_feature (1)..(125): Homolog of NCBI NO: 6006363 NR Description: ESTs AU078183(C62904),C73912(E21020) correspond a region of the predicted gene.~Similar to water stress inducible
  misc_feature (1)..(120): Homolog of NCBI NO: 7439658 NR Description: histone H1, stress-inducible - tomato

SEQ ID NO: 11621 - DNA, 576 bp, Zea mays subsp. mays
  misc_feature (1)..(576): Ceres Seq. ID no. 13498290
  misc_feature: MA Experiment ID: 108535 Result: Up-regulated in Transcription
  misc_feature: MA Experiment 108535 PARAMETER Experiment Name: Zm_Meristem_P Parameter: Age (day) Value: 8
  misc_feature: MA Experiment 108535 PARAMETER Experiment Name: Zm_Meristem_P Parameter: Organism Value: Zea mays
  misc_feature: MA Experiment 108535 PARAMETER Experiment Name: Zm_Meristem_P Parameter: Plant Line Value: 35A19
  misc_feature: MA Experiment 108535 PARAMETER Experiment Name: Zm_Meristem_P Parameter: Tissue Value: Root Meristem vs. Above Root Meristem
  misc_feature: MA Experiment ID: 108544 Result: Down-regulated in Transcription
  misc_feature: MA Experiment ID: 108546 Result: Down-regulated in Transcription
  misc_feature: MA Experiment 108546 PARAMETER Experiment Name: Zm_Imbibed_Seeds_P Parameter: Age (day) Value: 3 vs. 2
  misc_feature: MA Experiment 108546 PARAMETER Experiment Name: Zm_Imbibed_Seeds_P Parameter: Organism Value: Zea mays
  misc_feature: MA Experiment 108546 PARAMETER Experiment Name: Zm_Imbibed_Seeds_P Parameter: Plant Line Value: 35A19
  misc_feature: MA Experiment 108546 PARAMETER Experiment Name: Zm_Imbibed_Seeds_P Parameter: Tissue Value: Roots vs. Embryo
  misc_feature: MA Experiment ID: 108548 Result: Down-regulated in Transcription
  misc_feature: MA Experiment 108548 PARAMETER Experiment Name: Zm_20uM_KNO3_H-to-L_P Parameter: Age (day) Value: 11
  misc_feature: MA Experiment 108548 PARAMETER Experiment Name: Zm_20uM_KNO3_H-to-L_P Parameter: Organism Value: Zea mays
  misc_feature: MA Experiment 108548 PARAMETER Experiment Name: Zm_20uM_KNO3_H-to-L_P Parameter: Plant Line Value: 35A19
  misc_feature: MA Experiment 108548 PARAMETER Experiment Name: Zm_20uM_KNO3_H-to-L_P Parameter: Timepoint (hr) Value: 4
  misc_feature: MA Experiment 108548 PARAMETER Experiment Name: Zm_20uM_KNO3_H-to-L_P Parameter: Tissue Value: Roots
  misc_feature: MA Experiment 108548 PARAMETER Experiment Name: Zm_20uM_KNO3_H-to-L_P Parameter: Treatment Value: 20uM KNO3 vs. 60mM KNO3
ttgtagaactgtgggcgaagcaaggcaggctcattaggatgcacgagcaagcatcagcgatcgtcaggtatgagctaagtcgaatatcagctggtgtgttcattgcacttggtaaaggaaaagtgcagtgtcgtggtgacgtacgaagcctcctctttcatggatggttcagcacaatgttgttggattttggctggcttcagcgctgccccaaaggtctcgacctaagatcgttggaggagaatttagggcgaggccttttaaccctccctctcaggcagcagcaatgtttgttcgaggaatggttccagttctatgcgaccaaaggacccgagtgtccgaaccttattagagctttccaggtatggtggagaaggtctttcattagatcattggtagaacctcaaaactaagtttttccttgatgtactagtatgttgcgtgtatgatttgtaaaattgcaactgttctgatgacccttaaaaatgttttttcgtttgtagtttagttcttcccattgtatgtgaatagctggatgaatttgcttgaggataacatctgcggcgtggagtatgt

SEQ ID NO: 11622 - protein, 136 aa, Zea mays subsp. mays
  peptide (1)..(136): Ceres Seq. ID no. 13498291
  misc_feature (1)..(135): Homolog of NCBI NO: 34900946 NR Description: putative PRLI-interacting factor G [Oryza sativa
  misc_feature (1)..(133): Homolog of NCBI NO: 38347118 NR Description: OSJNBa0009K15.15 [Oryza sativa (japonica
  misc_feature (1)..(131): Homolog of NCBI NO: 18397316 NR Description: f13j11 PRLI-interacting factor G -related thaliana] >gi|20197793|gb|AAD28312.2| expressed protein thaliana] >gi|20198052|gb|AAM15372.1| expressed protein
  misc_feature (1)..(131): Homolog of NCBI NO: 21553858 NR Description: unknown [Arabidopsis thaliana]
  misc_feature (1)..(131): Homolog of NCBI NO: 25338924 NR Description: hypothetical protein At2g13690 [imported] -
  misc_feature (1)..(131): Homolog of NCBI NO: 39104567 NR Description: putative f13j11 PRLI-interacting factor G
  misc_feature (1)..(131): Homolog of NCBI NO: 11139264 NR Description: PRLI-interacting factor G [Arabidopsis thaliana]
  misc_feature (1)..(134): Homolog of NCBI NO: 15238599 NR Description: expressed protein [Arabidopsis thaliana] gb|AAF07368.1~gene_id:MGO3.3~similar to unknown protein thaliana] >gi|26450097|dbj|BAC42168.1| unknown protein
  misc_feature (4)..(135): Homolog of NCBI NO: 32488518 NR Description: OSJNBa0011J08.25 [Oryza sativa (japonica
  misc_feature (1)..(129): Homolog of NCBI NO: 38230508 NR Description: predicted protein [Populus alba x Populus tremula]
VELWAKQGRLIRMHEQASAIVRYELSRISAGVFIALGKGKVQCRGDVRSLLFHGWFSTMLLDFGWLQRCPKGLDLRSLEENLGRGLLTLPLRQQQCLFEEWFQFYATKGPECPNLIRAFQVWWRRSFIRSLVEPQN

SEQ ID NO: 11623 - protein, 124 aa, Zea mays subsp. mays
  peptide (1)..(124): Ceres Seq. ID no. 13498292
  misc_feature (1)..(123): Homolog of NCBI NO: 34900946 NR Description: putative PRLI-interacting factor G [Oryza sativa
  misc_feature (1)..(121): Homolog of NCBI NO: 38347118 NR Description: OSJNBa0009K15.15 [Oryza sativa (japonica
  misc_feature (1)..(119): Homolog of NCBI NO: 18397316 NR Description: f13j11 PRLI-interacting factor G -related thaliana] >gi|20197793|gb|AAD28312.2| expressed protein thaliana] >gi|20198052|gb|AAM15372.1| expressed protein
  misc_feature (1)..(119): Homolog of NCBI NO: 21553858 NR Description: unknown [Arabidopsis thaliana]
  misc_feature (1)..(119): Homolog of NCBI NO: 25338924 NR Description: hypothetical protein At2g13690 [imported] -
  misc_feature (1)..(119): Homolog of NCBI NO: 39104567 NR Description: putative f13j11 PRLI-interacting factor G
  misc_feature (1)..(119): Homolog of NCBI NO: 11139264 NR Description: PRLI-interacting factor G [Arabidopsis thaliana]
  misc_feature (1)..(122): Homolog of NCBI NO: 15238599 NR Description: expressed protein [Arabidopsis thaliana] gb|AAF07368.1~gene_id:MGO3.3~similar to unknown protein thaliana] >gi|26450097|dbj|BAC42168.1| unknown protein
  misc_feature (1)..(123): Homolog of NCBI NO: 32488518 NR Description: OSJNBa0011J08.25 [Oryza sativa (japonica
  misc_feature (1)..(117): Homolog of NCBI NO: 38230508 NR Description: predicted protein [Populus alba x Populus tremula]
MHEQASAIVRYELSRISAGVFIALGKGKVQCRGDVRSLLFHGWFSTMLLDFGWLQRCPKGLDLRSLEENLGRGLLTLPLRQQQCLFEEWFQFYATKGPECPNLIRAFQVWWRRSFIRSLVEPQN

SEQ ID NO: 11624 - protein, 78 aa, Zea mays subsp. mays
  peptide (1)..(78): Ceres Seq. ID no. 13498293
  misc_feature (1)..(77): Homolog of NCBI NO: 34900946 NR Description: putative PRLI-interacting factor G [Oryza sativa
  misc_feature (1)..(75): Homolog of NCBI NO: 38347118 NR Description: OSJNBa0009K15.15 [Oryza sativa (japonica
  misc_feature (1)..(73): Homolog of NCBI NO: 18397316 NR Description: f13j11 PRLI-interacting factor G -related thaliana] >gi|20197793|gb|AAD28312.2| expressed protein thaliana] >gi|20198052|gb|AAM15372.1| expressed protein
  misc_feature (1)..(73): Homolog of NCBI NO: 25338924 NR Description: hypothetical protein At2g13690 [imported] -
  misc_feature (1)..(73): Homolog of NCBI NO: 21553858 NR Description: unknown [Arabidopsis thaliana]
  misc_feature (1)..(73): Homolog of NCBI NO: 39104567 NR Description: putative f13j11 PRLI-interacting factor G
  misc_feature (1)..(73): Homolog of NCBI NO: 11139264 NR Description: PRLI-interacting factor G [Arabidopsis thaliana]
  misc_feature (1)..(76): Homolog of NCBI NO: 15238599 NR Description: expressed protein [Arabidopsis thaliana] gb|AAF07368.1~gene_id:MGO3.3~similar to unknown protein thaliana] >gi|26450097|dbj|BAC42168.1| unknown protein
  misc_feature (1)..(77): Homolog of NCBI NO: 32488518 NR Description: OSJNBa0011J08.25 [Oryza sativa (japonica
  misc_feature (1)..(71): Homolog of NCBI NO: 38230508 NR Description: predicted protein [Populus alba x Populus tremula]
MLLDFGWLQRCPKGLDLRSLEENLGRGLLTLPLRQQQCLFEEWFQFYATKGPECPNLIRAFQVWWRRSFIRSLVEPQN

SEQ ID NO: 11625 - DNA, 1001 bp, Zea mays subsp. mays
  misc_feature (1)..(1001): Ceres Seq. ID no. 13492971
  misc_feature: MA Experiment ID: 108528 Result: Up-regulated in Transcription
  misc_feature: MA Experiment 108528 PARAMETER Experiment Name: Zm_Imbibed_Seeds_P Parameter: Age (day) Value: 5 vs. 2
  misc_feature: MA Experiment 108528 PARAMETER Experiment Name: Zm_Imbibed_Seeds_P Parameter: Organism Value: Zea mays
  misc_feature: MA Experiment 108528 PARAMETER Experiment Name: Zm_Imbibed_Seeds_P Parameter: Plant Line Value: 35A19
  misc_feature: MA Experiment 108528 PARAMETER Experiment Name: Zm_Imbibed_Seeds_P Parameter: Tissue Value: Aerial vs. Embryo
  misc_feature: MA Experiment ID: 108530 Result: Up-regulated in Transcription
  misc_feature: MA Experiment 108530 PARAMETER Experiment Name: Zm_Imbibed_Seeds_P Parameter: Age (day) Value: 6 vs. 2
  misc_feature: MA Experiment 108530 PARAMETER Experiment Name: Zm_Imbibed_Seeds_P Parameter: Organism Value: Zea mays
  misc_feature: MA Experiment 108530 PARAMETER Experiment Name: Zm_Imbibed_Seeds_P Parameter: Plant Line Value: 35A19
  misc_feature: MA Experiment 108530 PARAMETER Experiment Name: Zm_Imbibed_Seeds_P Parameter: Tissue Value: Aerial vs. Embryo
  misc_feature: MA Experiment ID: 108534 Result: Up-regulated in Transcription
  misc_feature: MA Experiment 108534 PARAMETER Experiment Name: Zm_4deg_Cold_P Parameter: Age (hr) Value: 8
  misc_feature: MA Experiment 108534 PARAMETER Experiment Name: Zm_4deg_Cold_P Parameter: Organism Value: Zea mays
  misc_feature: MA Experiment 108534 PARAMETER Experiment Name: Zm_4deg_Cold_P Parameter: Plant Line Value: 35A19
  misc_feature: MA Experiment 108534 PARAMETER Experiment Name: Zm_4deg_Cold_P Parameter: Temperature (deg C) Value: 4 vs. 22
  misc_feature: MA Experiment 108534 PARAMETER Experiment Name: Zm_4deg_Cold_P Parameter: Timepoint (hr) Value: 6
  misc_feature: MA Experiment 108534 PARAMETER Experiment Name: Zm_4deg_Cold_P Parameter: Tissue Value: Aerial
  misc_feature: MA Experiment ID: 108536 Result: Down-regulated in Transcription
  misc_feature: MA Experiment 108536 PARAMETER Experiment Name: Zm_Meristem_P Parameter: Age (day) Value: 8
  misc_feature: MA Experiment 108536 PARAMETER Experiment Name: Zm_Meristem_P Parameter: Organism Value: Zea mays
  misc_feature: MA Experiment 108536 PARAMETER Experiment Name: Zm_Meristem_P Parameter: Plant Line Value: 35A19
  misc_feature: MA Experiment 108536 PARAMETER Experiment Name: Zm_Meristem_P Parameter: Tissue Value: Shoot Meristem vs. Above Shoot Meristem
  misc_feature: MA Experiment ID: 108545 Result: Up-regulated in Transcription
  misc_feature: MA Experiment 108545 PARAMETER Experiment Name: Zm_Imbibed_Seeds_P Parameter: Age (day) Value: 3 vs. 2
  misc_feature: MA Experiment 108545 PARAMETER Experiment Name: Zm_Imbibed_Seeds_P Parameter: Organism Value: Zea mays
  misc_feature: MA Experiment 108545 PARAMETER Experiment Name: Zm_Imbibed_Seeds_P Parameter: Plant Line Value: 35A19
  misc_feature: MA Experiment 108545 PARAMETER Experiment Name: Zm_Imbibed_Seeds_P Parameter: Tissue Value: Aerial vs. Embryo
  misc_feature: MA Experiment ID: 108547 Result: Up-regulated in Transcription
  misc_feature: MA Experiment 108547 PARAMETER Experiment Name: Zm_Imbibed_Seeds_P Parameter: Age (day) Value: 4 vs. 2
  misc_feature: MA Experiment 108547 PARAMETER Experiment Name: Zm_Imbibed_Seeds_P Parameter: Organism Value: Zea mays
  misc_feature: MA Experiment 108547 PARAMETER Experiment Name: Zm_Imbibed_Seeds_P Parameter: Plant Line Value: 35A19
  misc_feature: MA Experiment 108547 PARAMETER Experiment Name: Zm_Imbibed_Seeds_P Parameter: Tissue Value: Aerial vs. Embryo
  misc_feature: MA Experiment ID: 108559 Result: Down-regulated in Transcription
  misc_feature: MA Experiment 108559 PARAMETER Experiment Name: Zm_5mM_NO_P Parameter: Age (day) Value: 8
  misc_feature: MA Experiment 108559 PARAMETER Experiment Name: Zm_5mM_NO_P Parameter: Organism Value: Zea mays
  misc_feature: MA Experiment 108559 PARAMETER Experiment Name: Zm_5mM_NO_P Parameter: Plant Line Value: 35A19
  misc_feature: MA Experiment 108559 PARAMETER Experiment Name: Zm_5mM_NO_P Parameter: Timepoint (hr) Value: 12
  misc_feature: MA Experiment 108559 PARAMETER Experiment Name: Zm_5mM_NO_P Parameter: Tissue Value: Aerial
  misc_feature: MA Experiment 108559 PARAMETER Experiment Name: Zm_5mM_NO_P Parameter: Treatment Value: 5mM NO vs. No Treatment
  misc_feature: MA Experiment ID: 108687 Result: Down-regulated in Transcription
  misc_feature: MA Experiment 108687 PARAMETER Experiment Name: Zm_Embryos-Flowers__P Parameter: Tissue Value: Embryo vs. Aerial+
  misc_feature: MA Experiment ID: 108688 Result: Down-regulated in Transcription
  misc_feature: MA Experiment 108688 PARAMETER Experiment Name: Zm_Embryos-Flowers__P Parameter: Tissue Value: Immature Flowers vs. Aerial+
  misc_feature: MA Experiment ID: 20000488 Result: Up-regulated in Transcription
  misc_feature: MA Experiment 20000488 PARAMETER Experiment Name: Zm_50mM_NH4NO3_L_to_H_P Parameter: Organism Value: Zea mays
  misc_feature: MA Experiment 20000488 PARAMETER Experiment Name: Zm_50mM_NH4NO3_L_to_H_P Parameter: Timepoint (hr) Value: 8
  misc_feature: MA Experiment 20000488 PARAMETER Experiment Name: Zm_50mM_NH4NO3_L_to_H_P Parameter: Tissue Value: Leaves
  misc_feature: MA Experiment 20000488 PARAMETER Experiment Name: Zm_50mM_NH4NO3_L_to_H_P Parameter: Treatment Value: 50mM NH4NO3 vs. 100mM Mannitol
  misc_feature: MA Experiment ID: 20000492 Result: Down-regulated in Transcription
  misc_feature: MA Experiment 20000492 PARAMETER Experiment Name: Zm_Hybrid_Seed_Dev_P Parameter: DAP Value: 12
  misc_feature: MA Experiment 20000492 PARAMETER Experiment Name: Zm_Hybrid_Seed_Dev_P Parameter: Organism Value: Zea mays
  misc_feature: MA Experiment 20000492 PARAMETER Experiment Name: Zm_Hybrid_Seed_Dev_P Parameter: Plant Line Value: 35A19
  misc_feature: MA Experiment 20000492 PARAMETER Experiment Name: Zm_Hybrid_Seed_Dev_P Parameter: Tissue Value: Fert Kernel vs. Unfert Floret
ctcaggctctcagctcagctgcgtcctcctgccacccatggcaaacgcttctctgcaatccttccttctcccgcacgaccattctttcgccggcgccggcggcagccgtgacggctccgcgtccgccgtgcacaagctctccaccaacaccagcggcagcatttccttcaggctctacaccaaaacctccccctcggtgacagcagcctcagccaccaattcgtcagctccgactccagttgccccggcatctgcaccagcggcaggggacgaagaagaagaagaaggcccctctctcgacctcctccgccgccagctcgccgcgggcgactaccggcaggcggacgagaccacgcgggcgctgatcatcgacctcgccggcgagcccgcgaggcgccgagggtacgtcttcttctccgaggtccagttcatcccggccgaggacctcgccgccatcgacgggctctggaaggagcacagcggcggcaggttcgggtacagcgtgcagcggcggctctgggagaagtcgcggcgcgacttcacccgcttcttcatccgggtcggctggatgaggaagctggacacggaggtggagcagtacaactacagggccttccccgacgagttcatgtgggaattgacggacgacacgcccgagggacacctgccgctcaccaacgccctcaggggcacgcagctcctggcgaacatcctcacccacccggccttccaggaggaggaccagggagacggagctgctgctgcagaagagagtgcaaacaccaaagatgataacaaagggagggagagacccaggtccatgagagatttcaagcctgattattctttttgattcaggctggcgaaggaaaccaaaaaaaaaaggggcatgggagtttgtggtgcagagatgctggcatggtgtaattgatttaaaagatcatgtatccgtagttctgtttgggttacttttgtcttaaaacatgcatggaagcttgtgt

SEQ ID NO: 11626 - protein, 283 aa, Zea mays subsp. mays
  peptide (1)..(283): Ceres Seq. ID no. 13492972
  misc_feature (53)..(283): Homolog of NCBI NO: 17380924 NR Description: unknown protein [Arabidopsis thaliana]
  misc_feature (53)..(283): Homolog of NCBI NO: 15231674 NR Description: expressed protein [Arabidopsis thaliana]
  misc_feature (53)..(283): Homolog of NCBI NO: 32816239 NR Description: GUN4 mutant [Arabidopsis thaliana]
  misc_feature (99)..(240): Homolog of NCBI NO: 30468073 NR Description: ORF155 [Cyanidioschyzon merolae]
  misc_feature (102)..(245): Homolog of NCBI NO: 23042866 NR Description: hypothetical protein [Trichodesmium erythraeum
  misc_feature (94)..(243): Homolog of NCBI NO: 22299137 NR Description: ORF_ID:tlr1594~hypothetical protein
  misc_feature (94)..(245): Homolog of NCBI NO: 16329174 NR Description: hypothetical protein [Synechocystis sp. PCC 6803]
  misc_feature (96)..(245): Homolog of NCBI NO: 17229318 NR Description: hypothetical protein [Nostoc sp. PCC 7120]
  misc_feature (114)..(243): Homolog of NCBI NO: 11465668 NR Description: ORF238 [Porphyra purpurea] HYPOTHETICAL 28.1 KD PROTEIN YCF53 (ORF238)
  misc_feature (102)..(241): Homolog of NCBI NO: 33865601 NR Description: conserved hypothetical protein [Synechococcus sp.
SGSQLSCVLLPPMANASLQSFLLPHDHSFAGAGGSRDGSASAVHKLSTNTSGSISFRLYTKTSPSVTAASATNSSAPTPVAPASAPAAGDEEEEEGPSLDLLRRQLAAGDYRQADETTRALIIDLAGEPARRRGYVFFSEVQFIPAEDLAAIDGLWKEHSGGRFGYSVQRRLWEKSRRDFTRFFIRVGWMRKLDTEVEQYNYRAFPDEFMWELTDDTPEGHLPLTNALRGTQLLANILTHPAFQEEDQGDGAAAAEESANTKDDNKGRERPRSMRDFKPDYSF

SEQ ID NO: 11627 - protein, 271 aa, Zea mays subsp. mays
  peptide (1)..(271): Ceres Seq. ID no. 13492973
  misc_feature (41)..(271): Homolog of NCBI NO: 17380924 NR Description: unknown protein [Arabidopsis thaliana]
  misc_feature (41)..(271): Homolog of NCBI NO: 15231674 NR Description: expressed protein [Arabidopsis thaliana]
  misc_feature (41)..(271): Homolog of NCBI NO: 32816239 NR Description: GUN4 mutant [Arabidopsis thaliana]
  misc_feature (87)..(228): Homolog of NCBI NO: 30468073 NR Description: ORF155 [Cyanidioschyzon merolae]
  misc_feature (90)..(233): Homolog of NCBI NO: 23042866 NR Description: hypothetical protein [Trichodesmium erythraeum
  misc_feature (82)..(231): Homolog of NCBI NO: 22299137 NR Description: ORF_ID:tlr1594~hypothetical protein
  misc_feature (82)..(233): Homolog of NCBI NO: 16329174 NR Description: hypothetical protein [Synechocystis sp. PCC 6803]
  misc_feature (84)..(233): Homolog of NCBI NO: 17229318 NR Description: hypothetical protein [Nostoc sp. PCC 7120]
  misc_feature (102)..(231): Homolog of NCBI NO: 11465668 NR Description: ORF238 [Porphyra purpurea] HYPOTHETICAL 28.1 KD PROTEIN YCF53 (ORF238)
  misc_feature (90)..(229): Homolog of NCBI NO: 33865601 NR Description: conserved hypothetical protein [Synechococcus sp.
MANASLQSFLLPHDHSFAGAGGSRDGSASAVHKLSTNTSGSISFRLYTKTSPSVTAASATNSSAPTPVAPASAPAAGDEEEEEGPSLDLLRRQLAAGDYRQADETTRALIIDLAGEPARRRGYVFFSEVQFIPAEDLAAIDGLWKEHSGGRFGYSVQRRLWEKSRRDFTRFFIRVGWMRKLDTEVEQYNYRAFPDEFMWELTDDTPEGHLPLTNALRGTQLLANILTHPAFQEEDQGDGAAAAEESANTKDDNKGRERPRSMRDFKPDYSF

SEQ ID NO: 11628 - DNA, 904 bp, Zea mays subsp. mays
  misc_feature (1)..(904): Ceres Seq. ID no. 12403630
  misc_feature: MA Experiment ID: 108689 Result: Down-regulated in Transcription
  misc_feature: MA Experiment 108689 PARAMETER Experiment Name: Zm_Drought_Roots_P Parameter: Age (day) Value: 9
  misc_feature: MA Experiment 108689 PARAMETER Experiment Name: Zm_Drought_Roots_P Parameter: Organism Value: Zea mays
  misc_feature: MA Experiment 108689 PARAMETER Experiment Name: Zm_Drought_Roots_P Parameter: Plant Line Value: 35A19
  misc_feature: MA Experiment 108689 PARAMETER Experiment Name: Zm_Drought_Roots_P Parameter: Timepoint (hr) Value: 24
  misc_feature: MA Experiment 108689 PARAMETER Experiment Name: Zm_Drought_Roots_P Parameter: Tissue Value: Roots
  misc_feature: MA Experiment 108689 PARAMETER Experiment Name: Zm_Drought_Roots_P Parameter: Treatment Value: Drought vs. No Drought
aattctggttctagggagcccgcaggaaggcacctctgcggcgaccagcgtgaagaaaggggatcggaacgcctccatctcaaaccccacgaaggcacgaaccctctcttcctaggttcatcgttcctcctccgcgtccttccttccctccgcagcgcggcgcggcgcggcgcgatgatacagctgctcttcacgctgctagcggcggagggcgccgtggcggcggtgctactcttcaagacgccgctgcggaggctggccgtgctcgcgctcgaccacctcaagcggggccgcgggcccgtcatggtgcgcaccatcgcggccaccgtgcttgtcgtgctcgcatccagtctccacagcatggccaagatccgcggccacgccgagggggagctcgacggctccggggtcgtggggctcacccccaccgaccaggtccttcttgcgcgacacctcctcgaggcgtcactcatgggatactccttattccttgctttagtcattgaccggctgcacaactatgtcaaagaaaatcgaaggctcaggaagaaattggaagaggtgttgaaacagaataaggcactagaagaagcaacaaatggaaagctagaagagaacaggcctgaccagaaagacctttcccatgccaaggataattaacaatgacatgcgctcaagaaactccctgccatcactgcctatgcctgaataggatgccggtcactgatgttctccctgttgagaattagcattggtaaatgaatgctcggttacaacgtgctaaatcctttgcatctggccaaatttgtaaataagcactgggtgatgcccatcagtaaacacatgatgctactgctgttaaactaaatgtggcaaatttcataatgctaggtattgttctcgg

SEQ ID NO: 11629 - protein, 219 aa, Zea mays subsp. mays
  peptide (1)..(219): Ceres Seq. ID no. 12403631
  misc_feature (62)..(205): Pfam Name: B-cell receptor-associated protein 31-like Pfam Description: B-cell receptor-associated protein 31-like
  misc_feature (59)..(205): Homolog of NCBI NO: 9759015 NR Description: gene_id:K16E1.4~unknown protein [Arabidopsis
  misc_feature (59)..(205): Homolog of NCBI NO: 18422225 NR Description: expressed protein; protein id: At5g42570.1, by cDNA: 1558., supported by cDNA: gi_15450825 [Arabidopsis >gi|15450826|gb|AAK96684.1| Unknown protein [Arabidopsis
  misc_feature (59)..(205): Homolog of NCBI NO: 21553655 NR Description: unknown [Arabidopsis thaliana]
  misc_feature (59)..(205): Homolog of NCBI NO: 22655198 NR Description: unknown protein [Arabidopsis thaliana]
  misc_feature (59)..(205): Homolog of NCBI NO: 30682503 NR Description: expressed protein [Arabidopsis thaliana]
  misc_feature (59)..(214): Homolog of NCBI NO: 15239667 NR Description: putative protein; protein id: At5g48660.1 thaliana] >gi|10177356|dbj|BAB10699.1| contains similarity to
  misc_feature (59)..(219): Homolog of NCBI NO: 34897474 NR Description: unknown protein [Oryza sativa (japonica
  misc_feature (59)..(219): Homolog of NCBI NO: 15231412 NR Description: unknown protein; protein id: At3g07190.1 thaliana] >gi|6642646|gb|AAF20227.1|AC012395_14 unknown protein
  misc_feature (59)..(193): Homolog of NCBI NO: 18402620 NR Description: expressed protein; protein id: At3g20450.1, by cDNA: 97350. [Arabidopsis thaliana]
NSGSREPAGRHLCGDQREERGSERLHLKPHEGTNPLFLGSSFLLRVLPSLRSAARRGAMIQLLFTLLAAEGAVAAVLLFKTPLRRLAVLALDHLKRGRGPVMVRTIAATVLVVLASSLHSMAKIRGHAEGELDGSGVVGLTPTDQVLLARHLLEASLMGYSLFLALVIDRLHNYVKENRRLRKKLEEVLKQNKALEEATNGKLEENRPDQKDLSHAKDN

SEQ ID NO: 11630 - protein, 161 aa, Zea mays subsp. mays
  peptide (1)..(161): Ceres Seq. ID no. 12403632
  misc_feature (4)..(147): Pfam Name: B-cell receptor-associated protein 31-like Pfam Description: B-cell receptor-associated protein 31-like
  misc_feature (1)..(147): Homolog of NCBI NO: 9759015 NR Description: gene_id:K16E1.4~unknown protein [Arabidopsis
  misc_feature (1)..(147): Homolog of NCBI NO: 18422225 NR Description: expressed protein; protein id: At5g42570.1, by cDNA: 1558., supported by cDNA: gi_15450825 [Arabidopsis >gi|15450826|gb|AAK96684.1| Unknown protein [Arabidopsis
  misc_feature (1)..(147): Homolog of NCBI NO: 21553655 NR Description: unknown [Arabidopsis thaliana]
  misc_feature (1)..(147): Homolog of NCBI NO: 22655198 NR Description: unknown protein [Arabidopsis thaliana]
  misc_feature (1)..(147): Homolog of NCBI NO: 30682503 NR Description: expressed protein [Arabidopsis thaliana]
  misc_feature (1)..(156): Homolog of NCBI NO: 15239667 NR Description: putative protein; protein id: At5g48660.1 thaliana] >gi|10177356|dbj|BAB10699.1| contains similarity to
  misc_feature (1)..(161): Homolog of NCBI NO: 34897474 NR Description: unknown protein [Oryza sativa (japonica
  misc_feature (1)..(161): Homolog of NCBI NO: 15231412 NR Description: unknown protein; protein id: At3g07190.1 thaliana] >gi|6642646|gb|AAF20227.1|AC012395_14 unknown protein
  misc_feature (1)..(135): Homolog of NCBI NO: 18402620 NR Description: expressed protein; protein id: At3g20450.1, by cDNA: 97350. [Arabidopsis thaliana]
MIQLLFTLLAAEGAVAAVLLFKTPLRRLAVLALDHLKRGRGPVMVRTIAATVLVVLASSLHSMAKIRGHAEGELDGSGVVGLTPTDQVLLARHLLEASLMGYSLFLALVIDRLHNYVKENRRLRKKLEEVLKQNKALEEATNGKLEENRPDQKDLSHAKDN

SEQ ID NO: 11631 - protein, 118 aa, Zea mays subsp. mays
  peptide (1)..(118): Ceres Seq. ID no. 12403633
  misc_feature (1)..(104): Pfam Name: B-cell receptor-associated protein 31-like Pfam Description: B-cell receptor-associated protein 31-like
  misc_feature (1)..(104): Homolog of NCBI NO: 9759015 NR Description: gene_id:K16E1.4~unknown protein [Arabidopsis
  misc_feature (1)..(104): Homolog of NCBI NO: 18422225 NR Description: expressed protein; protein id: At5g42570.1, by cDNA: 1558., supported by cDNA: gi_15450825 [Arabidopsis >gi|15450826|gb|AAK96684.1| Unknown protein [Arabidopsis
  misc_feature (1)..(104): Homolog of NCBI NO: 21553655 NR Description: unknown [Arabidopsis thaliana]
  misc_feature (1)..(104): Homolog of NCBI NO: 22655198 NR Description: unknown protein [Arabidopsis thaliana]
  misc_feature (1)..(104): Homolog of NCBI NO: 30682503 NR Description: expressed protein [Arabidopsis thaliana]
  misc_feature (1)..(113): Homolog of NCBI NO: 15239667 NR Description: putative protein; protein id: At5g48660.1 thaliana] >gi|10177356|dbj|BAB10699.1| contains similarity to
  misc_feature (1)..(118): Homolog of NCBI NO: 34897474 NR Description: unknown protein [Oryza sativa (japonica
  misc_feature (1)..(118): Homolog of NCBI NO: 15231412 NR Description: unknown protein; protein id: At3g07190.1 thaliana] >gi|6642646|gb|AAF20227.1|AC012395_14 unknown protein
  misc_feature (1)..(92): Homolog of NCBI NO: 18402620 NR Description: expressed protein; protein id: At3g20450.1, by cDNA: 97350. [Arabidopsis thaliana]
MVRTIAATVLVVLASSLHSMAKIRGHAEGELDGSGVVGLTPTDQVLLARHLLEASLMGYSLFLALVIDRLHNYVKENRRLRKKLEEVLKQNKALEEATNGKLEENRPDQKDLSHAKDN

SEQ ID NO: 11632 - DNA, 1426 bp, Zea mays subsp. mays
  misc_feature (1)..(1426): Ceres Seq. ID no. 12341231
  misc_feature: MA Experiment ID: 108544 Result: Down-regulated in Transcription
  misc_feature: MA Experiment ID: 108556 Result: Down-regulated in Transcription
  misc_feature: MA Experiment 108556 PARAMETER Experiment Name: Zm_Drought_P Parameter: Age (day) Value: 9
  misc_feature: MA Experiment 108556 PARAMETER Experiment Name: Zm_Drought_P Parameter: Organism Value: Zea mays
  misc_feature: MA Experiment 108556 PARAMETER Experiment Name: Zm_Drought_P Parameter: Plant Line Value: 35A19
  misc_feature: MA Experiment 108556 PARAMETER Experiment Name: Zm_Drought_P Parameter: Timepoint (hr) Value: 24
  misc_feature: MA Experiment 108556 PARAMETER Experiment Name: Zm_Drought_P Parameter: Tissue Value: Aerial
  misc_feature: MA Experiment 108556 PARAMETER Experiment Name: Zm_Drought_P Parameter: Treatment Value: Drought vs. No Drought
  misc_feature: MA Experiment ID: 20000478 Result: Down-regulated in Transcription
  misc_feature: MA Experiment 20000478 PARAMETER Experiment Name: Zm_5mM_SA_P Parameter: Age (day) Value: 11
  misc_feature: MA Experiment 20000478 PARAMETER Experiment Name: Zm_5mM_SA_P Parameter: Organism Value: Zea mays
  misc_feature: MA Experiment 20000478 PARAMETER Experiment Name: Zm_5mM_SA_P Parameter: Plant Line Value: 35A19
  misc_feature: MA Experiment 20000478 PARAMETER Experiment Name: Zm_5mM_SA_P Parameter: Timepoint (hr) Value: 72
  misc_feature: MA Experiment 20000478 PARAMETER Experiment Name: Zm_5mM_SA_P Parameter: Tissue Value: Aerial
  misc_feature: MA Experiment 20000478 PARAMETER Experiment Name: Zm_5mM_SA_P Parameter: Treatment Value: 5mM SA vs. No Treatment
  misc_feature: MA Experiment ID: 20000479 Result: Down-regulated in Transcription
  misc_feature: MA Experiment 20000479 PARAMETER Experiment Name: Zm_Drought_P Parameter: Age (day) Value: 10
  misc_feature: MA Experiment 20000479 PARAMETER Experiment Name: Zm_Drought_P Parameter: Organism Value: Zea mays
  misc_feature: MA Experiment 20000479 PARAMETER Experiment Name: Zm_Drought_P Parameter: Plant Line Value: 35A19
  misc_feature: MA Experiment 20000479 PARAMETER Experiment Name: Zm_Drought_P Parameter: Timepoint (hr) Value: 48
  misc_feature: MA Experiment 20000479 PARAMETER Experiment Name: Zm_Drought_P Parameter: Tissue Value: Aerial
  misc_feature: MA Experiment 20000479 PARAMETER Experiment Name: Zm_Drought_P Parameter: Treatment Value: Drought vs. No Drought
  misc_feature: MA Experiment ID: 20000480 Result: Down-regulated in Transcription
  misc_feature: MA Experiment 20000480 PARAMETER Experiment Name: Zm_Drought_P Parameter: Age (day) Value: 11
  misc_feature: MA Experiment 20000480 PARAMETER Experiment Name: Zm_Drought_P Parameter: Organism Value: Zea mays
  misc_feature: MA Experiment 20000480 PARAMETER Experiment Name: Zm_Drought_P Parameter: Plant Line Value: 35A19
  misc_feature: MA Experiment 20000480 PARAMETER Experiment Name: Zm_Drought_P Parameter: Timepoint (hr) Value: 72
  misc_feature: MA Experiment 20000480 PARAMETER Experiment Name: Zm_Drought_P Parameter: Tissue Value: Aerial
  misc_feature: MA Experiment 20000480 PARAMETER Experiment Name: Zm_Drought_P Parameter: Treatment Value: Drought vs. No Drought
  misc_feature: MA Experiment ID: 20000626 Result: Down-regulated in Transcription
  misc_feature: MA Experiment 20000626 PARAMETER Experiment Name: Zm_Herbicide-Treatments_P Parameter: Timepoint (hr) Value: 12
  misc_feature: MA Experiment 20000626 PARAMETER Experiment Name: Zm_Herbicide-Treatments_P Parameter: Tissue Value: Aerial
  misc_feature: MA Experiment 20000626 PARAMETER Experiment Name: Zm_Herbicide-Treatments_P Parameter: Treatment Value: Roundup vs. No Treatment
gaacttgaactggagaggcagtagccagagtgtgagctgacggcggacgtgctcgcctctcctctcctcacatttccggctcccctctccgcattccatggcaccgcattaccggtatttttagccgccggaggagacgggttgcgtagagagagggaaaaccagagctcctgactgttcctctctccctcctcacgggcgggctccgtctgttccgtccatccaccgccccggtcgtctcccggccagatccctctcctgcaaggtttctttgcgagtggccggagaagatgatgggcgggttcctctccagggtcctcctgctggcttttggctatgcctatcctgcctatgaatgctacaagaccgttgaactgaacaaaccacagattgagcagctcatattttggtgtcagtattggattttagttgccctgttgacagttttggagagatttggagattttacaatatcatggctaccgttttactcagaagcaaaggtgttgttctttgtatatttgtggtaccctaagacaaagggaactacgtatgtttatggaactttctttaagccatatatttctcagcatgagaatgaaatcgaccgaaatcttcttgagctcagagctcgagccaccgatatggttgtcctttacttccataaggctgcttcggtagggcaaaatactttctttgacgttttaaaatatgttgctgcccagtccccttctcggaaatcaagactgcaccctcatcaggaaccacagcagcagcaaccacaagtgcaggtggagctgcagcagccgcaaccacaaaaacaagcagcacctgttatgcgcagaggagcatctattgctgctcggcaagcagcaatggcacagcaatctctggagactatacccgttccatcttcacccaagatcaagcgtcaaacatcagggagacctggttcggtggcatccacaaagcctgcagcagctgcatccacaccaaaacctggcggtagcccaaagaaaggtgaggtcaaacctgctgtcgacccagttcaaactccagccacaagtgcagattcaccaaaatccgagcctagcgccccaccactttctgagaccgaaggagtagacaacatggcaatcgatgaggtcagtggtgatgctgcagagggcgcggaagagcttgaccctgcgctcgaggagacgccgatggaggagacaatccgtgtgacgcgcgccaagctaaggaggcgcaccgccaccgaggattctgctgggaattagctgcatgccgttgttttccctgcacattgtattgatctttttccgagttttaggctcacatgttgtttgctggaatggagatatgttgttgttcacttggttcttgtgacacagagttaattatcttatttccgtgctttcttagt

SEQ ID NO: 11633 - protein, 329 aa, Zea mays subsp. mays
  peptide (1)..(329): Ceres Seq. ID no. 12341232
  misc_feature (2)..(98): Pfam Name: TB2/DP1, HVA22 family Pfam Description: TB2/DP1, HVA22 family
  misc_feature (136)..(327): Homolog of NCBI NO: 37531658 NR Description: putative Magnaporthe grisea pathogenicity protein
  misc_feature (1)..(166): Homolog of NCBI NO: 37531658 NR Description: putative Magnaporthe grisea pathogenicity protein
  misc_feature (1)..(152): Homolog of NCBI NO: 21671921 NR Description: Putative protein with HVA22 domain [Oryza sativa
  misc_feature (1)..(322): Homolog of NCBI NO: 18394805 NR Description: expressed protein; protein id: At1g19950.1, by cDNA: 147130., supported by cDNA: gi_15010625 [Arabidopsis >gi|15010626|gb|AAK73972.1| At1g19950/T20H2_25 [Arabidopsis
  misc_feature (1)..(322): Homolog of NCBI NO: 21553483 NR Description: pathogenicity protein PATH531-like protein
  misc_feature (1)..(275): Homolog of NCBI NO: 18422223 NR Description: expressed protein; protein id: At5g42560.1,
  misc_feature (1)..(275): Homolog of NCBI NO: 21553813 NR Description: unknown [Arabidopsis thaliana]
  misc_feature (12)..(322): Homolog of NCBI NO: 25513732 NR Description: T20H2.26 protein - Arabidopsis thaliana Contains similarity to Magnaporthe grisea pathogenicity protein
  misc_feature (5)..(275): Homolog of NCBI NO: 9759014 NR Description: gene_id:K16E1.3~unknown protein [Arabidopsis
  misc_feature (12)..(169): Homolog of NCBI NO: 15222332 NR Description: hypothetical protein; protein id: At1g75700.1
MMGGFLSRVLLLAFGYAYPAYECYKTVELNKPQIEQLIFWCQYWILVALLTVLERFGDFTISWLPFYSEAKVLFFVYLWYPKTKGTTYVYGTFFKPYISQHENEIDRNLLELRARATDMVVLYFHKAASVGQNTFFDVLKYVAAQSPSRKSRLHPHQEPQQQQPQVQVELQQPQPQKQAAPVMRRGASIAARQAAMAQQSLETIPVPSSPKIKRQTSGRPGSVASTKPAAAASTPKPGGSPKKGEVKPAVDPVQTPATSADSPKSEPSAPPLSETEGVDNMAIDEVSGDAAEGAEELDPALEETPMEETIRVTRAKLRRRTATEDSAGN

SEQ ID NO: 11634 - protein, 328 aa, Zea mays subsp. mays
  peptide (1)..(328): Ceres Seq. ID no. 12341233
  misc_feature (1)..(97): Pfam Name: TB2/DP1, HVA22 family Pfam Description: TB2/DP1, HVA22 family
  misc_feature (135)..(326): Homolog of NCBI NO: 37531658 NR Description: putative Magnaporthe grisea pathogenicity protein
  misc_feature (1)..(165): Homolog of NCBI NO: 37531658 NR Description: putative Magnaporthe grisea pathogenicity protein
  misc_feature (1)..(151): Homolog of NCBI NO: 21671921 NR Description: Putative protein with HVA22 domain [Oryza sativa
  misc_feature (1)..(321): Homolog of NCBI NO: 18394805 NR Description: expressed protein; protein id: At1g19950.1, by cDNA: 147130., supported by cDNA: gi_15010625 [Arabidopsis >gi|15010626|gb|AAK73972.1| At1g19950/T20H2_25 [Arabidopsis
  misc_feature (1)..(321): Homolog of NCBI NO: 21553483 NR Description: pathogenicity protein PATH531-like protein
  misc_feature (1)..(274): Homolog of NCBI NO: 18422223 NR Description: expressed protein; protein id: At5g42560.1,
  misc_feature (1)..(274): Homolog of NCBI NO: 21553813 NR Description: unknown [Arabidopsis thaliana]
  misc_feature (11)..(321): Homolog of NCBI NO: 25513732 NR Description: T20H2.26 protein - Arabidopsis thaliana Contains similarity to Magnaporthe grisea pathogenicity protein
  misc_feature (4)..(274): Homolog of NCBI NO: 9759014 NR Description: gene_id:K16E1.3~unknown protein [Arabidopsis
  misc_feature (11)..(168): Homolog of NCBI NO: 15222332 NR Description: hypothetical protein; protein id: At1g75700.1
MGGFLSRVLLLAFGYAYPAYECYKTVELNKPQIEQLIFWCQYWILVALLTVLERFGDFTISWLPFYSEAKVLFFVYLWYPKTKGTTYVYGTFFKPYISQHENEIDRNLLELRARATDMVVLYFHKAASVGQNTFFDVLKYVAAQSPSRKSRLHPHQEPQQQQPQVQVELQQPQPQKQAAPVMRRGASIAARQAAMAQQSLETIPVPSSPKIKRQTSGRPGSVASTKPAAAASTPKPGGSPKKGEVKPAVDPVQTPATSADSPKSEPSAPPLSETEGVDNMAIDEVSGDAAEGAEELDPALEETPMEETIRVTRAKLRRRTATEDSAGN

SEQ ID NO: 11635 - protein, 211 aa, Zea mays subsp. mays
  peptide (1)..(211): Ceres Seq. ID no. 12341234
  misc_feature (18)..(209): Homolog of NCBI NO: 37531658 NR Description: putative Magnaporthe grisea pathogenicity protein
  misc_feature (1)..(48): Homolog of NCBI NO: 37531658 NR Description: putative Magnaporthe grisea pathogenicity protein
  misc_feature (1)..(34): Homolog of NCBI NO: 21671921 NR Description: Putative protein with HVA22 domain [Oryza sativa
  misc_feature (1)..(204): Homolog of NCBI NO: 18394805 NR Description: expressed protein; protein id: At1g19950.1, by cDNA: 147130., supported by cDNA: gi_15010625 [Arabidopsis >gi|15010626|gb|AAK73972.1| At1g19950/T20H2_25 [Arabidopsis
  misc_feature (1)..(204): Homolog of NCBI NO: 21553483 NR Description: pathogenicity protein PATH531-like protein
  misc_feature (1)..(157): Homolog of NCBI NO: 18422223 NR Description: expressed protein; protein id: At5g42560.1,
  misc_feature (1)..(157): Homolog of NCBI NO: 21553813 NR Description: unknown [Arabidopsis thaliana]
  misc_feature (1)..(204): Homolog of NCBI NO: 25513732 NR Description: T20H2.26 protein - Arabidopsis thaliana Contains similarity to Magnaporthe grisea pathogenicity protein
  misc_feature (1)..(157): Homolog of NCBI NO: 9759014 NR Description: gene_id:K16E1.3~unknown protein [Arabidopsis
  misc_feature (1)..(51): Homolog of NCBI NO: 15222332 NR Description: hypothetical protein; protein id: At1g75700.1
MVVLYFHKAASVGQNTFFDVLKYVAAQSPSRKSRLHPHQEPQQQQPQVQVELQQPQPQKQAAPVMRRGASIAARQAAMAQQSLETIPVPSSPKIKRQTSGRPGSVASTKPAAAASTPKPGGSPKKGEVKPAVDPVQTPATSADSPKSEPSAPPLSETEGVDNMAIDEVSGDAAEGAEELDPALEETPMEETIRVTRAKLRRRTATEDSAGN

SEQ ID NO: 11636 - DNA, 1695 bp, Zea mays subsp. mays
  misc_feature (1)..(1695): Ceres Seq. ID no. 12406091
  misc_feature: MA Experiment ID: 108522 Result: Up-regulated in Transcription
  misc_feature: MA Experiment 108522 PARAMETER Experiment Name: Zm_42deg_Heat_P Parameter: Age (day) Value: 8
  misc_feature: MA Experiment 108522 PARAMETER Experiment Name: Zm_42deg_Heat_P Parameter: Organism Value: Zea mays
  misc_feature: MA Experiment 108522 PARAMETER Experiment Name: Zm_42deg_Heat_P Parameter: Plant Line Value: 35A19
  misc_feature: MA Experiment 108522 PARAMETER Experiment Name: Zm_42deg_Heat_P Parameter: Temperature (deg C) Value: 42 vs. 22
  misc_feature: MA Experiment 108522 PARAMETER Experiment Name: Zm_42deg_Heat_P Parameter: Timepoint (hr) Value: 1
  misc_feature: MA Experiment 108522 PARAMETER Experiment Name: Zm_42deg_Heat_P Parameter: Tissue Value: Aerial
  misc_feature: MA Experiment ID: 108556 Result: Up-regulated in Transcription
  misc_feature: MA Experiment 108556 PARAMETER Experiment Name: Zm_Drought_P Parameter: Age (day) Value: 9
  misc_feature: MA Experiment 108556 PARAMETER Experiment Name: Zm_Drought_P Parameter: Organism Value: Zea mays
  misc_feature: MA Experiment 108556 PARAMETER Experiment Name: Zm_Drought_P Parameter: Plant Line Value: 35A19
  misc_feature: MA Experiment 108556 PARAMETER Experiment Name: Zm_Drought_P Parameter: Timepoint (hr) Value: 24
  misc_feature: MA Experiment 108556 PARAMETER Experiment Name: Zm_Drought_P Parameter: Tissue Value: Aerial
  misc_feature: MA Experiment 108556 PARAMETER Experiment Name: Zm_Drought_P Parameter: Treatment Value: Drought vs. No Drought
gcacgagaccattacctagaacatcctaatcaaaaagcaaaactcgactccacgcgtcgcccttcttctccggagagatcgttttaatagccccgtaccaaatccaattcgtctctcctcaccggagaacagaaacgatacggttaatagatatagcgaagaagggcagcaccaccagtagcagcagccatgcccgctcgcgctcgatggcgactcctcgcgctgccgctcgcgctcttactcgttgccgggtcggcgcatggcctcgtgaagccggaggcagccgcggcgcccaagccccccgtccccaaggccatatcggacctgagggacgcgatcgtgaaggggctgggattccaggccgaggggctcaaggtgtccgggttcgacgtgcgagacgcgctcgtggggcacgcggtggcgtacgagttcgacatcgaggtcggcaggaaggtcctaccggtgcgcctgctggaggacgtcagccggtgggacttcgtcgacctccccatcttccgttcccaggccgacgctgacgatacggcgctcgccgagatccggcgggccgggagggggagcatcgttgagcctaccctgccgccctttcagctcgccgggcccatggagctctggatccagaacggcgacgacgtcaggcttgccttgccgcatgatgtggacgctggtaccttgaagaaggttgttctttctgatggtgcagtcgtaacagtgaagggtgctagagctgtgagcctccgtttgccgcttgaattaccacttcctctcaaccgtaccacttacaagggtcgcctctcaagcctgatatccatcgcacaagccctgcgtggtgcagcccggtctaatcagaaacccctgctctctcttcgcgttgagggtccagtttccttgtcctcgactccttccatgtctcccaaggacaagctcaagctcaaacggttggccccaggccaagtggagctctcctcacaggcgggggcaatccctgctatcaccgaagacgaggatgaaccacataaccctggattgtggcctcttttgtctctgaatggttcagatggcagcctgcaggggtttgaggagctattggcctcagtacttggaaagaaggcaggcgagaagggtaccttcaagctactgaaggcacgggcctcggctcaaacctatgtcaagatggcattcacggtggagaagaagcttgctgaaggggatgtgaactggtcaaatattccagaatggaagacgaagcccaagaggatgagagcacactacgaagtccttgctcgagtggaggagggtcaggcgatccctgagaggatagcgcaggtacagcctttccaggccaacgaggccatgtcggagagtgtgctcaccggcaacgtcacgaggtcgaagatggaaatcgtccatccaccgccggtttacttcactctctgagtgagcgaagaactggatgctgtttgatgttctcttcagagctactacacgttgggtggtgggtagtttacgctggctcgtaggcaacaaagttgtacaagcggcaagagtttgttgcctatacactgactgcgttgacatgaatattgacgttctatgtgtactgaaaggctggcaagcctttaatattatcaattggaataatgaggaataagaaaaatctgtacatctttagagggc

SEQ ID NO: 11637 - protein, 421 aa, Zea mays subsp. mays
  peptide (1)..(421): Ceres Seq. ID no. 12406092
  misc_feature (1)..(421): Homolog of NCBI NO: 34909866 NR Description: OSJNBb0053G03.14 [Oryza sativa (japonica
  misc_feature (11)..(421): Homolog of NCBI NO: 28393303 NR Description: unknown protein [Arabidopsis thaliana]
  misc_feature (286)..(421): Homolog of NCBI NO: 15237724 NR Description: putative protein; protein id: At5g64510.1 thaliana] >gi|10178054|dbj|BAB11418.1|
  misc_feature (281)..(378): Homolog of NCBI NO: 7489145 NR Description: hypothetical protein (clone NF24) - common tobacco
  misc_feature (228)..(421): Homolog of NCBI NO: 18401665 NR Description: expressed protein; protein id: At1g47310.1, by cDNA: 111522. [Arabidopsis thaliana] >gi|25373240|pir||H96513
  misc_feature (28)..(189): Homolog of NCBI NO: 18401665 NR Description: expressed protein; protein id: At1g47310.1, by cDNA: 111522. [Arabidopsis thaliana] >gi|25373240|pir||H96513
  misc_feature (228)..(421): Homolog of NCBI NO: 21536788 NR Description: unknown [Arabidopsis thaliana]
  misc_feature (28)..(189): Homolog of NCBI NO: 21536788 NR Description: unknown [Arabidopsis thaliana]
MPARARWRLLALPLALLLVAGSAHGLVKPEAAAAPKPPVPKAISDLRDAIVKGLGFQAEGLKVSGFDVRDALVGHAVAYEFDIEVGRKVLPVRLLEDVSRWDFVDLPIFRSQADADDTALAEIRRAGRGSIVEPTLPPFQLAGPMELWIQNGDDVRLALPHDVDAGTLKKVVLSDGAVVTVKGARAVSLRLPLELPLPLNRTTYKGRLSSLISIAQALRGAARSNQKPLLSLRVEGPVSLSSTPSMSPKDKLKLKRLAPGQVELSSQAGAIPAITEDEDEPHNPGLWPLLSLNGSDGSLQGFEELLASVLGKKAGEKGTFKLLKARASAQTYVKMAFTVEKKLAEGDVNWSNIPEWKTKPKRMRAHYEVLARVEEGQAIPERIAQVQPFQANEAMSESVLTGNVTRSKMEIVHPPPVYFTL

SEQ ID NO: 11638 - protein, 277 aa, Zea mays subsp. mays
  peptide (1)..(277): Ceres Seq. ID no. 12406093
  misc_feature (1)..(277): Homolog of NCBI NO: 34909866 NR Description: OSJNBb0053G03.14 [Oryza sativa (japonica
  misc_feature (1)..(277): Homolog of NCBI NO: 28393303 NR Description: unknown protein [Arabidopsis thaliana]
  misc_feature (142)..(277): Homolog of NCBI NO: 15237724 NR Description: putative protein; protein id: At5g64510.1 thaliana] >gi|10178054|dbj|BAB11418.1|
  misc_feature (137)..(234): Homolog of NCBI NO: 7489145 NR Description: hypothetical protein (clone NF24) - common tobacco
  misc_feature (84)..(277): Homolog of NCBI NO: 18401665 NR Description: expressed protein; protein id: At1g47310.1, by cDNA: 111522. [Arabidopsis thaliana] >gi|25373240|pir||H96513
  misc_feature (1)..(45): Homolog of NCBI NO: 18401665 NR Description: expressed protein; protein id: At1g47310.1, by cDNA: 111522. [Arabidopsis thaliana] >gi|25373240|pir||H96513
  misc_feature (84)..(277): Homolog of NCBI NO: 21536788 NR Description: unknown [Arabidopsis thaliana]
  misc_feature (1)..(45): Homolog of NCBI NO: 21536788 NR Description: unknown [Arabidopsis thaliana]
MELWIQNGDDVRLALPHDVDAGTLKKVVLSDGAVVTVKGARAVSLRLPLELPLPLNRTTYKGRLSSLISIAQALRGAARSNQKPLLSLRVEGPVSLSSTPSMSPKDKLKLKRLAPGQVELSSQAGAIPAITEDEDEPHNPGLWPLLSLNGSDGSLQGFEELLASVLGKKAGEKGTFKLLKARASAQTYVKMAFTVEKKLAEGDVNWSNIPEWKTKPKRMRAHYEVLARVEEGQAIPERIAQVQPFQANEAMSESVLTGNVTRSKMEIVHPPPVYFTL

SEQ ID NO: 11639 - DNA, 793 bp, Zea mays subsp. mays
  misc_feature (1)..(793): Ceres Seq. ID no. 12355690
  misc_feature: MA Experiment ID: 108535 Result: Up-regulated in Transcription
  misc_feature: MA Experiment 108535 PARAMETER Experiment Name: Zm_Meristem_P Parameter: Age (day) Value: 8
  misc_feature: MA Experiment 108535 PARAMETER Experiment Name: Zm_Meristem_P Parameter: Organism Value: Zea mays
  misc_feature: MA Experiment 108535 PARAMETER Experiment Name: Zm_Meristem_P Parameter: Plant Line Value: 35A19
  misc_feature: MA Experiment 108535 PARAMETER Experiment Name: Zm_Meristem_P Parameter: Tissue Value: Root Meristem vs. Above Root Meristem
  misc_feature: MA Experiment ID: 20000488 Result: Up-regulated in Transcription
  misc_feature: MA Experiment 20000488 PARAMETER Experiment Name: Zm_50mM_NH4NO3_L_to_H_P Parameter: Organism Value: Zea mays
  misc_feature: MA Experiment 20000488 PARAMETER Experiment Name: Zm_50mM_NH4NO3_L_to_H_P Parameter: Timepoint (hr) Value: 8
  misc_feature: MA Experiment 20000488 PARAMETER Experiment Name: Zm_50mM_NH4NO3_L_to_H_P Parameter: Tissue Value: Leaves
  misc_feature: MA Experiment 20000488 PARAMETER Experiment Name: Zm_50mM_NH4NO3_L_to_H_P Parameter: Treatment Value: 50mM NH4NO3 vs. 100mM Mannitol
  misc_feature: MA Experiment ID: 20001605 Result: Up-regulated in Transcription
  misc_feature: MA Experiment 20001605 PARAMETER Experiment Name: Zm_50ppm_KNO3_L-to-H_P Parameter: Age (day) Value: 19
  misc_feature: MA Experiment 20001605 PARAMETER Experiment Name: Zm_50ppm_KNO3_L-to-H_P Parameter: Organism Value: Zea mays
  misc_feature: MA Experiment 20001605 PARAMETER Experiment Name: Zm_50ppm_KNO3_L-to-H_P Parameter: Plant Line Value: 35A19
  misc_feature: MA Experiment 20001605 PARAMETER Experiment Name: Zm_50ppm_KNO3_L-to-H_P Parameter: Timepoint (hr) Value: 4
  misc_feature: MA Experiment 20001605 PARAMETER Experiment Name: Zm_50ppm_KNO3_L-to-H_P Parameter: Tissue Value: Shoots
  misc_feature: MA Experiment 20001605 PARAMETER Experiment Name: Zm_50ppm_KNO3_L-to-H_P Parameter: Treatment Value: 50ppm KNO3 vs. 50ppm KCl
  misc_feature: MA Experiment ID: 20001606 Result: Up-regulated in Transcription
  misc_feature: MA Experiment 20001606 PARAMETER Experiment Name: Zm_50ppm_KNO3_L-to-H_P Parameter: Age (day) Value: 19
  misc_feature: MA Experiment 20001606 PARAMETER Experiment Name: Zm_50ppm_KNO3_L-to-H_P Parameter: Organism Value: Zea mays
  misc_feature: MA Experiment 20001606 PARAMETER Experiment Name: Zm_50ppm_KNO3_L-to-H_P Parameter: Plant Line Value: 35A19
  misc_feature: MA Experiment 20001606 PARAMETER Experiment Name: Zm_50ppm_KNO3_L-to-H_P Parameter: Timepoint (hr) Value: 8
  misc_feature: MA Experiment 20001606 PARAMETER Experiment Name: Zm_50ppm_KNO3_L-to-H_P Parameter: Tissue Value: Shoots
  misc_feature: MA Experiment 20001606 PARAMETER Experiment Name: Zm_50ppm_KNO3_L-to-H_P Parameter: Treatment Value: 50ppm KNO3 vs. 50ppm KCl
aaaccctagaaagctcttaaaaagcccccaggggccagggctagcagcggcggcgtatccctaatcccacctccagtctctgggcaccaaatttccggcggcgatggcggcggctgtggcgaggtcagggttccggcgcatgttctccgtctctgccttcgcgccgccgaaggcgcccgccgcgcgccccaaggccgacccatcccccaacctcttcgtctccggcttaagcaagcgtaccacaagtgaaggacttagagaagcctttgcggagtttggtgaagttttgcatgctcgagttgtgaccgatcgtgtcagtgggttttctaagggatttggctttgtaaggtatgctacgaccgaagaggcagccaagggaatagagggaaaggatggaaagttccttgatggatgggttatttttgcggaatacgctaaacccagaccaccaccggaggaaacagggatgaattcgcagccccagcagtcatggggagctccatcaggttcctggggtgcacagtagatgaagtgatattgtgagagcccctccctgtcccagccctagggctcgtagcggatcgtgagggatgattttgtgtggtgtgtcgcaggtgtgaaatgcctttgttgtcccaatattcctaccgtgttgggggtggtcgcttgctcgcgtccacgtctttcacatgaattggttactgtggtagttgtagttctggatacggtaccaaaacaaaagtattgctgtcaacaatctgcaacagccgggaaaacagtcgaaaacctttgc

SEQ ID NO: 11640 - protein, 140 aa, Zea mays subsp. mays; identical to SEQ ID NO: 6608
  peptide (1)..(140): Ceres Seq. ID no. 12355691
  misc_feature (37)..(108): Pfam Name: RNA recognition motif. (a.k.a. RRM, RBD, or RNP domain) Pfam Description: RNA recognition motif. (a.k.a. RRM, RBD, or RNP
  misc_feature (2)..(140): Homolog of NCBI NO: 38636774 NR Description: putative RNA recognition motif (RRM)-containing
  misc_feature (1)..(129): Homolog of NCBI NO: 34898598 NR Description: P0534A03.25 [Oryza sativa (japonica
  misc_feature (1)..(133): Homolog of NCBI NO: 15239676 NR Description: RRM-containing protein; protein id: At5g54580.1, by cDNA: 14044., supported by cDNA: gi_18175761, supported by gi_20465512 [Arabidopsis thaliana] >gi|9758950|dbj|BAB09337.1|
  misc_feature (8)..(116): Homolog of NCBI NO: 15224298 NR Description: RRM-containing protein; protein id: At2g37510.1,
  misc_feature (17)..(114): Homolog of NCBI NO: 15219486 NR Description: RRM-containing RNA-binding protein, putative;
  misc_feature (3)..(114): Homolog of NCBI NO: 15239958 NR Description: RRM-containing protein; protein id: At5g06210.1, by cDNA: 36764., supported by cDNA: gi_17065275, supported by gi_20260001 [Arabidopsis thaliana] >gi|9759319|dbj|BAB09686.1|
  misc_feature (34)..(140): Homolog of NCBI NO: 34906972 NR Description: putative glycine-rich RNA-binding protein 2
  misc_feature (4)..(138): Homolog of NCBI NO: 21388662 NR Description: glycine-rich RNA-binding protein [Physcomitrella
  misc_feature (1)..(114): Homolog of NCBI NO: 38344030 NR Description: OJ991214_12.1 [Oryza sativa (japonica
  misc_feature (34)..(99): Homolog of NCBI NO: 19881711 NR Description: Putative RNA-binding protein [Oryza sativa]

SEQ ID NO: 11641 - protein, 128 aa, Zea mays subsp. mays; identical to SEQ ID NO: 6609
  peptide (1)..(128): Ceres Seq. ID no. 12355692
  misc_feature (25)..(96): Pfam Name: RNA recognition motif. (a.k.a. RRM, RBD, or RNP domain) Pfam Description: RNA recognition motif. (a.k.a. RRM, RBD, or RNP
  misc_feature (1)..(128): Homolog of NCBI NO: 38636774 NR Description: putative RNA recognition motif (RRM)-containing
  misc_feature (1)..(117): Homolog of NCBI NO: 34898598 NR Description: P0534A03.25 [Oryza sativa (japonica
  misc_feature (1)..(121): Homolog of NCBI NO: 15239676 NR Description: RRM-containing protein; protein id: At5g54580.1, by cDNA: 14044., supported by cDNA: gi_18175761, supported by gi_20465512 [Arabidopsis thaliana] >gi|9758950|dbj|BAB09337.1|
  misc_feature (1)..(104): Homolog of NCBI NO: 15224298 NR Description: RRM-containing protein; protein id: At2g37510.1,
  misc_feature (5)..(102): Homolog of NCBI NO: 15219486 NR Description: RRM-containing RNA-binding protein, putative;
  misc_feature (1)..(102): Homolog of NCBI NO: 15239958 NR Description: RRM-containing protein; protein id: At5g06210.1, by cDNA: 36764., supported by cDNA: gi_17065275, supported by gi_20260001 [Arabidopsis thaliana] >gi|9759319|dbj|BAB09686.1|
  misc_feature (22)..(128): Homolog of NCBI NO: 34906972 NR Description: putative glycine-rich RNA-binding protein 2
  misc_feature (1)..(126): Homolog of NCBI NO: 21388662 NR Description: glycine-rich RNA-binding protein [Physcomitrella
  misc_feature (1)..(102): Homolog of NCBI NO: 38344030 NR Description: OJ991214_12.1 [Oryza sativa (japonica
  misc_feature (22)..(87): Homolog of NCBI NO: 19881711 NR Description: Putative RNA-binding protein [Oryza sativa]

SEQ ID NO: 11642 - DNA, 1134 bp, Zea mays subsp. mays
  misc_feature (1)..(1134): Ceres Seq. ID no. 12350920
  misc_feature: MA Experiment ID: 108534 Result: Up-regulated in Transcription
  misc_feature: MA Experiment 108534 PARAMETER Experiment Name: Zm_4deg_Cold_P Parameter: Age (hr) Value: 8
  misc_feature: MA Experiment 108534 PARAMETER Experiment Name: Zm_4deg_Cold_P Parameter: Organism Value: Zea mays
  misc_feature: MA Experiment 108534 PARAMETER Experiment Name: Zm_4deg_Cold_P Parameter: Plant Line Value: 35A19
  misc_feature: MA Experiment 108534 PARAMETER Experiment Name: Zm_4deg_Cold_P Parameter: Temperature (deg C) Value: 4 vs. 22
  misc_feature: MA Experiment 108534 PARAMETER Experiment Name: Zm_4deg_Cold_P Parameter: Timepoint (hr) Value: 6
  misc_feature: MA Experiment 108534 PARAMETER Experiment Name: Zm_4deg_Cold_P Parameter: Tissue Value: Aerial
  misc_feature: MA Experiment ID: 20000108 Result: Down-regulated in Transcription
  misc_feature: MA Experiment 20000108 PARAMETER Experiment Name: Zm_Root-Tips_P Parameter: Age (day) Value: 12
  misc_feature: MA Experiment 20000108 PARAMETER Experiment Name: Zm_Root-Tips_P Parameter: Organism Value: Zea mays
  misc_feature: MA Experiment 20000108 PARAMETER Experiment Name: Zm_Root-Tips_P Parameter: Tissue Value: Root tips vs. Root mid region    35
  misc_feature: MA Experiment 20000108 PARAMETER Experiment Name: Zm_Root-Tips_P Parameter: Tissue Value: Root tips vs. Root mid region   Sequence Listing-Misc Features (4)
  misc_feature: MA Experiment ID: 20000535 Result: Down-regulated in Transcription
  misc_feature: MA Experiment 20000535 PARAMETER Experiment Name: Zm_Hybrid_Seed_Dev_P Parameter: DAP Value: 30 vs. 12
  misc_feature: MA Experiment 20000535 PARAMETER Experiment Name: Zm_Hybrid_Seed_Dev_P Parameter: Organism Value: Zea mays
  misc_feature: MA Experiment 20000535 PARAMETER Experiment Name: Zm_Hybrid_Seed_Dev_P Parameter: Plant Line Value: 35A19
  misc_feature: MA Experiment 20000535 PARAMETER Experiment Name: Zm_Hybrid_Seed_Dev_P Parameter: Tissue Value: Embryo vs. Unfert Floret
atcaagcacaagcacgccacgcgatccacacacggcaagcaacgcccagggctcgtgctcgccccgcgacccgcgaaagatctgtgctggttcgctcgctcgctcgcgccgcgccgccgcgtgggggtgccgatgagctgcgcggggcaggccggcgggtggctgctcgactacgcgctggtggagtaggagatccagggctccgagttcatctacatggtcgacgacccggccgtctccagcgtgatactggggtttgatgctcccaggaaagaggacggcgtccaggacaaccccggcgccaagaagagatcccggccggagtccagcgcgccacccggcaccaaggcttgccgtgagaagctccggcgagacaggctcaacgaaaggttcaacgagctctgtgccatcttggaacccggcaagccacccaaggccgacaaagtcgctatcctaagcgacgctgcccgtctcctgaaccagctgcagggcgaggcccagaagcttaagcaatcgaacgaatcgctccaggagtccatcaagagtcttaaggctgagaagtccgagctgcgagacgagaagacgaggctcaaggctgagaaggagaggttggagcagatgctcaagggcgtcgtcagccacgccgcggtggctgctccggggcccttcgtcccgcaccctgctgcggtcgctccatctttccaccaccacccggcggcgtttgctcaggctggaaagttcgtcccgtaccccagctacccgccgccggctgcgttctggcagtggataccgccgacgtccctcgacacgaccaaggaccccgcacactggccgccggtcgcctagccgacctaccacctcaccgtggcatcattcatcggtgatgcgttgccgtgtgtactgaatttgatcgaagcatgcctgaaaaaagaaaccttggctgctgctcgtgtcaaggacgtgatgtgctgaagttcaggcgatctaggtcggctggagaagtctatgtaacagccataatgctaaagcaatgaaagtgatatattaattgaatcgggctagtgtttcctgaaactacggttatttagacattgcctggaaggctagaacaatgcaaacttgggtaacattgtg

SEQ ID NO: 11643 - protein, 209 aa, Zea mays subsp. mays
  peptide (1)..(209): Ceres Seq. ID no. 12350921
  misc_feature (41)..(91): Pfam Name: Helix-loop-helix DNA-binding domain Pfam Description: Helix-loop-helix DNA-binding domain
  misc_feature (1)..(209): Homolog of NCBI NO: 21592325 NR Description: bHLH transcription factor, putative [Arabidopsis
  misc_feature (1)..(209): Homolog of NCBI NO: 15239706 NR Description: bHLH protein; protein id: At5g54680.1, supported cDNA: 22343., supported by cDNA: gi_15451009, supported by cDNA: [Arabidopsis thaliana] >gi|10176795|dbj|BAB09934.1| thaliana]
  misc_feature (1)..(209): Homolog of NCBI NO: 15223710 NR Description: bHLH protein; protein id: At1g51070.1, supported cDNA: 16284., supported by cDNA: gi_20127114 [Arabidopsis
  misc_feature (20)..(209): Homolog of NCBI NO: 32352190 NR Description: hypothetical protein [Oryza sativa (japonica
  misc_feature (1)..(209): Homolog of NCBI NO: 20127030 NR Description: putative bHLH transcription factor [Arabidopsis
  misc_feature (1)..(209): Homolog of NCBI NO: 22331274 NR Description: bHLH protein; protein id: At3g23210.1, supported cDNA: gi_20466415 [Arabidopsis thaliana] emb|CAB10220.1~gene_id:K14B15.12~similar to unknown protein
  misc_feature (23)..(209): Homolog of NCBI NO: 29367409 NR Description: helix-loop-helix-like protein [Oryza sativa
  misc_feature (23)..(209): Homolog of NCBI NO: 38636768 NR Description: helix-loop-helix-like protein [Oryza sativa
  misc_feature (16)..(183): Homolog of NCBI NO: 18414212 NR Description: bHLH protein; protein id: At4g14410.1, supported cDNA: 40736., supported by cDNA: gi_20856628 [Arabidopsis >gi|20856629|gb|AAM26676.1| AT4g14410/dl3245w [Arabidopsis
  misc_feature (16)..(183): Homolog of NCBI NO: 30682847 NR Description: bHLH protein [Arabidopsis thaliana]
MVDDPAVSSVILGFDAPRKEDGVQDNPGAKKRSRPESSAPPGTKACREKLRRDRLNERFNELCAILEPGKPPKADKVAILSDAARLLNQLQGEAQKLKQSNESLQESIKSLKAEKSELRDEKTRLKAEKERLEQMLKGVVSHAAVAAPGPFVPHPAAVAPSFHHHPAAFAQAGKFVPYPSYPPPAAFWQWIPPTSLDTTKDPAHWPPVA

SEQ ID NO: 11644 - DNA, 772 bp, Zea mays subsp. mays
  misc_feature (1)..(772): Ceres Seq. ID no. 12379466
  misc_feature: MA Experiment ID: 108523 Result: Up-regulated in Transcription
  misc_feature: MA Experiment 108523 PARAMETER Experiment Name: Zm_42deg_Heat_P Parameter: Age (day) Value: 8
  misc_feature: MA Experiment 108523 PARAMETER Experiment Name: Zm_42deg_Heat_P Parameter: Organism Value: Zea mays
  misc_feature: MA Experiment 108523 PARAMETER Experiment Name: Zm_42deg_Heat_P Parameter: Plant Line Value: 35A19
  misc_feature: MA Experiment 108523 PARAMETER Experiment Name: Zm_42deg_Heat_P Parameter: Temperature (deg C) Value: 42 vs. 22
  misc_feature: MA Experiment 108523 PARAMETER Experiment Name: Zm_42deg_Heat_P Parameter: Timepoint (hr) Value: 6
  misc_feature: MA Experiment 108523 PARAMETER Experiment Name: Zm_42deg_Heat_P Parameter: Tissue Value: Aerial
aacgcactgctaaaagagctcgacgactacgttgtatgctgatcgattcgtctccgatctcctccttcgaccgccgccaccttcgtctccgagactccgacgatgtcctccgccgccgatgaggatgcgttgtcgtctgacaaggggaagaagagggaggaggacggcactgacgggaggagccaacgtcaggagggtgtcgaggtggccgacgggaaagtggatctaggagacctgtacggcgcggcggcggggtgggtagaggcgcggaccagctgcccgcacatcggcaccatgccacccgctggtgctgacgacctcgcgcgcgtgccttcgcccgactctccgtgctccagatgtaatcaccctgctgaaaactggttatgcttcatatgcaaagatgtgctttgcagccgttttatcaacaaacatatgttgtgccatcatcaagaaactggtcactgtcttgctttgagcttcagtgatctgtcagtttggtgtttctcatgtgattcatacctagatgttcaagccattttagaattgcgcccagtgtatgaagttgcacatttgttgaagtttggacaacgtccaccatttcgatcacttgatgtacaggattctggcactggtgaaagtggaagtgtgtcaagggcttagttatatgtattccagtaatgagtttcttttcatgatacttcaatcagattcagacagacagttgtctactatcctggcatttcttaagctgcagtgcaatataattcatttg

SEQ ID NO: 11645 - protein, 185 aa, Zea mays subsp. mays
  peptide (1)..(185): Ceres Seq. ID no. 12379467
  misc_feature (83)..(153): Pfam Name: Zn-finger in ubiquitin-hydrolases and other protein Pfam Description: Zn-finger in ubiquitin-hydrolases and other
  misc_feature (83)..(153): Pfam Name: Zn-finger in ubiquitin-hydrolases and other protein Pfam Description: Zn-finger in ubiquitin-hydrolases and other
  misc_feature (34)..(169): Homolog of NCBI NO: 26984073 NR Description: hypothetical protein [Arabidopsis thaliana]
  misc_feature (1)..(165): Homolog of NCBI NO: 34933421 NR Description: histone deacetylase 6 [Rattus norvegicus]
  misc_feature (59)..(160): Homolog of NCBI NO: 27882614 NR Description: Similar to histone deacetylase 6 [Xenopus laevis]
  misc_feature (59)..(165): Homolog of NCBI NO: 11360193 NR Description: hypothetical protein DKFZp566E044.1 - human
  misc_feature (59)..(165): Homolog of NCBI NO: 15489272 NR Description: histone deacetylase 6 [Homo sapiens]
  misc_feature (1)..(165): Homolog of NCBI NO: 34933421 NR Description: histone deacetylase 6 [Rattus norvegicus]
  misc_feature (59)..(165): Homolog of NCBI NO: 11360193 NR Description: hypothetical protein DKFZp566E044.1 - human
  misc_feature (1)..(165): Homolog of NCBI NO: 7513783 NR Description: probable histone deacetylase (EC 3.5.1.-) HDA2 -
  misc_feature (59)..(165): Homolog of NCBI NO: 13128864 NR Description: histone deacetylase 6 [Homo sapiens]
  misc_feature (59)..(165): Homolog of NCBI NO: 10720024 NR Description: Histone deacetylase 6 (HD6)
  misc_feature (1)..(165): Homolog of NCBI NO: 27370650 NR Description: histone deacetylase 6 [Mus musculus]
  misc_feature (59)..(165): Homolog of NCBI NO: 7108921 NR Description: GR AF-1 specific histone deacetylase [Homo
  misc_feature (59)..(165): Homolog of NCBI NO: 15489272 NR Description: histone deacetylase 6 [Homo sapiens]
  misc_feature (59)..(160): Homolog of NCBI NO: 27882614 NR Description: Similar to histone deacetylase 6 [Xenopus laevis]
  misc_feature (34)..(169): Homolog of NCBI NO: 26984073 NR Description: hypothetical protein [Arabidopsis thaliana]
  misc_feature (59)..(165): Homolog of NCBI NO: 7108921 NR Description: GR AF-1 specific histone deacetylase [Homo
  misc_feature (1)..(165): Homolog of NCBI NO: 27370650 NR Description: histone deacetylase 6 [Mus musculus]
  misc_feature (59)..(165): Homolog of NCBI NO: 10720024 NR Description: Histone deacetylase 6 (HD6)
  misc_feature (59)..(165): Homolog of NCBI NO: 13128864 NR Description: histone deacetylase 6 [Homo sapiens]
  misc_feature (1)..(165): Homolog of NCBI NO: 7513783 NR Description: probable histone deacetylase (EC 3.5.1.-) HDA2 -
MSSAADEDALSSDKGKKREEDGTDGRSQRQEGVEVADGKVDLGDLYGAAAGWVEARTSCPHIGTMPPAGADDLARVPSPDSPCSRCNHPAENWLCFICKDVLCSRFINKHMLCHHQETGHCLALSFSDLSVWCFSCDSYLDVQAILELRPVYEVAHLLKFGQRPPFRSLDVQDSGTGESGSVSRA

SEQ ID NO: 11646 - protein, 121 aa, Zea mays subsp. mays
  peptide (1)..(121): Ceres Seq. ID no. 12379468
  misc_feature (19)..(89): Pfam Name: Zn-finger in ubiquitin-hydrolases and other protein Pfam Description: Zn-finger in ubiquitin-hydrolases and other
  misc_feature (19)..(89): Pfam Name: Zn-finger in ubiquitin-hydrolases and other protein Pfam Description: Zn-finger in ubiquitin-hydrolases and other
  misc_feature (1)..(105): Homolog of NCBI NO: 26984073 NR Description: hypothetical protein [Arabidopsis thaliana]
  misc_feature (1)..(101): Homolog of NCBI NO: 34933421 NR Description: histone deacetylase 6 [Rattus norvegicus]
  misc_feature (1)..(96): Homolog of NCBI NO: 27882614 NR Description: Similar to histone deacetylase 6 [Xenopus laevis]
  misc_feature (1)..(101): Homolog of NCBI NO: 11360193 NR Description: hypothetical protein DKFZp566E044.1 - human
  misc_feature (1)..(101): Homolog of NCBI NO: 15489272 NR Description: histone deacetylase 6 [Homo sapiens]
  misc_feature (1)..(101): Homolog of NCBI NO: 34933421 NR Description: histone deacetylase 6 [Rattus norvegicus]
  misc_feature (1)..(101): Homolog of NCBI NO: 11360193 NR Description: hypothetical protein DKFZp566E044.1 - human
  misc_feature (1)..(101): Homolog of NCBI NO: 7513783 NR Description: probable histone deacetylase (EC 3.5.1.-) HDA2 -
  misc_feature (1)..(101): Homolog of NCBI NO: 13128864 NR Description: histone deacetylase 6 [Homo sapiens]
  misc_feature (1)..(101): Homolog of NCBI NO: 10720024 NR Description: Histone deacetylase 6 (HD6)
  misc_feature (1)..(101): Homolog of NCBI NO: 27370650 NR Description: histone deacetylase 6 [Mus musculus]
  misc_feature (1)..(101): Homolog of NCBI NO: 7108921 NR Description: GR AF-1 specific histone deacetylase [Homo
  misc_feature (1)..(101): Homolog of NCBI NO: 15489272 NR Description: histone deacetylase 6 [Homo sapiens]
  misc_feature (1)..(96): Homolog of NCBI NO: 27882614 NR Description: Similar to histone deacetylase 6 [Xenopus laevis]
  misc_feature (1)..(105): Homolog of NCBI NO: 26984073 NR Description: hypothetical protein [Arabidopsis thaliana]
  misc_feature (1)..(101): Homolog of NCBI NO: 7108921 NR Description: GR AF-1 specific histone deacetylase [Homo
  misc_feature (1)..(101): Homolog of NCBI NO: 27370650 NR Description: histone deacetylase 6 [Mus musculus]
  misc_feature (1)..(101): Homolog of NCBI NO: 10720024 NR Description: Histone deacetylase 6 (HD6)
  misc_feature (1)..(101): Homolog of NCBI NO: 13128864 NR Description: histone deacetylase 6 [Homo sapiens]
  misc_feature (1)..(101): Homolog of NCBI NO: 7513783 NR Description: probable histone deacetylase (EC 3.5.1.-) HDA2 -
MPPAGADDLARVPSPDSPCSRCNHPAENWLCFICKDVLCSRFINKHMLCHHQETGHCLALSFSDLSVWCFSCDSYLDVQAILELRPVYEVAHLLKFGQRPPFRSLDVQDSGTGESGSVSRA

SEQ ID NO: 11647 - DNA, 1064 bp, Zea mays subsp. mays
  misc_feature (1)..(1064): Ceres Seq. ID no. 13494390
  misc_feature: MA Experiment ID: 108522 Result: Down-regulated in Transcription
  misc_feature: MA Experiment 108522 PARAMETER Experiment Name: Zm_42deg_Heat_P Parameter: Age (day) Value: 8
  misc_feature: MA Experiment 108522 PARAMETER Experiment Name: Zm_42deg_Heat_P Parameter: Organism Value: Zea mays
  misc_feature: MA Experiment 108522 PARAMETER Experiment Name: Zm_42deg_Heat_P Parameter: Plant Line Value: 35A19
  misc_feature: MA Experiment 108522 PARAMETER Experiment Name: Zm_42deg_Heat_P Parameter: Temperature (deg C) Value: 42 vs. 22
  misc_feature: MA Experiment 108522 PARAMETER Experiment Name: Zm_42deg_Heat_P Parameter: Timepoint (hr) Value: 1
  misc_feature: MA Experiment 108522 PARAMETER Experiment Name: Zm_42deg_Heat_P Parameter: Tissue Value: Aerial
  misc_feature: MA Experiment ID: 108523 Result: Down-regulated in Transcription
  misc_feature: MA Experiment 108523 PARAMETER Experiment Name: Zm_42deg_Heat_P Parameter: Age (day) Value: 8
  misc_feature: MA Experiment 108523 PARAMETER Experiment Name: Zm_42deg_Heat_P Parameter: Organism Value: Zea mays
  misc_feature: MA Experiment 108523 PARAMETER Experiment Name: Zm_42deg_Heat_P Parameter: Plant Line Value: 35A19
  misc_feature: MA Experiment 108523 PARAMETER Experiment Name: Zm_42deg_Heat_P Parameter: Temperature (deg C) Value: 42 vs. 22
  misc_feature: MA Experiment 108523 PARAMETER Experiment Name: Zm_42deg_Heat_P Parameter: Timepoint (hr) Value: 6
  misc_feature: MA Experiment 108523 PARAMETER Experiment Name: Zm_42deg_Heat_P Parameter: Tissue Value: Aerial
  misc_feature: MA Experiment ID: 108536 Result: Down-regulated in Transcription
  misc_feature: MA Experiment 108536 PARAMETER Experiment Name: Zm_Meristem_P Parameter: Age (day) Value: 8
  misc_feature: MA Experiment 108536 PARAMETER Experiment Name: Zm_Meristem_P Parameter: Organism Value: Zea mays
  misc_feature: MA Experiment 108536 PARAMETER Experiment Name: Zm_Meristem_P Parameter: Plant Line Value: 35A19
  misc_feature: MA Experiment 108536 PARAMETER Experiment Name: Zm_Meristem_P Parameter: Tissue Value: Shoot Meristem vs. Above Shoot Meristem
  misc_feature: MA Experiment ID: 108544 Result: Down-regulated in Transcription
  misc_feature: MA Experiment ID: 108556 Result: Down-regulated in Transcription
  misc_feature: MA Experiment 108556 PARAMETER Experiment Name: Zm_Drought_P Parameter: Age (day) Value: 9
  misc_feature: MA Experiment 108556 PARAMETER Experiment Name: Zm_Drought_P Parameter: Organism Value: Zea mays
  misc_feature: MA Experiment 108556 PARAMETER Experiment Name: Zm_Drought_P Parameter: Plant Line Value: 35A19
  misc_feature: MA Experiment 108556 PARAMETER Experiment Name: Zm_Drought_P Parameter: Timepoint (hr) Value: 24
  misc_feature: MA Experiment 108556 PARAMETER Experiment Name: Zm_Drought_P Parameter: Tissue Value: Aerial
  misc_feature: MA Experiment 108556 PARAMETER Experiment Name: Zm_Drought_P Parameter: Treatment Value: Drought vs. No Drought
  misc_feature: MA Experiment ID: 108597 Result: Down-regulated in Transcription
  misc_feature: MA Experiment 108597 PARAMETER Experiment Name: Zm_100uM_ABA_P Parameter: Age (day) Value: 9
  misc_feature: MA Experiment 108597 PARAMETER Experiment Name: Zm_100uM_ABA_P Parameter: Organism Value: Zea mays
  misc_feature: MA Experiment 108597 PARAMETER Experiment Name: Zm_100uM_ABA_P Parameter: Plant Line Value: 35A19
  misc_feature: MA Experiment 108597 PARAMETER Experiment Name: Zm_100uM_ABA_P Parameter: Timepoint (hr) Value: 24
  misc_feature: MA Experiment 108597 PARAMETER Experiment Name: Zm_100uM_ABA_P Parameter: Tissue Value: Aerial
  misc_feature: MA Experiment 108597 PARAMETER Experiment Name: Zm_100uM_ABA_P Parameter: Treatment Value: 100uM ABA vs. No Treatment
  misc_feature: MA Experiment ID: 108687 Result: Down-regulated in Transcription
  misc_feature: MA Experiment 108687 PARAMETER Experiment Name: Zm_Embryos-Flowers__P Parameter: Tissue Value: Embryo vs. Aerial+
  misc_feature: MA Experiment ID: 20000477 Result: Down-regulated in Transcription
  misc_feature: MA Experiment 20000477 PARAMETER Experiment Name: Zm_5mM_SA_P Parameter: Age (day) Value: 10
  misc_feature: MA Experiment 20000477 PARAMETER Experiment Name: Zm_5mM_SA_P Parameter: Organism Value: Zea mays
  misc_feature: MA Experiment 20000477 PARAMETER Experiment Name: Zm_5mM_SA_P Parameter: Plant Line Value: 35A19
  misc_feature: MA Experiment 20000477 PARAMETER Experiment Name: Zm_5mM_SA_P Parameter: Timepoint (hr) Value: 48
  misc_feature: MA Experiment 20000477 PARAMETER Experiment Name: Zm_5mM_SA_P Parameter: Tissue Value: Aerial
  misc_feature: MA Experiment 20000477 PARAMETER Experiment Name: Zm_5mM_SA_P Parameter: Treatment Value: 5mM SA vs. No Treatment
  misc_feature: MA Experiment ID: 20000478 Result: Down-regulated in Transcription
  misc_feature: MA Experiment 20000478 PARAMETER Experiment Name: Zm_5mM_SA_P Parameter: Age (day) Value: 11
  misc_feature: MA Experiment 20000478 PARAMETER Experiment Name: Zm_5mM_SA_P Parameter: Organism Value: Zea mays
  misc_feature: MA Experiment 20000478 PARAMETER Experiment Name: Zm_5mM_SA_P Parameter: Plant Line Value: 35A19
  misc_feature: MA Experiment 20000478 PARAMETER Experiment Name: Zm_5mM_SA_P Parameter: Timepoint (hr) Value: 72
  misc_feature: MA Experiment 20000478 PARAMETER Experiment Name: Zm_5mM_SA_P Parameter: Tissue Value: Aerial
  misc_feature: MA Experiment 20000478 PARAMETER Experiment Name: Zm_5mM_SA_P Parameter: Treatment Value: 5mM SA vs. No Treatment
  misc_feature: MA Experiment ID: 20000479 Result: Down-regulated in Transcription
  misc_feature: MA Experiment 20000479 PARAMETER Experiment Name: Zm_Drought_P Parameter: Age (day) Value: 10
  misc_feature: MA Experiment 20000479 PARAMETER Experiment Name: Zm_Drought_P Parameter: Organism Value: Zea mays
  misc_feature: MA Experiment 20000479 PARAMETER Experiment Name: Zm_Drought_P Parameter: Plant Line Value: 35A19
  misc_feature: MA Experiment 20000479 PARAMETER Experiment Name: Zm_Drought_P Parameter: Timepoint (hr) Value: 48
  misc_feature: MA Experiment 20000479 PARAMETER Experiment Name: Zm_Drought_P Parameter: Tissue Value: Aerial
  misc_feature: MA Experiment 20000479 PARAMETER Experiment Name: Zm_Drought_P Parameter: Treatment Value: Drought vs. No Drought
  misc_feature: MA Experiment ID: 20000480 Result: Down-regulated in Transcription
  misc_feature: MA Experiment 20000480 PARAMETER Experiment Name: Zm_Drought_P Parameter: Age (day) Value: 11
  misc_feature: MA Experiment 20000480 PARAMETER Experiment Name: Zm_Drought_P Parameter: Organism Value: Zea mays
  misc_feature: MA Experiment 20000480 PARAMETER Experiment Name: Zm_Drought_P Parameter: Plant Line Value: 35A19
  misc_feature: MA Experiment 20000480 PARAMETER Experiment Name: Zm_Drought_P Parameter: Timepoint (hr) Value: 72
  misc_feature: MA Experiment 20000480 PARAMETER Experiment Name: Zm_Drought_P Parameter: Tissue Value: Aerial
  misc_feature: MA Experiment 20000480 PARAMETER Experiment Name: Zm_Drought_P Parameter: Treatment Value: Drought vs. No Drought
gaacctcctccactccagcacgtacaagagctctcgccaaagcctaaatttagctacgacccgcgtagcttctcacgtactcaccacccatggcgaagccaagtagctacggtcttgcgcttcttgcttgcgccgccgtcgccgctgcggtcgccggcggaacgcagttcacggtcggcggcgcccaatggctggagcgtgcccgccgccggcgcggagcccttcaatgcttgggcggagaggacgaggtttcagatcggagacgccctagtgttcgtgtaccccaaggaccaagacgcggtgctgctggtggagccggcgggctacaacgcgtgcaacacgtcgtcgtacgtgaggaagttcgacgacggcgacaccgtggtcgcgctcgacagcgccggcccgctcttcttcatcagtggcgtcgaggccaactgccgcgccgacgagaagctcatcgtcatggtcctcgccgcccgcagcaacggcaccggcgcgccggctccgagcacggcgcccccgcctccggctcccgccagctccgcgccgcccacgccggcgtcgcccgctcctaagggcgcccccccgaccacggcggcgtcgcctccgccgccctcggcctctgctcccgcaacgacaccggccacgccgccgcccgccgcgtcggcggcgccccctgctccgagggcgtcgtcaaccccgccgcctccatctgccccggccggtgccccgccggcgcccgcggcaagctctccggctccgagcgcacatggggcgacggataactccacgggcacgccgtcgtcgcctcccgccggctcctccaaggacaagaacggcgccgccttcacggtggccacaggtttggccagctcgttcggaacctgcatcncttgtacgccatgcttgctctctgaagtgaagtgggccgccgtggaagactccagtaaatatgtgtgtgtttacgtgtaatttaattgagacatgcgatttgtgcatgttattgctagatcttgcattcgttttccgccggatgaataagaaatcaaccattcgttattcct

SEQ ID NO: 11648 - protein, 323 aa, Zea mays subsp. mays
  peptide (1)..(323): Ceres Seq. ID no. 13494391
  misc_feature (65)..(150): Pfam Name: Plastocyanin-like domain Pfam Description: Plastocyanin-like domain
  misc_feature (64)..(223): Homolog of NCBI NO: 18402674 NR Description: plastocyanin-like domain containing protein thaliana] >gi|11994144|dbj|BAB01165.1| contains similarity to
  misc_feature (64)..(209): Homolog of NCBI NO: 21618177 NR Description: unknown [Arabidopsis thaliana]
  misc_feature (63)..(258): Homolog of NCBI NO: 34903678 NR Description: B1015E06.24 [Oryza sativa (japonica
  misc_feature (73)..(272): Homolog of NCBI NO: 15238868 NR Description: hypothetical protein [Arabidopsis thaliana]
  misc_feature (73)..(281): Homolog of NCBI NO: 21592865 NR Description: unknown [Arabidopsis thaliana]
  misc_feature (73)..(272): Homolog of NCBI NO: 28396618 NR Description: phytocyanin protein, PUP2 [Arabidopsis thaliana]
  misc_feature (73)..(281): Homolog of NCBI NO: 15234164 NR Description: expressed protein [Arabidopsis thaliana]
  misc_feature (72)..(272): Homolog of NCBI NO: 34903678 NR Description: B1015E06.24 [Oryza sativa (japonica
  misc_feature (65)..(233): Homolog of NCBI NO: 34908784 NR Description: P0415A04.29 [Oryza sativa (japonica
  misc_feature (63)..(283): Homolog of NCBI NO: 3914142 NR Description: EARLY NODULIN 20 PRECURSOR (N-20)
  misc_feature (298)..(298): Xaa is any aa, unknown or other
EPPPLQHVQELSPKPKFSYDPRSFSRTHHPWRSQVATVLRFLLAPPSPLRSPAERSSRSAAPNGWSVPAAGAEPFNAWAERTRFQIGDALVFVYPKDQDAVLLVEPAGYNACNTSSYVRKFDDGDTVVALDSAGPLFFISGVEANCRADEKLIVMVLAARSNGTGAPAPSTAPPPPAPASSAPPTPASPAPKGAPPTTAASPPPPSASAPATTPATPPPAASAAPPAPRASSTPPPPSAPAGAPPAPAASSPAPSAHGATDNSTGTPSSPPAGSSKDKNGAAFTVATGLASSFGTCIXCTPCLLSEVKWAAVEDSSKYVCVYV

SEQ ID NO: 11649 - protein, 169 aa, Zea mays subsp. mays
  peptide (1)..(169): Ceres Seq. ID no. 13494392
  misc_feature (13)..(117): Pfam Name: Extensin-like region Pfam Description: Extensin-like region
  misc_feature (1)..(104): Homolog of NCBI NO: 34903678 NR Description: B1015E06.24 [Oryza sativa (japonica
  misc_feature (1)..(118): Homolog of NCBI NO: 34903678 NR Description: B1015E06.24 [Oryza sativa (japonica
  misc_feature (1)..(118): Homolog of NCBI NO: 15238868 NR Description: hypothetical protein [Arabidopsis thaliana]
  misc_feature (1)..(127): Homolog of NCBI NO: 15234164 NR Description: expressed protein [Arabidopsis thaliana]
  misc_feature (1)..(127): Homolog of NCBI NO: 21592865 NR Description: unknown [Arabidopsis thaliana]
  misc_feature (1)..(118): Homolog of NCBI NO: 28396618 NR Description: phytocyanin protein, PUP2 [Arabidopsis thaliana]
  misc_feature (1)..(69): Homolog of NCBI NO: 18402674 NR Description: plastocyanin-like domain containing protein thaliana] >gi|11994144|dbj|BAB01165.1| contains similarity to
  misc_feature (1)..(55): Homolog of NCBI NO: 21618177 NR Description: unknown [Arabidopsis thaliana]
  misc_feature (1)..(79): Homolog of NCBI NO: 34908784 NR Description: P0415A04.29 [Oryza sativa (japonica
  misc_feature (1)..(129): Homolog of NCBI NO: 3914142 NR Description: EARLY NODULIN 20 PRECURSOR (N-20)
  misc_feature (144)..(144): Xaa is any aa, unknown or other
MVLAARSNGTGAPAPSTAPPPPAPASSAPPTPASPAPKGAPPTTAASPPPPSASAPATTPATPPPAASAAPPAPRASSTPPPPSAPAGAPPAPAASSPAPSAHGATDNSTGTPSSPPAGSSKDKNGAAFTVATGLASSFGTCIXCTPCLLSEVKWAAVEDSSKYVCVYV

SEQ ID NO: 11650 - protein, 161 aa, Zea mays subsp. mays
  peptide (1)..(161): Ceres Seq. ID no. 13494393
MAKPSSYGLALLACAAVAAAVAGGTQFTVGGAQWLERARRRRGALQCLGGEDEVSDRRRPSVRVPQGPRRGAAGGAGGLQRVQHVVVREEVRRRRHRGRARQRRPALLHQWRRGQLPRRREAHRHGPRRPQQRHRRAGSEHGAPASGSRQLRAAHAGVARS

SEQ ID NO: 11651 - DNA, 1662 bp, Zea mays subsp. mays
  misc_feature (1)..(1662): Ceres Seq. ID no. 12413861
  misc_feature: MA Experiment ID: 108527 Result: Down-regulated in Transcription
  misc_feature: MA Experiment 108527 PARAMETER Experiment Name: Zm_5mM_NO_P Parameter: Age (day) Value: 8
  misc_feature: MA Experiment 108527 PARAMETER Experiment Name: Zm_5mM_NO_P Parameter: Organism Value: Zea mays
  misc_feature: MA Experiment 108527 PARAMETER Experiment Name: Zm_5mM_NO_P Parameter: Plant Line Value: 35A19
  misc_feature: MA Experiment 108527 PARAMETER Experiment Name: Zm_5mM_NO_P Parameter: Timepoint (hr) Value: 6
  misc_feature: MA Experiment 108527 PARAMETER Experiment Name: Zm_5mM_NO_P Parameter: Tissue Value: Aerial
  misc_feature: MA Experiment 108527 PARAMETER Experiment Name: Zm_5mM_NO_P Parameter: Treatment Value: 5mM NO vs. No Treatment
  misc_feature: MA Experiment ID: 108535 Result: Up-regulated in Transcription
  misc_feature: MA Experiment 108535 PARAMETER Experiment Name: Zm_Meristem_P Parameter: Age (day) Value: 8
  misc_feature: MA Experiment 108535 PARAMETER Experiment Name: Zm_Meristem_P Parameter: Organism Value: Zea mays
  misc_feature: MA Experiment 108535 PARAMETER Experiment Name: Zm_Meristem_P Parameter: Plant Line Value: 35A19
  misc_feature: MA Experiment 108535 PARAMETER Experiment Name: Zm_Meristem_P Parameter: Tissue Value: Root Meristem vs. Above Root Meristem
acagtcaactgtgttctagacagttgagttcaaaaaggtgaggcggcgagatcgaatcaagcggagcggagcctacacatggcgatggcgctgcgtcggctgctgcttcctctcctcctcctcgtactcttaggtctgcggccgcagagctgcgtcgccagtggcggaggtggaggggagccggcggagttcgagatacctcgggacgggagcgtgctggagcttgacgagagcaacttcgaggcggcggtgcgcgcagccgaattcctcttcgtcgacttctacgctccctggtgcggccactgcaagcgcctcgccccgcagttagatgaggctgctgcagtgctagctggactgagcacgcccgtccttgtggctaaagtaaatgctgacaaatacaagaagctcggctctaaatatggagtagatgggttccctactttgatgttttttgaccatggagtgccctcggagtacacgggttcaaggaaggctgatgtgctagttgagaaccttaagaagcttgttgcacctgatgtttctgtccttgagtcggactcgtcaattaacggctttgttcaagcagctggcatcaattttccattgtttattgggtttggaatggatgagtcattgattgttgaatatggagcgaagtacaagaagaaggcatggttttcaacagcaaaggatttctctgaggatgtgatggttgtgtatgattttgacaaggttccagcgttggtttctgttaacccaaaatataatgagcagagtgtattctatggcccgtttgaaggaacttttctggaagattttataaggcaatccctactgcctgcaactgtgcccatcaatagagagacagtaaagctattgaaagatgatgggaggaaagttgttcttacaatcttggaggatgaatcagatgaaagctctctgcagctaataaaagtgttgaggtctgccgccaatgcaaaccatgatttagtgttcggatatgtgggagtcaaacagtgggaggagttcaccgagacttttgatgtgaaggtttcgcagctgccaaagattgttgtctgggacacaaaagaggagtacgaagtggttgagggttcagagagtttcatagaaggtgactatggatcccaagtcagtcgatttctagagggatatagggaaggaagaacaacaaagaagaaagtgggccgtggttccccaacactgctcggccttaacgcggtatacatcctcgtcctgttggtcgccgttctcgttgttttgatgtatttttccgcgcaaggcgaggaggatcatcagccaagaagagcccatgaggactgacagcaatctgagatggcttagattcaaggcgttgatccggaggctgccgagttatttttgaaggggggtaacatataacatctgatggacaaattttcctgatcttcatttcacgtgccctagggtcgagttttagatatttgttgcagagctatgcatgagctcccctgtgtttctcttgaacccttgaagtttttggacttgttacttgaggaccgggtttcctcaggtttatgtcattgtaattattcggcactttgtaacatagcattcatgtgttatatttgagacccttggagaaacgacttctatagattgaac

SEQ ID NO: 11652 - protein, 420 aa, Zea mays subsp. mays
  peptide (1)..(420): Ceres Seq. ID no. 12413862
  misc_feature (43)..(303): Pfam Name: Calsequestrin Pfam Description: Calsequestrin
  misc_feature (10)..(417): Homolog of NCBI NO: 38344940 NR Description: OSJNBa0084A10.16 [Oryza sativa (japonica
  misc_feature (43)..(417): Homolog of NCBI NO: 8778373 NR Description: F15O4.20 [Arabidopsis thaliana]
  misc_feature (43)..(417): Homolog of NCBI NO: 18399786 NR Description: protein disulfide isomerase, putative; protein At1g35620.1, supported by cDNA: gi_14423497 [Arabidopsis >gi|14423498|gb|AAK62431.1|AF386986_1 Unknown protein
  misc_feature (39)..(392): Homolog of NCBI NO: 12025459 NR Description: protein disulfide isomerase [Bombyx mori]
  misc_feature (40)..(392): Homolog of NCBI NO: 129731 NR Description: PROTEIN DISULFIDE ISOMERASE PRECURSOR (PDI)
  misc_feature (46)..(392): Homolog of NCBI NO: 202549 NR Description: iodothyronine 5' monodeiodinase
  misc_feature (36)..(382): Homolog of NCBI NO: 27819775 NR Description: RH09122p [Drosophila melanogaster]
  misc_feature (40)..(364): Homolog of NCBI NO: 20913929 NR Description: prolyl 4-hydroxylase, beta polypeptide [Mus
  misc_feature (31)..(364): Homolog of NCBI NO: 27806501 NR Description: procollagen-proline, 2-oxoglutarate 4-dioxygenase
  misc_feature (25)..(364): Homolog of NCBI NO: 30923135 NR Description: Protein disulfide isomerase precursor (PDI)
MAMALRRLLLPLLLLVLLGLRPQSCVASGGGGGEPAEFEIPRDGSVLELDESNFEAAVRAAEFLFVDFYAPWCGHCKRLAPQLDEAAAVLAGLSTPVLVAKVNADKYKKLGSKYGVDGFPTLMFFDHGVPSEYTGSRKADVLVENLKKLVAPDVSVLESDSSINGFVQAAGINFPLFIGFGMDESLIVEYGAKYKKKAWFSTAKDFSEDVMVVYDFDKVPALVSVNPKYNEQSVFYGPFEGTFLEDFIRQSLLPATVPINRETVKLLKDDGRKVVLTILEDESDESSLQLIKVLRSAANANHDLVFGYVGVKQWEEFTETFDVKVSQLPKIVVWDTKEEYEVVEGSESFIEGDYGSQVSRFLEGYREGRTTKKKVGRGSPTLLGLNAVYILVLLVAVLVVLMYFSAQGEEDHQPRRAHED

SEQ ID NO: 11653 - protein, 418 aa, Zea mays subsp. mays
  peptide (1)..(418): Ceres Seq. ID no. 12413863
  misc_feature (41)..(301): Pfam Name: Calsequestrin Pfam Description: Calsequestrin
  misc_feature (8)..(415): Homolog of NCBI NO: 38344940 NR Description: OSJNBa0084A10.16 [Oryza sativa (japonica
  misc_feature (41)..(415): Homolog of NCBI NO: 8778373 NR Description: F15O4.20 [Arabidopsis thaliana]
  misc_feature (41)..(415): Homolog of NCBI NO: 18399786 NR Description: protein disulfide isomerase, putative; protein At1g35620.1, supported by cDNA: gi_14423497 [Arabidopsis >gi|14423498|gb|AAK62431.1|AF386986_1 Unknown protein
  misc_feature (37)..(390): Homolog of NCBI NO: 12025459 NR Description: protein disulfide isomerase [Bombyx mori]
  misc_feature (38)..(390): Homolog of NCBI NO: 129731 NR Description: PROTEIN DISULFIDE ISOMERASE PRECURSOR (PDI)
  misc_feature (44)..(390): Homolog of NCBI NO: 202549 NR Description: iodothyronine 5' monodeiodinase
  misc_feature (34)..(380): Homolog of NCBI NO: 27819775 NR Description: RH09122p [Drosophila melanogaster]
  misc_feature (38)..(362): Homolog of NCBI NO: 20913929 NR Description: prolyl 4-hydroxylase, beta polypeptide [Mus
  misc_feature (29)..(362): Homolog of NCBI NO: 27806501 NR Description: procollagen-proline, 2-oxoglutarate 4-dioxygenase
  misc_feature (23)..(362): Homolog of NCBI NO: 30923135 NR Description: Protein disulfide isomerase precursor (PDI)
MALRRLLLPLLLLVLLGLRPQSCVASGGGGGEPAEFEIPRDGSVLELDESNFEAAVRAAEFLFVDFYAPWCGHCKRLAPQLDEAAAVLAGLSTPVLVAKVNADKYKKLGSKYGVDGFPTLMFFDHGVPSEYTGSRKADVLVENLKKLVAPDVSVLESDSSINGFVQAAGINFPLFIGFGMDESLIVEYGAKYKKKAWFSTAKDFSEDVMVVYDFDKVPALVSVNPKYNEQSVFYGPFEGTFLEDFIRQSLLPATVPINRETVKLLKDDGRKVVLTILEDESDESSLQLIKVLRSAANANHDLVFGYVGVKQWEEFTETFDVKVSQLPKIVVWDTKEEYEVVEGSESFIEGDYGSQVSRFLEGYREGRTTKKKVGRGSPTLLGLNAVYILVLLVAVLVVLMYFSAQGEEDHQPRRAHED

SEQ ID NO: 11654 - protein, 298 aa, Zea mays subsp. mays
  peptide (1)..(298): Ceres Seq. ID no. 12413864
  misc_feature (1)..(181): Pfam Name: Calsequestrin Pfam Description: Calsequestrin
  misc_feature (1)..(295): Homolog of NCBI NO: 38344940 NR Description: OSJNBa0084A10.16 [Oryza sativa (japonica
  misc_feature (1)..(295): Homolog of NCBI NO: 8778373 NR Description: F15O4.20 [Arabidopsis thaliana]
  misc_feature (1)..(295): Homolog of NCBI NO: 18399786 NR Description: protein disulfide isomerase, putative; protein At1g35620.1, supported by cDNA: gi_14423497 [Arabidopsis >gi|14423498|gb|AAK62431.1|AF386986_1 Unknown protein
  misc_feature (1)..(270): Homolog of NCBI NO: 12025459 NR Description: protein disulfide isomerase [Bombyx mori]
  misc_feature (1)..(270): Homolog of NCBI NO: 129731 NR Description: PROTEIN DISULFIDE ISOMERASE PRECURSOR (PDI)
  misc_feature (1)..(270): Homolog of NCBI NO: 202549 NR Description: iodothyronine 5' monodeiodinase
  misc_feature (1)..(260): Homolog of NCBI NO: 27819775 NR Description: RH09122p [Drosophila melanogaster]
  misc_feature (1)..(242): Homolog of NCBI NO: 20913929 NR Description: prolyl 4-hydroxylase, beta polypeptide [Mus
  misc_feature (1)..(242): Homolog of NCBI NO: 27806501 NR Description: procollagen-proline, 2-oxoglutarate 4-dioxygenase
  misc_feature (1)..(242): Homolog of NCBI NO: 30923135 NR Description: Protein disulfide isomerase precursor (PDI)
MFFDHGVPSEYTGSRKADVLVENLKKLVAPDVSVLESDSSINGFVQAAGINFPLFIGFGMDESLIVEYGAKYKKKAWFSTAKDFSEDVMVVYDFDKVPALVSVNPKYNEQSVFYGPFEGTFLEDFIRQSLLPATVPINRETVKLLKDDGRKVVLTILEDESDESSLQLIKVLRSAANANHDLVFGYVGVKQWEEFTETFDVKVSQLPKIVVWDTKEEYEVVEGSESFIEGDYGSQVSRFLEGYREGRTTKKKVGRGSPTLLGLNAVYILVLLVAVLVVLMYFSAQGEEDHQPRRAHED

SEQ ID NO: 11655 - DNA, 1653 bp, Zea mays subsp. mays
  misc_feature (1)..(1653): Ceres Seq. ID no. 13493002
  misc_feature: MA Experiment ID: 108535 Result: Up-regulated in Transcription
  misc_feature: MA Experiment 108535 PARAMETER Experiment Name: Zm_Meristem_P Parameter: Age (day) Value: 8
  misc_feature: MA Experiment 108535 PARAMETER Experiment Name: Zm_Meristem_P Parameter: Organism Value: Zea mays
  misc_feature: MA Experiment 108535 PARAMETER Experiment Name: Zm_Meristem_P Parameter: Plant Line Value: 35A19
  misc_feature: MA Experiment 108535 PARAMETER Experiment Name: Zm_Meristem_P Parameter: Tissue Value: Root Meristem vs. Above Root Meristem
  misc_feature: MA Experiment ID: 108544 Result: Down-regulated in Transcription
  misc_feature: MA Experiment ID: 20000478 Result: Down-regulated in Transcription
  misc_feature: MA Experiment 20000478 PARAMETER Experiment Name: Zm_5mM_SA_P Parameter: Age (day) Value: 11
  misc_feature: MA Experiment 20000478 PARAMETER Experiment Name: Zm_5mM_SA_P Parameter: Organism Value: Zea mays
  misc_feature: MA Experiment 20000478 PARAMETER Experiment Name: Zm_5mM_SA_P Parameter: Plant Line Value: 35A19
  misc_feature: MA Experiment 20000478 PARAMETER Experiment Name: Zm_5mM_SA_P Parameter: Timepoint (hr) Value: 72
  misc_feature: MA Experiment 20000478 PARAMETER Experiment Name: Zm_5mM_SA_P Parameter: Tissue Value: Aerial
  misc_feature: MA Experiment 20000478 PARAMETER Experiment Name: Zm_5mM_SA_P Parameter: Treatment Value: 5mM SA vs. No Treatment
  misc_feature: MA Experiment ID: 20000480 Result: Down-regulated in Transcription
  misc_feature: MA Experiment 20000480 PARAMETER Experiment Name: Zm_Drought_P Parameter: Age (day) Value: 11
  misc_feature: MA Experiment 20000480 PARAMETER Experiment Name: Zm_Drought_P Parameter: Organism Value: Zea mays
  misc_feature: MA Experiment 20000480 PARAMETER Experiment Name: Zm_Drought_P Parameter: Plant Line Value: 35A19
  misc_feature: MA Experiment 20000480 PARAMETER Experiment Name: Zm_Drought_P Parameter: Timepoint (hr) Value: 72
  misc_feature: MA Experiment 20000480 PARAMETER Experiment Name: Zm_Drought_P Parameter: Tissue Value: Aerial
  misc_feature: MA Experiment 20000480 PARAMETER Experiment Name: Zm_Drought_P Parameter: Treatment Value: Drought vs. No Drought
  misc_feature: MA Experiment ID: 20000488 Result: Up-regulated in Transcription
  misc_feature: MA Experiment 20000488 PARAMETER Experiment Name: Zm_50mM_NH4NO3_L_to_H_P Parameter: Organism Value: Zea mays
  misc_feature: MA Experiment 20000488 PARAMETER Experiment Name: Zm_50mM_NH4NO3_L_to_H_P Parameter: Timepoint (hr) Value: 8
  misc_feature: MA Experiment 20000488 PARAMETER Experiment Name: Zm_50mM_NH4NO3_L_to_H_P Parameter: Tissue Value: Leaves
  misc_feature: MA Experiment 20000488 PARAMETER Experiment Name: Zm_50mM_NH4NO3_L_to_H_P Parameter: Treatment Value: 50mM NH4NO3 vs. 100mM Mannitol
actgttcaaacaaaccctccactgccctccccactctccccttcaccgcgccgcactcccaagtcccaacaggcctaaatggcggcggccggaacaattcccggcgccgccgcagccattggcgcttctgtgtcccaacgccaacgtcgcgtcggcgctccttctttcgtagctgcctacgtctccgagggcacccgcctcgtctgccggaggcagctccgtccggctccggtcctcgcttcttccttcatctccctttctcatccagcgaggcggcggttcctctgcgatgctgcggccggagcctcctcaggtcccgctggagaagccaagccccagggatttgcagagagatacccagctcttgtcacaggtttcttcttcttcttgtggtattttctgaatgtaatatttaacatcctcaacaagaagatcttcgactacttcccctatccatattttgtgtcagtgagccatctttttattggagtactatacttccttattggctggagcttcggcatcccaaagcgcgcgccaatcaactcaacacttctgaagcagcttgttccagttgcggtttgccatgccattggccatgtaacaagcactgtgtcatttgctgctgtagctgtgtcatttgcccacactattaaagctctcgagccattcttcaatgcggctgcttcccagtttatccttggacaaccagttccattgacactctggctgtctcttgttccagtggtgattggtgtctcggtagcatccctcactgaactctcatttaattggactggcttcattaatgccatgatctcaaatatttctttcacctaccgaagcatctattctaagaaggctatgactgacatggatagtaccaacttgtatgcatacatatcaataattgctctctttgtctgcatcccccctgcaattattattgaaggacctcaattagtgcagcatggttttaaagatgcaattgccaaagttggattaacaaagttgatttctaatttttttgtggtgggcttattctatcacctttataaccaggttgctacaaacacattggagcgggtagcccctttaacacatgccatcggcaatgtgttgaaacgtgttttcgtcattggcttttccatcatcgcattcggcaacaagatcaccacacagactggaattggcacttccattgctgtttctggtgttgccctctactcatttataaaggctaagattgaggagaaaaagcaaataaagagtgcataaggtgttggctgatgtggatgcggttggtttgtcgctttgatggacctctattctctcggtgaacgaacaaacttgcaagatggataaaatcttgctatctcctagtacatttgattgttattcccagtctggtactgaggtgtgcggttgttgttggctaacttgtttatttgaagcaaatttgagcaatgctcagtggcatggaatttccatttctgttttccttcgctcatttattctgacttgacatggtgctattgtaatcttaagcagtagtgtctctagaatgttttccccaaggagatttcagtaccaaatttgaacaatcctcaaactagaaattttgatttccatgcaccccactcagcaattctg

SEQ ID NO: 11656 - protein, 399 aa, Zea mays subsp. mays
  peptide (1)..(399): Ceres Seq. ID no. 13493003
  misc_feature (1)..(399): Homolog of NCBI NO: 1352200 NR Description: TRIOSE PHOSPHATE/PHOSPHATE TRANSLOCATOR,
  misc_feature (1)..(399): Homolog of NCBI NO: 13195734 NR Description: triose phosphate translocator [Triticum aestivum]
  misc_feature (32)..(399): Homolog of NCBI NO: 13518113 NR Description: triose phosphate/phosphate translocator [Oryza
  misc_feature (7)..(398): Homolog of NCBI NO: 9757731 NR Description: phosphate/triose-phosphate translocator precursor
  misc_feature (7)..(399): Homolog of NCBI NO: 21593093 NR Description: phosphate/triose-phosphate translocator precursor
  misc_feature (35)..(398): Homolog of NCBI NO: 117291 NR Description: TRIOSE PHOSPHATE/PHOSPHATE TRANSLOCATOR,
  misc_feature (7)..(399): Homolog of NCBI NO: 30694881 NR Description: phosphate/triose-phosphate translocator, putative
  misc_feature (11)..(399): Homolog of NCBI NO: 9295273 NR Description: triose phosphate/phosphate translocator precursor
  misc_feature (35)..(399): Homolog of NCBI NO: 117290 NR Description: TRIOSE PHOSPHATE/PHOSPHATE TRANSLOCATOR,
  misc_feature (104)..(399): Homolog of NCBI NO: 30694885 NR Description: phosphate/triose-phosphate translocator, putative
MAAAGTIPGAAAAIGASVSQRQRRVGAPSFVAAYVSEGTRLVCRRQLRPAPVLASSFISLSHPARRRFLCDAAAGASSGPAGEAKPQGFAERYPALVTGFFFFLWYFLNVIFNILNKKIFDYFPYPYFVSVSHLFIGVLYFLIGWSFGIPKRAPINSTLLKQLVPVAVCHAIGHVTSTVSFAAVAVSFAHTIKALEPFFNAAASQFILGQPVPLTLWLSLVPVVIGVSVASLTELSFNWTGFINAMISNISFTYRSIYSKKAMTDMDSTNLYAYISIIALFVCIPPAIIIEGPQLVQHGFKDAIAKVGLTKLISNFFVVGLFYHLYNQVATNTLERVAPLTHAIGNVLKRVFVIGFSIIAFGNKITTQTGIGTSIAVSGVALYSFIKAKIEEKKQIKSA

SEQ ID NO: 11657 - DNA, 1531 bp, Zea mays subsp. mays
  misc_feature (1)..(1531): Ceres Seq. ID no. 12405655
  misc_feature: MA Experiment ID: 108535 Result: Up-regulated in Transcription
  misc_feature: MA Experiment 108535 PARAMETER Experiment Name: Zm_Meristem_P Parameter: Age (day) Value: 8
  misc_feature: MA Experiment 108535 PARAMETER Experiment Name: Zm_Meristem_P Parameter: Organism Value: Zea mays
  misc_feature: MA Experiment 108535 PARAMETER Experiment Name: Zm_Meristem_P Parameter: Plant Line Value: 35A19
  misc_feature: MA Experiment 108535 PARAMETER Experiment Name: Zm_Meristem_P Parameter: Tissue Value: Root Meristem vs. Above Root Meristem
  misc_feature: MA Experiment ID: 108543 Result: Up-regulated in Transcription
  misc_feature: MA Experiment ID: 20000535 Result: Up-regulated in Transcription
  misc_feature: MA Experiment 20000535 PARAMETER Experiment Name: Zm_Hybrid_Seed_Dev_P Parameter: DAP Value: 30 vs. 12
  misc_feature: MA Experiment 20000535 PARAMETER Experiment Name: Zm_Hybrid_Seed_Dev_P Parameter: Organism Value: Zea mays
  misc_feature: MA Experiment 20000535 PARAMETER Experiment Name: Zm_Hybrid_Seed_Dev_P Parameter: Plant Line Value: 35A19
  misc_feature: MA Experiment 20000535 PARAMETER Experiment Name: Zm_Hybrid_Seed_Dev_P Parameter: Tissue Value: Embryo vs. Unfert Floret
attaacggagtcaggcccaggcctaacctcagttcatccgagcagccgaacacgcccgccgccattctacgccctgctgcccaggtcggacggaccctttgccggagacgagcacacgccacagcaggaattatcgggcgtagagcagcgcgaagcgagagatccaatggcggcggcggaggggcagtgggtgctcatggcaacggggcggacgccgactaacattgcggtgatcaagtactgggggaagcgggacgaggcgctcatcctccccatcaacgacagcatcagcgtaacgctcgaccctgaccatctctccgccaccaccactgtcgccgtcagcccctcattcccttccgaccgcatgtggctcaatggcaaggagatctcgctattaggaggaaggtttcagagctgcctcagagaaatcagaaagcgtgctcgtgactttgaggacaaggagaagggcgtcaagatcaagaaagaggactgggacaagttgcatgttcacatagcctcgtacaacaacttccccactgctgctggtttggcctcttcggctgctggccttgcctgtttcgttttcacccttggaaagctgatgaatgtgaaagaagattatggagaactttcttcaatagcaaggcagggatctgggagtgcatgccgcagtatatatggtggttttgtgaaatggtgcatgggagaaaaagatgatggaagtgacagtattgccgtgcagcttgctgacgaaacacactggaatgatcttgtaattattattgcagtggtcagttcaaagcagaaggaaaccagtagcaccagtgggatgcgagatagtgttgaaacaagtcctctcttgcagtacagggcccagacagtggtgccaggtcgggtgttgaaaatggaagaagctatcaagaaccgtgactttgaatcatttgccaaattaacttgtgcagatagcaaccagtttcatgctgtatgcttagacacgagccctcccatcttctatatgaatgacacgtcacaccggataattagccttgtggaaaaatggaaccactcagaaggaaccccacaggtcgcttacaccttcgatgctgggccaaacgctgttctaatcgcccaaaaccgtaaaactgcagcacatttcctccagaagctcctatactatttccctccacaggataatgatttgagcagctatctggttggcgataaatcaattctaggtgacgccggattgcattccatgaaagacgtcgaggctcttccagcacctccagatacgaagataccggatcagaaattcaagggcgatgttagctacttcatctgcagcaggcttggggcaggtccaaaggttgttgttgacgaaggtcaagcactgatcgattcagtcaccggacttccaaaaggcgtgtagttctagatttaggttggaataatggtttaagctggggattaaagacaatggtatcatacaagcaacctgggccggccaataaagatagaacacgttctcgcc

SEQ ID NO: 11658 - protein, 475 aa, Zea mays subsp. mays
  peptide (1)..(475): Ceres Seq. ID no. 12405656
  misc_feature (63)..(473): Homolog of NCBI NO: 16417950 NR Description: mevalonate disphosphate decarboxylase [Hevea
  misc_feature (59)..(473): Homolog of NCBI NO: 18410026 NR Description: DIPHOSPHOMEVALONATE DECARBOXYLASE - like protein;
  misc_feature (59)..(473): Homolog of NCBI NO: 21593243 NR Description: diphosphomevalonate decarboxylase-like protein
  misc_feature (59)..(473): Homolog of NCBI NO: 15224931 NR Description: mevalonate diphosphate decarboxylase; protein id: supported by cDNA: 35493. [Arabidopsis thaliana]
  misc_feature (59)..(473): Homolog of NCBI NO: 11281655 NR Description: diphosphomevalonate decarboxylase (EC 4.1.1.33)
  misc_feature (66)..(473): Homolog of NCBI NO: 21593039 NR Description: mevalonate diphosphate decarboxylase [Arabidopsis
  misc_feature (58)..(473): Homolog of NCBI NO: 20149736 NR Description: mevalonate (diphospho) decarboxylase; decarboxylase [Mus musculus] >gi|14250208|gb|AAH08526.1| Unknown
  misc_feature (58)..(473): Homolog of NCBI NO: 26354448 NR Description: unnamed protein product [Mus musculus]
  misc_feature (61)..(472): Homolog of NCBI NO: 39645379 NR Description: Unknown (protein for IMAGE:5307745) [Silurana
  misc_feature (58)..(473): Homolog of NCBI NO: 23814095 NR Description: Diphosphomevalonate decarboxylase (Mevalonate decarboxylase) (Mevalonate (diphospho)decarboxylase)
LTESGPGLTSVHPSSRTRPPPFYALLPRSDGPFAGDEHTPQQELSGVEQREARDPMAAAEGQWVLMATGRTPTNIAVIKYWGKRDEALILPINDSISVTLDPDHLSATTTVAVSPSFPSDRMWLNGKEISLLGGRFQSCLREIRKRARDFEDKEKGVKIKKEDWDKLHVHIASYNNFPTAAGLASSAAGLACFVFTLGKLMNVKEDYGELSSIARQGSGSACRSIYGGFVKWCMGEKDDGSDSIAVQLADETHWNDLVIIIAVVSSKQKETSSTSGMRDSVETSPLLQYRAQTVVPGRVLKMEEAIKNRDFESFAKLTCADSNQFHAVCLDTSPPIFYMNDTSHRIISLVEKWNHSEGTPQVAYTFDAGPNAVLIAQNRKTAAHFLQKLLYYFPPQDNDLSSYLVGDKSILGDAGLHSMKDVEALPAPPDTKIPDQKFKGDVSYFICSRLGAGPKVVVDEGQALIDSVTGLPKGV

SEQ ID NO: 11659 - protein, 420 aa, Zea mays subsp. mays
  peptide (1)..(420): Ceres Seq. ID no. 12405657
  misc_feature (8)..(418): Homolog of NCBI NO: 16417950 NR Description: mevalonate disphosphate decarboxylase [Hevea
  misc_feature (4)..(418): Homolog of NCBI NO: 18410026 NR Description: DIPHOSPHOMEVALONATE DECARBOXYLASE - like protein;
  misc_feature (4)..(418): Homolog of NCBI NO: 21593243 NR Description: diphosphomevalonate decarboxylase-like protein
  misc_feature (4)..(418): Homolog of NCBI NO: 15224931 NR Description: mevalonate diphosphate decarboxylase; protein id: supported by cDNA: 35493. [Arabidopsis thaliana]
  misc_feature (4)..(418): Homolog of NCBI NO: 11281655 NR Description: diphosphomevalonate decarboxylase (EC 4.1.1.33)
  misc_feature (11)..(418): Homolog of NCBI NO: 21593039 NR Description: mevalonate diphosphate decarboxylase [Arabidopsis
  misc_feature (3)..(418): Homolog of NCBI NO: 20149736 NR Description: mevalonate (diphospho) decarboxylase; decarboxylase [Mus musculus] >gi|14250208|gb|AAH08526.1| Unknown
  misc_feature (3)..(418): Homolog of NCBI NO: 26354448 NR Description: unnamed protein product [Mus musculus]
  misc_feature (6)..(417): Homolog of NCBI NO: 39645379 NR Description: Unknown (protein for IMAGE:5307745) [Silurana
  misc_feature (3)..(418): Homolog of NCBI NO: 23814095 NR Description: Diphosphomevalonate decarboxylase (Mevalonate decarboxylase) (Mevalonate (diphospho)decarboxylase)
MAAAEGQWVLMATGRTPTNIAVIKYWGKRDEALILPINDSISVTLDPDHLSATTTVAVSPSFPSDRMWLNGKEISLLGGRFQSCLREIRKRARDFEDKEKGVKIKKEDWDKLHVHIASYNNFPTAAGLASSAAGLACFVFTLGKLMNVKEDYGELSSIARQGSGSACRSIYGGFVKWCMGEKDDGSDSIAVQLADETHWNDLVIIIAVVSSKQKETSSTSGMRDSVETSPLLQYRAQTVVPGRVLKMEEAIKNRDFESFAKLTCADSNQFHAVCLDTSPPIFYMNDTSHRIISLVEKWNHSEGTPQVAYTFDAGPNAVLIAQNRKTAAHFLQKLLYYFPPQDNDLSSYLVGDKSILGDAGLHSMKDVEALPAPPDTKIPDQKFKGDVSYFICSRLGAGPKVVVDEGQALIDSVTGLPKGV

SEQ ID NO: 11660 - protein, 410 aa, Zea mays subsp. mays
  peptide (1)..(410): Ceres Seq. ID no. 12405658
  misc_feature (1)..(408): Homolog of NCBI NO: 16417950 NR Description: mevalonate disphosphate decarboxylase [Hevea
  misc_feature (1)..(408): Homolog of NCBI NO: 18410026 NR Description: DIPHOSPHOMEVALONATE DECARBOXYLASE - like protein;
  misc_feature (1)..(408): Homolog of NCBI NO: 21593243 NR Description: diphosphomevalonate decarboxylase-like protein
  misc_feature (1)..(408): Homolog of NCBI NO: 15224931 NR Description: mevalonate diphosphate decarboxylase; protein id: supported by cDNA: 35493. [Arabidopsis thaliana]
  misc_feature (1)..(408): Homolog of NCBI NO: 11281655 NR Description: diphosphomevalonate decarboxylase (EC 4.1.1.33)
  misc_feature (1)..(408): Homolog of NCBI NO: 21593039 NR Description: mevalonate diphosphate decarboxylase [Arabidopsis
  misc_feature (1)..(408): Homolog of NCBI NO: 20149736 NR Description: mevalonate (diphospho) decarboxylase; decarboxylase [Mus musculus] >gi|14250208|gb|AAH08526.1| Unknown
  misc_feature (1)..(408): Homolog of NCBI NO: 26354448 NR Description: unnamed protein product [Mus musculus]
  misc_feature (1)..(407): Homolog of NCBI NO: 39645379 NR Description: Unknown (protein for IMAGE:5307745) [Silurana
  misc_feature (1)..(408): Homolog of NCBI NO: 23814095 NR Description: Diphosphomevalonate decarboxylase (Mevalonate decarboxylase) (Mevalonate (diphospho)decarboxylase)
MATGRTPTNIAVIKYWGKRDEALILPINDSISVTLDPDHLSATTTVAVSPSFPSDRMWLNGKEISLLGGRFQSCLREIRKRARDFEDKEKGVKIKKEDWDKLHVHIASYNNFPTAAGLASSAAGLACFVFTLGKLMNVKEDYGELSSIARQGSGSACRSIYGGFVKWCMGEKDDGSDSIAVQLADETHWNDLVIIIAVVSSKQKETSSTSGMRDSVETSPLLQYRAQTVVPGRVLKMEEAIKNRDFESFAKLTCADSNQFHAVCLDTSPPIFYMNDTSHRIISLVEKWNHSEGTPQVAYTFDAGPNAVLIAQNRKTAAHFLQKLLYYFPPQDNDLSSYLVGDKSILGDAGLHSMKDVEALPAPPDTKIPDQKFKGDVSYFICSRLGAGPKVVVDEGQALIDSVTGLPKGV

SEQ ID NO: 11661 - DNA, 1523 bp, Zea mays subsp. mays
  misc_feature (1)..(1523): Ceres Seq. ID no. 12381293
  misc_feature: MA Experiment ID: 108529 Result: Down-regulated in Transcription
  misc_feature: MA Experiment 108529 PARAMETER Experiment Name: Zm_Imbibed_Seeds_P Parameter: Age (day) Value: 5 vs. 2
  misc_feature: MA Experiment 108529 PARAMETER Experiment Name: Zm_Imbibed_Seeds_P Parameter: Organism Value: Zea mays
  misc_feature: MA Experiment 108529 PARAMETER Experiment Name: Zm_Imbibed_Seeds_P Parameter: Plant Line Value: 35A19
  misc_feature: MA Experiment 108529 PARAMETER Experiment Name: Zm_Imbibed_Seeds_P Parameter: Tissue Value: Roots vs. Embryo
  misc_feature: MA Experiment ID: 108546 Result: Down-regulated in Transcription
  misc_feature: MA Experiment 108546 PARAMETER Experiment Name: Zm_Imbibed_Seeds_P Parameter: Age (day) Value: 3 vs. 2
  misc_feature: MA Experiment 108546 PARAMETER Experiment Name: Zm_Imbibed_Seeds_P Parameter: Organism Value: Zea mays
  misc_feature: MA Experiment 108546 PARAMETER Experiment Name: Zm_Imbibed_Seeds_P Parameter: Plant Line Value: 35A19
  misc_feature: MA Experiment 108546 PARAMETER Experiment Name: Zm_Imbibed_Seeds_P Parameter: Tissue Value: Roots vs. Embryo
atcgtggcctcatctcgcgctcaagctgctccccgtagtcccattgagaccaacggcagcgcgcgcgttcgtgtacgtttatattatttttttataagggagcaagagggctcggcggcagcggcgacggcgaccgcgacggcagtggcagtggcagtggcaggctgtcagccgtccctatcttgtgtgtcaagcgcgaactccctatctcgtgtgtcaagcgcgttcgcgtgcgttctaggcacaggcagccgaggcgagccccttccgctcagtggccgccgccggaccgtggacgcagctagcccatcagcccatggcagggacggacgtcgcaggctccgcacgcggctccgatgccgcgctcgggaagacgggcgaaccacccgccgcggcgcgctctggcgcagccaagaaggtggctctcgctctgctagcctccttctcggcgctgctgtacagccagattcagccgccgccgtctaagatccccggcatgccgggcgggcctccggtcacggcgcccagaacaaggctcaaggacggccggcacttggcgtacctggaatctggcgtcccaaaggagaaggccaagtacaagatcatattcgttcacggcttcgactgctgtagatacgacgtgctgaatgtctcccaggggctgttggaagagctgggaatctacctgttgtccttcgaccggccccgggtacgccgagagcgacgcccacccggcccggacagagaagagcatcgcccttgacatcgcggagctggcggacaatctccagctcggccccaagttccatctcatcggcttctccatgggcggcgagatcatgtggagctgcctcaagtacatcccgcacaggctcgccggcgtggcgattcttgccccggtgggcaactactggtggtccggcttcccgccggacgtgttcaaggaggcgtggcgcgtgcagtttccgcaagaccagcgcgcggtctgggtcgctcaccacctgccgtggctgacgcactggtggaacacccagaagctgttccgcggatccagcgtcaaggacggcgaccctgccatgctatccaaggaggacaggcttgtagctgacaagttcgagaagcgaacctatgagaagcaggtcagacagcagggagagcacgactcgctccaccgcgacatgatggtcggtttcgggaagtgggactggagcccgctggagatggagaacccgttcgccggcggcctagacgaggtgaaggtgcacctgtggcacggcgtcgaggacctctacgtgccggttcaactgtcgcggtacatcagcgagaggctcccatgggtcatctaccatgagctcccgacggccggccacctcttcccggtcgccgacggcatgcccgacgctatcgtcaggtcgcttctgctcggagatgagtgatcagtatttaggatgcgcggatccaggacttgtgcactttttgcagcttcatcagtaataaaaatacactcggaggtcgagatctgt

SEQ ID NO: 11662 - protein, 262 aa, Zea mays subsp. mays
  peptide (1)..(262): Ceres Seq. ID no. 12381294
  misc_feature (20)..(256): Pfam Name: alpha/beta hydrolase fold Pfam Description: alpha/beta hydrolase fold
  misc_feature (20)..(262): Homolog of NCBI NO: 38346334 NR Description: OSJNBa0073L04.5 [Oryza sativa (japonica
  misc_feature (20)..(261): Homolog of NCBI NO: 18404095 NR Description: expressed protein; protein id: At2g36290.1, by cDNA: 5167. [Arabidopsis thaliana] >gi|25408458|pir||H84778
  misc_feature (20)..(261): Homolog of NCBI NO: 28416665 NR Description: At2g36290 [Arabidopsis thaliana]
  misc_feature (20)..(262): Homolog of NCBI NO: 18410575 NR Description: expressed protein; protein id: At1g74280.1, by cDNA: 119889. [Arabidopsis thaliana] >gi|25406331|pir||C96771
  misc_feature (20)..(262): Homolog of NCBI NO: 21537089 NR Description: unknown [Arabidopsis thaliana]
  misc_feature (20)..(262): Homolog of NCBI NO: 15228377 NR Description: putative protein; protein id: At3g48410.1, by cDNA: gi_17529095 [Arabidopsis thaliana]
  misc_feature (20)..(258): Homolog of NCBI NO: 21592662 NR Description: unknown [Arabidopsis thaliana]
  misc_feature (20)..(258): Homolog of NCBI NO: 18410582 NR Description: expressed protein; protein id: At1g74300.1, by cDNA: 31039. [Arabidopsis thaliana] >gi|25406334|pir||E96771
  misc_feature (20)..(261): Homolog of NCBI NO: 15221193 NR Description: unknown protein; protein id: At1g74290.1
  misc_feature (21)..(262): Homolog of NCBI NO: 34908462 NR Description: P0683F02.22 [Oryza sativa (japonica
MSPRGCWKSWESTCCPSTGPGYAESDAHPARTEKSIALDIAELADNLQLGPKFHLIGFSMGGEIMWSCLKYIPHRLAGVAILAPVGNYWWSGFPPDVFKEAWRVQFPQDQRAVWVAHHLPWLTHWWNTQKLFRGSSVKDGDPAMLSKEDRLVADKFEKRTYEKQVRQQGEHDSLHRDMMVGFGKWDWSPLEMENPFAGGLDEVKVHLWHGVEDLYVPVQLSRYISERLPWVIYHELPTAGHLFPVADGMPDAIVRSLLLGDE

SEQ ID NO: 11663 - protein, 203 aa, Zea mays subsp. mays; identical to SEQ ID NO: 2392
  peptide (1)..(203): Ceres Seq. ID no. 12381295
  misc_feature (1)..(197): Pfam Name: alpha/beta hydrolase fold Pfam Description: alpha/beta hydrolase fold
  misc_feature (1)..(203): Homolog of NCBI NO: 38346334 NR Description: OSJNBa0073L04.5 [Oryza sativa (japonica
  misc_feature (1)..(202): Homolog of NCBI NO: 18404095 NR Description: expressed protein; protein id: At2g36290.1, by cDNA: 5167. [Arabidopsis thaliana] >gi|25408458|pir||H84778
  misc_feature (1)..(202): Homolog of NCBI NO: 28416665 NR Description: At2g36290 [Arabidopsis thaliana]
  misc_feature (1)..(203): Homolog of NCBI NO: 18410575 NR Description: expressed protein; protein id: At1g74280.1, by cDNA: 119889. [Arabidopsis thaliana] >gi|25406331|pir||C96771
  misc_feature (1)..(203): Homolog of NCBI NO: 21537089 NR Description: unknown [Arabidopsis thaliana]
  misc_feature (1)..(203): Homolog of NCBI NO: 15228377 NR Description: putative protein; protein id: At3g48410.1, by cDNA: gi_17529095 [Arabidopsis thaliana]
  misc_feature (1)..(199): Homolog of NCBI NO: 21592662 NR Description: unknown [Arabidopsis thaliana]
  misc_feature (1)..(199): Homolog of NCBI NO: 18410582 NR Description: expressed protein; protein id: At1g74300.1, by cDNA: 31039. [Arabidopsis thaliana] >gi|25406334|pir||E96771
  misc_feature (1)..(202): Homolog of NCBI NO: 15221193 NR Description: unknown protein; protein id: At1g74290.1
  misc_feature (1)..(203): Homolog of NCBI NO: 34908462 NR Description: P0683F02.22 [Oryza sativa (japonica

SEQ ID NO: 11664 - protein, 198 aa, Zea mays subsp. mays
  peptide (1)..(198): Ceres Seq. ID no. 12381296
  misc_feature (1)..(192): Pfam Name: alpha/beta hydrolase fold Pfam Description: alpha/beta hydrolase fold
  misc_feature (1)..(198): Homolog of NCBI NO: 38346334 NR Description: OSJNBa0073L04.5 [Oryza sativa (japonica
  misc_feature (1)..(197): Homolog of NCBI NO: 18404095 NR Description: expressed protein; protein id: At2g36290.1, by cDNA: 5167. [Arabidopsis thaliana] >gi|25408458|pir||H84778
  misc_feature (1)..(197): Homolog of NCBI NO: 28416665 NR Description: At2g36290 [Arabidopsis thaliana]
  misc_feature (1)..(198): Homolog of NCBI NO: 18410575 NR Description: expressed protein; protein id: At1g74280.1, by cDNA: 119889. [Arabidopsis thaliana] >gi|25406331|pir||C96771
  misc_feature (1)..(198): Homolog of NCBI NO: 21537089 NR Description: unknown [Arabidopsis thaliana]
  misc_feature (1)..(198): Homolog of NCBI NO: 15228377 NR Description: putative protein; protein id: At3g48410.1, by cDNA: gi_17529095 [Arabidopsis thaliana]
  misc_feature (1)..(194): Homolog of NCBI NO: 21592662 NR Description: unknown [Arabidopsis thaliana]
  misc_feature (1)..(194): Homolog of NCBI NO: 18410582 NR Description: expressed protein; protein id: At1g74300.1, by cDNA: 31039. [Arabidopsis thaliana] >gi|25406334|pir||E96771
  misc_feature (1)..(197): Homolog of NCBI NO: 15221193 NR Description: unknown protein; protein id: At1g74290.1
  misc_feature (1)..(198): Homolog of NCBI NO: 34908462 NR Description: P0683F02.22 [Oryza sativa (japonica
MWSCLKYIPHRLAGVAILAPVGNYWWSGFPPDVFKEAWRVQFPQDQRAVWVAHHLPWLTHWWNTQKLFRGSSVKDGDPAMLSKEDRLVADKFEKRTYEKQVRQQGEHDSLHRDMMVGFGKWDWSPLEMENPFAGGLDEVKVHLWHGVEDLYVPVQLSRYISERLPWVIYHELPTAGHLFPVADGMPDAIVRSLLLGDE

SEQ ID NO: 11665 - DNA, 1505 bp, Zea mays subsp. mays
  misc_feature (1)..(1505): Ceres Seq. ID no. 12381259
  misc_feature: MA Experiment ID: 108504 Result: Up-regulated in Transcription
  misc_feature: MA Experiment 108504 PARAMETER Experiment Name: Zm_Drought_P Parameter: Age (day) Value: 8
  misc_feature: MA Experiment 108504 PARAMETER Experiment Name: Zm_Drought_P Parameter: Organism Value: Zea mays
  misc_feature: MA Experiment 108504 PARAMETER Experiment Name: Zm_Drought_P Parameter: Plant Line Value: 35A19
  misc_feature: MA Experiment 108504 PARAMETER Experiment Name: Zm_Drought_P Parameter: Timepoint (hr) Value: 12
  misc_feature: MA Experiment 108504 PARAMETER Experiment Name: Zm_Drought_P Parameter: Tissue Value: Aerial
  misc_feature: MA Experiment 108504 PARAMETER Experiment Name: Zm_Drought_P Parameter: Treatment Value: Drought vs. No Drought
  misc_feature: MA Experiment ID: 108534 Result: Up-regulated in Transcription
  misc_feature: MA Experiment 108534 PARAMETER Experiment Name: Zm_4deg_Cold_P Parameter: Age (hr) Value: 8
  misc_feature: MA Experiment 108534 PARAMETER Experiment Name: Zm_4deg_Cold_P Parameter: Organism Value: Zea mays
  misc_feature: MA Experiment 108534 PARAMETER Experiment Name: Zm_4deg_Cold_P Parameter: Plant Line Value: 35A19
  misc_feature: MA Experiment 108534 PARAMETER Experiment Name: Zm_4deg_Cold_P Parameter: Temperature (deg C) Value: 4 vs. 22
  misc_feature: MA Experiment 108534 PARAMETER Experiment Name: Zm_4deg_Cold_P Parameter: Timepoint (hr) Value: 6
  misc_feature: MA Experiment 108534 PARAMETER Experiment Name: Zm_4deg_Cold_P Parameter: Tissue Value: Aerial
  misc_feature: MA Experiment ID: 108540 Result: Up-regulated in Transcription
  misc_feature: MA Experiment 108540 PARAMETER Experiment Name: Zm_20percent_PEG_P Parameter: Age (day) Value: 8
  misc_feature: MA Experiment 108540 PARAMETER Experiment Name: Zm_20percent_PEG_P Parameter: Organism Value: Zea mays
  misc_feature: MA Experiment 108540 PARAMETER Experiment Name: Zm_20percent_PEG_P Parameter: Plant Line Value: 35A19
  misc_feature: MA Experiment 108540 PARAMETER Experiment Name: Zm_20percent_PEG_P Parameter: Timepoint (hr) Value: 6
  misc_feature: MA Experiment 108540 PARAMETER Experiment Name: Zm_20percent_PEG_P Parameter: Tissue Value: Aerial
  misc_feature: MA Experiment 108540 PARAMETER Experiment Name: Zm_20percent_PEG_P Parameter: Treatment Value: 20percent PEG vs. No Treatment
  misc_feature: MA Experiment ID: 108543 Result: Up-regulated in Transcription
  misc_feature: MA Experiment ID: 108556 Result: Up-regulated in Transcription
  misc_feature: MA Experiment 108556 PARAMETER Experiment Name: Zm_Drought_P Parameter: Age (day) Value: 9
  misc_feature: MA Experiment 108556 PARAMETER Experiment Name: Zm_Drought_P Parameter: Organism Value: Zea mays
  misc_feature: MA Experiment 108556 PARAMETER Experiment Name: Zm_Drought_P Parameter: Plant Line Value: 35A19
  misc_feature: MA Experiment 108556 PARAMETER Experiment Name: Zm_Drought_P Parameter: Timepoint (hr) Value: 24
  misc_feature: MA Experiment 108556 PARAMETER Experiment Name: Zm_Drought_P Parameter: Tissue Value: Aerial
  misc_feature: MA Experiment 108556 PARAMETER Experiment Name: Zm_Drought_P Parameter: Treatment Value: Drought vs. No Drought
  misc_feature: MA Experiment ID: 108689 Result: Up-regulated in Transcription
  misc_feature: MA Experiment 108689 PARAMETER Experiment Name: Zm_Drought_Roots_P Parameter: Age (day) Value: 9
  misc_feature: MA Experiment 108689 PARAMETER Experiment Name: Zm_Drought_Roots_P Parameter: Organism Value: Zea mays
  misc_feature: MA Experiment 108689 PARAMETER Experiment Name: Zm_Drought_Roots_P Parameter: Plant Line Value: 35A19
  misc_feature: MA Experiment 108689 PARAMETER Experiment Name: Zm_Drought_Roots_P Parameter: Timepoint (hr) Value: 24
  misc_feature: MA Experiment 108689 PARAMETER Experiment Name: Zm_Drought_Roots_P Parameter: Tissue Value: Roots
  misc_feature: MA Experiment 108689 PARAMETER Experiment Name: Zm_Drought_Roots_P Parameter: Treatment Value: Drought vs. No Drought
  misc_feature: MA Experiment ID: 20000492 Result: Down-regulated in Transcription
  misc_feature: MA Experiment 20000492 PARAMETER Experiment Name: Zm_Hybrid_Seed_Dev_P Parameter: DAP Value: 12
  misc_feature: MA Experiment 20000492 PARAMETER Experiment Name: Zm_Hybrid_Seed_Dev_P Parameter: Organism Value: Zea mays
  misc_feature: MA Experiment 20000492 PARAMETER Experiment Name: Zm_Hybrid_Seed_Dev_P Parameter: Plant Line Value: 35A19
  misc_feature: MA Experiment 20000492 PARAMETER Experiment Name: Zm_Hybrid_Seed_Dev_P Parameter: Tissue Value: Fert Kernel vs. Unfert Floret
  misc_feature: MA Experiment ID: 20000535 Result: Down-regulated in Transcription
  misc_feature: MA Experiment 20000535 PARAMETER Experiment Name: Zm_Hybrid_Seed_Dev_P Parameter: DAP Value: 30 vs. 12
  misc_feature: MA Experiment 20000535 PARAMETER Experiment Name: Zm_Hybrid_Seed_Dev_P Parameter: Organism Value: Zea mays
  misc_feature: MA Experiment 20000535 PARAMETER Experiment Name: Zm_Hybrid_Seed_Dev_P Parameter: Plant Line Value: 35A19
  misc_feature: MA Experiment 20000535 PARAMETER Experiment Name: Zm_Hybrid_Seed_Dev_P Parameter: Tissue Value: Embryo vs. Unfert Floret
  misc_feature: MA Experiment ID: 20000626 Result: Down-regulated in Transcription
  misc_feature: MA Experiment 20000626 PARAMETER Experiment Name: Zm_Herbicide-Treatments_P Parameter: Timepoint (hr) Value: 12
  misc_feature: MA Experiment 20000626 PARAMETER Experiment Name: Zm_Herbicide-Treatments_P Parameter: Tissue Value: Aerial
  misc_feature: MA Experiment 20000626 PARAMETER Experiment Name: Zm_Herbicide-Treatments_P Parameter: Treatment Value: Roundup vs. No Treatment
  misc_feature: MA Experiment ID: 20000629 Result: Down-regulated in Transcription
  misc_feature: MA Experiment 20000629 PARAMETER Experiment Name: Zm_Herbicide-Treatments_P Parameter: Timepoint (hr) Value: 12
  misc_feature: MA Experiment 20000629 PARAMETER Experiment Name: Zm_Herbicide-Treatments_P Parameter: Tissue Value: Aerial
  misc_feature: MA Experiment 20000629 PARAMETER Experiment Name: Zm_Herbicide-Treatments_P Parameter: Treatment Value: Trimec vs. No Treatment
atctctctctctctctcttcctgcgcccacacgcacgtttccactccgaccgggccagagccccgccgggcagtttccgttcgctgttgcgatccacctcctgcctgcacatcccctcccccgagttcgagccggagggccgaatagtagatctgcggcggcggcggccagaggatggccgtcaactgggagctgcggggctgctgcgaccacgaccagaggatcttcatcgccgccgtcggcgtctccaccgtcgtcatcctcctcctctggaggacgttcctgctcacgccgttcaagctcatcaccgtcttcctccacgagaccagccacgcgcttgcctgcaagctcacttgcggcgatgtagaaggcatgcaggtccatgcgaatgagggtggcgttactcaaacccggggtggcatatattggataatcttgccccgctggatatctgggttcatcattttggggaatggtcttcatacttgcatccacaaatctccttactacaagaattgcagcgggttgtttcatacttgcgttgtttattgttctttttgttgcagaaaattggtttcttcgctggctctgccttggattcattgtgttcattgctgttgtttgggtcatacaagaatttacatctttccatattctgaaatatgtgatcttattcataggtgagacggaagatgtcgtacaatcatgtcctctttattttaatttctggaatgcaaattgtatgcttgaaatttaatctttatgtttatttatgtgcaacaggtgtgatgaacagcttattttcagtttacggtaaagaaaccaaaaaaaaaacatttttcttgttattccatgttagaataatccatgtgttactctcaatgaaatattctcaaattatatagatatttatgatgacttgatatcccgaagagttaacacaagtgatgctgaaaagtttgctgaaatctgcccttgcccctgcaatggttttgcatggggtgttatatggtctgctccaagtttcgatagttatatttttctgtataccttgatggtgtgttaagatattcctgatgtaacgacaccaatggtaacgttttctgttctttgtttcaggggattcatctcgtttatctttctctgcgcttcaatataccttggactggtcatattgtcttgagggttcgccattttgatctgacaatctactctgattggctttttcgaagcttcgttgctcgaggttttggttcaagcttacatggttctggtggttgtacagtatacatgtgcagggtaaacatgtacatccattataagttaatttgttggggattattcatgggattcttcgattttagtggttctatagagtaccattttacttaccattaccagttgcatttatggtctgtagcctcttcaatttatgtacctgtatatcatatattgctcatttatccatttcaaaatgtattcagagatgcaatattgtgcatctt

SEQ ID NO: 11666 - protein, 169 aa, Zea mays subsp. mays
  peptide (1)..(169): Ceres Seq. ID no. 12381260
  misc_feature (4)..(102): Homolog of NCBI NO: 15219816 NR Description: hypothetical protein; protein id: At1g67060.1
  misc_feature (1)..(99): Homolog of NCBI NO: 23619420 NR Description: hypothetical protein, conserved [Plasmodium
  misc_feature (4)..(64): Homolog of NCBI NO: 26449599 NR Description: unknown protein [Arabidopsis thaliana]
MAVNWELRGCCDHDQRIFIAAVGVSTVVILLLWRTFLLTPFKLITVFLHETSHALACKLTCGDVEGMQVHANEGGVTQTRGGIYWIILPRWISGFIILGNGLHTCIHKSPYYKNCSGLFHTCVVYCSFCCRKLVSSLALPWIHCVHCCCLGHTRIYIFPYSEICDLIHR

SEQ ID NO: 11667 - protein, 129 aa, Zea mays subsp. mays
  peptide (1)..(129): Ceres Seq. ID no. 12381261
LSLSLFLRPHARFHSDRARAPPGSFRSLLRSTSCLHIPSPEFEPEGRIVDLRRRRPEDGRQLGAAGLLRPRPEDLHRRRRRLHRRHPPPLEDVPAHAVQAHHRLPPRDQPRACLQAHLRRCRRHAGPCE

SEQ ID NO: 11668 - protein, 121 aa, Zea mays subsp. mays
  peptide (1)..(121): Ceres Seq. ID no. 12381262
  misc_feature (61)..(120): Pfam Name: Lipoprotein amino terminal region Pfam Description: Lipoprotein amino terminal region
SLSLSLPAPTRTFPLRPGQSPAGQFPFAVAIHLLPAHPLPRVRAGGPNSRSAAAAARGWPSTGSCGAAATTTRGSSSPPSASPPSSSSSSGGRSCSRRSSSSPSSSTRPATRLPASSLAAM

SEQ ID NO: 11669 - DNA, 1976 bp, Zea mays subsp. mays
  misc_feature (1)..(1976): Ceres Seq. ID no. 12358191
  misc_feature: MA Experiment ID: 108527 Result: Down-regulated in Transcription
  misc_feature: MA Experiment 108527 PARAMETER Experiment Name: Zm_5mM_NO_P Parameter: Age (day) Value: 8
  misc_feature: MA Experiment 108527 PARAMETER Experiment Name: Zm_5mM_NO_P Parameter: Organism Value: Zea mays
  misc_feature: MA Experiment 108527 PARAMETER Experiment Name: Zm_5mM_NO_P Parameter: Plant Line Value: 35A19
  misc_feature: MA Experiment 108527 PARAMETER Experiment Name: Zm_5mM_NO_P Parameter: Timepoint (hr) Value: 6
  misc_feature: MA Experiment 108527 PARAMETER Experiment Name: Zm_5mM_NO_P Parameter: Tissue Value: Aerial
  misc_feature: MA Experiment 108527 PARAMETER Experiment Name: Zm_5mM_NO_P Parameter: Treatment Value: 5mM NO vs. No Treatment
  misc_feature: MA Experiment ID: 108528 Result: Up-regulated in Transcription
  misc_feature: MA Experiment 108528 PARAMETER Experiment Name: Zm_Imbibed_Seeds_P Parameter: Age (day) Value: 5 vs. 2
  misc_feature: MA Experiment 108528 PARAMETER Experiment Name: Zm_Imbibed_Seeds_P Parameter: Organism Value: Zea mays
  misc_feature: MA Experiment 108528 PARAMETER Experiment Name: Zm_Imbibed_Seeds_P Parameter: Plant Line Value: 35A19
  misc_feature: MA Experiment 108528 PARAMETER Experiment Name: Zm_Imbibed_Seeds_P Parameter: Tissue Value: Aerial vs. Embryo
  misc_feature: MA Experiment ID: 108534 Result: Up-regulated in Transcription
  misc_feature: MA Experiment 108534 PARAMETER Experiment Name: Zm_4deg_Cold_P Parameter: Age (hr) Value: 8
  misc_feature: MA Experiment 108534 PARAMETER Experiment Name: Zm_4deg_Cold_P Parameter: Organism Value: Zea mays
  misc_feature: MA Experiment 108534 PARAMETER Experiment Name: Zm_4deg_Cold_P Parameter: Plant Line Value: 35A19
  misc_feature: MA Experiment 108534 PARAMETER Experiment Name: Zm_4deg_Cold_P Parameter: Temperature (deg C) Value: 4 vs. 22
  misc_feature: MA Experiment 108534 PARAMETER Experiment Name: Zm_4deg_Cold_P Parameter: Timepoint (hr) Value: 6
  misc_feature: MA Experiment 108534 PARAMETER Experiment Name: Zm_4deg_Cold_P Parameter: Tissue Value: Aerial
  misc_feature: MA Experiment ID: 108546 Result: Down-regulated in Transcription
  misc_feature: MA Experiment 108546 PARAMETER Experiment Name: Zm_Imbibed_Seeds_P Parameter: Age (day) Value: 3 vs. 2
  misc_feature: MA Experiment 108546 PARAMETER Experiment Name: Zm_Imbibed_Seeds_P Parameter: Organism Value: Zea mays
  misc_feature: MA Experiment 108546 PARAMETER Experiment Name: Zm_Imbibed_Seeds_P Parameter: Plant Line Value: 35A19
  misc_feature: MA Experiment 108546 PARAMETER Experiment Name: Zm_Imbibed_Seeds_P Parameter: Tissue Value: Roots vs. Embryo
  misc_feature: MA Experiment ID: 108547 Result: Up-regulated in Transcription
  misc_feature: MA Experiment 108547 PARAMETER Experiment Name: Zm_Imbibed_Seeds_P Parameter: Age (day) Value: 4 vs. 2
  misc_feature: MA Experiment 108547 PARAMETER Experiment Name: Zm_Imbibed_Seeds_P Parameter: Organism Value: Zea mays
  misc_feature: MA Experiment 108547 PARAMETER Experiment Name: Zm_Imbibed_Seeds_P Parameter: Plant Line Value: 35A19
  misc_feature: MA Experiment 108547 PARAMETER Experiment Name: Zm_Imbibed_Seeds_P Parameter: Tissue Value: Aerial vs. Embryo
  misc_feature: MA Experiment ID: 108687 Result: Down-regulated in Transcription
  misc_feature: MA Experiment 108687 PARAMETER Experiment Name: Zm_Embryos-Flowers__P Parameter: Tissue Value: Embryo vs. Aerial+
tgcgggatccaaatgaacatttaaatttgttaattatttttttgttctatgatcctattcatagttcactatgctcaagtaattttgaggctgcaagttatggacacatgttaccatatatccaaggaggaacataaatatcaatctttttcaatgtgatagtggtttgaaaccattgcatttgtacttttaccgtgagagtccatagcttttgtgataaacatgttttcagaagcctggccaagaaaagttgatattattctagtattctagcaggactgtgctagcagtattctaggctattgcagatttctgactaaaacattaggtgtatatccttagatattcacattgaatacaggtaaatcacatttgatgcaggagatggattatagagaagaagcaagaaatggacttaagttcagagaattgtttgggaaatttagagatgtgtcggttcctgaaatgtatctggaacagacaagaaggcgagtccttatcatggaatggatcgagggggaaaagttatcagaagtcagagatcaatatttggttgaggttggagtatattgttcactttcacagctattagaatatggattctatcatgcagatccacaccctggaaatcttttgcgtacagttgatgggaaattagcctacttagattttgggatgatgggagaattccgacaagaacttcgtgatggatttattgaagcttgtcttcatcttgttaaccgtgattttgatgctttagcaaaagactttgtaacccttggtttacttcctccaactgcccagaaaggtgaagtcacaaaggcattgacaggtgtatttgagaatgctgttaacagaggagttcagaatataagctttggagatctgtcaggaaatcttggacgaacaatgtataaattcaagttccagataccgtcttacttttcccttgtaattcgaagccttgctgttttagaaggtatcgcaatcagcttcaatccaaagtataaagttctggggagttcatatccatggattgcaagaaaagttctcactgacagttcgccaaagcttcgatcaactttgcagactcttctttataaggatggcactttccaaattgatcgcctggaatctttgttaactgagtcacttcgtgcaagaacagagcaatcattggtcagaaatgaacaagatgtcgacagtacgagatatgcaattaagcaagtcttgtcattcacactcgctgaccagggtgcctttgtgaaggacttacttcttcaggagattgctaagggaatagatgcacttggtgtagccacattaagttctgcaacgtctgcagcagcctccagattgccattcggtggtggaccatccccattgacctcactagatgacgaagatgccacaaacttaagaaatctgtatcgcctgctcctacttttatctaaggtttctcagaaggaaaatccatctccaattcctgaatataacagtgccatagagaaggaaggtggtagcacggatgaacttgctcttgcgctgtatggaatgacctctctgccagaatttcttccagttctttctgtcattcctgagcttccaccggagtcccaacagcagttgcttcttctgccagcggatttaaccaatcgtattttatctcgggctctcgcgagaaccattagaagactcatgtaaagccataggtgcagaaattttcggtccctgcttaatttttattttactattctttttggttcactgctagaagatggggatttttttagcatctcatctacaacccaagatcaatcccttttttgttatctacgattactatgtacatattgttcaaactaaagcaggcattgtaaatggcccatgttgttatgcacatatggtgtaactgataaactttaaatatatgtgaacatagaaataattctgtaatgcaatttgcctcgaaagcg

SEQ ID NO: 11670 - protein, 442 aa, Zea mays subsp. mays
  peptide (1)..(442): Ceres Seq. ID no. 12358192
  misc_feature (1)..(441): Homolog of NCBI NO: 18409920 NR Description: expressed protein; protein id: At1g71810.1, by cDNA: gi_14532543, supported by cDNA: gi_20334811 [Arabidopsis >gi|14532544|gb|AAK64000.1| At1g71810/F14O23_17 [Arabidopsis
  misc_feature (1)..(243): Homolog of NCBI NO: 19698835 NR Description: unknown protein [Arabidopsis thaliana]
  misc_feature (224)..(441): Homolog of NCBI NO: 19698835 NR Description: unknown protein [Arabidopsis thaliana]
  misc_feature (1)..(179): Homolog of NCBI NO: 25406121 NR Description: hypothetical protein F14O23.19 [imported] - thaliana >gi|7239508|gb|AAF43234.1|AC012654_18 EST gb|AI998820
  misc_feature (307)..(441): Homolog of NCBI NO: 25406121 NR Description: hypothetical protein F14O23.19 [imported] - thaliana >gi|7239508|gb|AAF43234.1|AC012654_18 EST gb|AI998820
  misc_feature (197)..(294): Homolog of NCBI NO: 25406121 NR Description: hypothetical protein F14O23.19 [imported] - thaliana >gi|7239508|gb|AAF43234.1|AC012654_18 EST gb|AI998820
  misc_feature (1)..(355): Homolog of NCBI NO: 23042448 NR Description: hypothetical protein [Trichodesmium erythraeum
  misc_feature (1)..(358): Homolog of NCBI NO: 23126214 NR Description: hypothetical protein [Nostoc punctiforme]
  misc_feature (1)..(332): Homolog of NCBI NO: 16331408 NR Description: ABC1-like [Synechocystis sp. PCC 6803]
  misc_feature (1)..(441): Homolog of NCBI NO: 38344898 NR Description: OSJNBb0079B02.1 [Oryza sativa (japonica
MQEMDYREEARNGLKFRELFGKFRDVSVPEMYLEQTRRRVLIMEWIEGEKLSEVRDQYLVEVGVYCSLSQLLEYGFYHADPHPGNLLRTVDGKLAYLDFGMMGEFRQELRDGFIEACLHLVNRDFDALAKDFVTLGLLPPTAQKGEVTKALTGVFENAVNRGVQNISFGDLSGNLGRTMYKFKFQIPSYFSLVIRSLAVLEGIAISFNPKYKVLGSSYPWIARKVLTDSSPKLRSTLQTLLYKDGTFQIDRLESLLTESLRARTEQSLVRNEQDVDSTRYAIKQVLSFTLADQGAFVKDLLLQEIAKGIDALGVATLSSATSAAASRLPFGGGPSPLTSLDDEDATNLRNLYRLLLLLSKVSQKENPSPIPEYNSAIEKEGGSTDELALALYGMTSLPEFLPVLSVIPELPPESQQQLLLLPADLTNRILSRALARTIRRLM

SEQ ID NO: 11671 - protein, 439 aa, Zea mays subsp. mays
  peptide (1)..(439): Ceres Seq. ID no. 12358193
  misc_feature (1)..(438): Homolog of NCBI NO: 38344898 NR Description: OSJNBb0079B02.1 [Oryza sativa (japonica
  misc_feature (1)..(438): Homolog of NCBI NO: 18409920 NR Description: expressed protein; protein id: At1g71810.1, by cDNA: gi_14532543, supported by cDNA: gi_20334811 [Arabidopsis >gi|14532544|gb|AAK64000.1| At1g71810/F14O23_17 [Arabidopsis
  misc_feature (1)..(240): Homolog of NCBI NO: 19698835 NR Description: unknown protein [Arabidopsis thaliana]
  misc_feature (221)..(438): Homolog of NCBI NO: 19698835 NR Description: unknown protein [Arabidopsis thaliana]
  misc_feature (1)..(176): Homolog of NCBI NO: 25406121 NR Description: hypothetical protein F14O23.19 [imported] - thaliana >gi|7239508|gb|AAF43234.1|AC012654_18 EST gb|AI998820
  misc_feature (304)..(438): Homolog of NCBI NO: 25406121 NR Description: hypothetical protein F14O23.19 [imported] - thaliana >gi|7239508|gb|AAF43234.1|AC012654_18 EST gb|AI998820
  misc_feature (194)..(291): Homolog of NCBI NO: 25406121 NR Description: hypothetical protein F14O23.19 [imported] - thaliana >gi|7239508|gb|AAF43234.1|AC012654_18 EST gb|AI998820
  misc_feature (1)..(352): Homolog of NCBI NO: 23042448 NR Description: hypothetical protein [Trichodesmium erythraeum
  misc_feature (1)..(355): Homolog of NCBI NO: 23126214 NR Description: hypothetical protein [Nostoc punctiforme]
  misc_feature (1)..(329): Homolog of NCBI NO: 16331408 NR Description: ABC1-like [Synechocystis sp. PCC 6803]
MDYREEARNGLKFRELFGKFRDVSVPEMYLEQTRRRVLIMEWIEGEKLSEVRDQYLVEVGVYCSLSQLLEYGFYHADPHPGNLLRTVDGKLAYLDFGMMGEFRQELRDGFIEACLHLVNRDFDALAKDFVTLGLLPPTAQKGEVTKALTGVFENAVNRGVQNISFGDLSGNLGRTMYKFKFQIPSYFSLVIRSLAVLEGIAISFNPKYKVLGSSYPWIARKVLTDSSPKLRSTLQTLLYKDGTFQIDRLESLLTESLRARTEQSLVRNEQDVDSTRYAIKQVLSFTLADQGAFVKDLLLQEIAKGIDALGVATLSSATSAAASRLPFGGGPSPLTSLDDEDATNLRNLYRLLLLLSKVSQKENPSPIPEYNSAIEKEGGSTDELALALYGMTSLPEFLPVLSVIPELPPESQQQLLLLPADLTNRILSRALARTIRRLM

SEQ ID NO: 11672 - protein, 412 aa, Zea mays subsp. mays
  peptide (1)..(412): Ceres Seq. ID no. 12358194
  misc_feature (1)..(411): Homolog of NCBI NO: 38344898 NR Description: OSJNBb0079B02.1 [Oryza sativa (japonica
  misc_feature (1)..(411): Homolog of NCBI NO: 18409920 NR Description: expressed protein; protein id: At1g71810.1, by cDNA: gi_14532543, supported by cDNA: gi_20334811 [Arabidopsis >gi|14532544|gb|AAK64000.1| At1g71810/F14O23_17 [Arabidopsis
  misc_feature (1)..(213): Homolog of NCBI NO: 19698835 NR Description: unknown protein [Arabidopsis thaliana]
  misc_feature (194)..(411): Homolog of NCBI NO: 19698835 NR Description: unknown protein [Arabidopsis thaliana]
  misc_feature (1)..(149): Homolog of NCBI NO: 25406121 NR Description: hypothetical protein F14O23.19 [imported] - thaliana >gi|7239508|gb|AAF43234.1|AC012654_18 EST gb|AI998820
  misc_feature (277)..(411): Homolog of NCBI NO: 25406121 NR Description: hypothetical protein F14O23.19 [imported] - thaliana >gi|7239508|gb|AAF43234.1|AC012654_18 EST gb|AI998820
  misc_feature (167)..(264): Homolog of NCBI NO: 25406121 NR Description: hypothetical protein F14O23.19 [imported] - thaliana >gi|7239508|gb|AAF43234.1|AC012654_18 EST gb|AI998820
  misc_feature (1)..(325): Homolog of NCBI NO: 23042448 NR Description: hypothetical protein [Trichodesmium erythraeum
  misc_feature (1)..(328): Homolog of NCBI NO: 23126214 NR Description: hypothetical protein [Nostoc punctiforme]
  misc_feature (1)..(302): Homolog of NCBI NO: 16331408 NR Description: ABC1-like [Synechocystis sp. PCC 6803]
MYLEQTRRRVLIMEWIEGEKLSEVRDQYLVEVGVYCSLSQLLEYGFYHADPHPGNLLRTVDGKLAYLDFGMMGEFRQELRDGFIEACLHLVNRDFDALAKDFVTLGLLPPTAQKGEVTKALTGVFENAVNRGVQNISFGDLSGNLGRTMYKFKFQIPSYFSLVIRSLAVLEGIAISFNPKYKVLGSSYPWIARKVLTDSSPKLRSTLQTLLYKDGTFQIDRLESLLTESLRARTEQSLVRNEQDVDSTRYAIKQVLSFTLADQGAFVKDLLLQEIAKGIDALGVATLSSATSAAASRLPFGGGPSPLTSLDDEDATNLRNLYRLLLLLSKVSQKENPSPIPEYNSAIEKEGGSTDELALALYGMTSLPEFLPVLSVIPELPPESQQQLLLLPADLTNRILSRALARTIRRLM

SEQ ID NO: 11673 - DNA, 1309 bp, Zea mays subsp. mays
  misc_feature (1)..(1309): Ceres Seq. ID no. 12411788
  misc_feature: MA Experiment ID: 108544 Result: Up-regulated in Transcription
  misc_feature: MA Experiment ID: 108556 Result: Up-regulated in Transcription
  misc_feature: MA Experiment 108556 PARAMETER Experiment Name: Zm_Drought_P Parameter: Age (day) Value: 9
  misc_feature: MA Experiment 108556 PARAMETER Experiment Name: Zm_Drought_P Parameter: Organism Value: Zea mays
  misc_feature: MA Experiment 108556 PARAMETER Experiment Name: Zm_Drought_P Parameter: Plant Line Value: 35A19
  misc_feature: MA Experiment 108556 PARAMETER Experiment Name: Zm_Drought_P Parameter: Timepoint (hr) Value: 24
  misc_feature: MA Experiment 108556 PARAMETER Experiment Name: Zm_Drought_P Parameter: Tissue Value: Aerial
  misc_feature: MA Experiment 108556 PARAMETER Experiment Name: Zm_Drought_P Parameter: Treatment Value: Drought vs. No Drought
  misc_feature: MA Experiment ID: 108689 Result: Up-regulated in Transcription
  misc_feature: MA Experiment 108689 PARAMETER Experiment Name: Zm_Drought_Roots_P Parameter: Age (day) Value: 9
  misc_feature: MA Experiment 108689 PARAMETER Experiment Name: Zm_Drought_Roots_P Parameter: Organism Value: Zea mays
  misc_feature: MA Experiment 108689 PARAMETER Experiment Name: Zm_Drought_Roots_P Parameter: Plant Line Value: 35A19
  misc_feature: MA Experiment 108689 PARAMETER Experiment Name: Zm_Drought_Roots_P Parameter: Timepoint (hr) Value: 24
  misc_feature: MA Experiment 108689 PARAMETER Experiment Name: Zm_Drought_Roots_P Parameter: Tissue Value: Roots
  misc_feature: MA Experiment 108689 PARAMETER Experiment Name: Zm_Drought_Roots_P Parameter: Treatment Value: Drought vs. No Drought
  misc_feature: MA Experiment ID: 20000479 Result: Up-regulated in Transcription
  misc_feature: MA Experiment 20000479 PARAMETER Experiment Name: Zm_Drought_P Parameter: Age (day) Value: 10
  misc_feature: MA Experiment 20000479 PARAMETER Experiment Name: Zm_Drought_P Parameter: Organism Value: Zea mays
  misc_feature: MA Experiment 20000479 PARAMETER Experiment Name: Zm_Drought_P Parameter: Plant Line Value: 35A19
  misc_feature: MA Experiment 20000479 PARAMETER Experiment Name: Zm_Drought_P Parameter: Timepoint (hr) Value: 48
  misc_feature: MA Experiment 20000479 PARAMETER Experiment Name: Zm_Drought_P Parameter: Tissue Value: Aerial
  misc_feature: MA Experiment 20000479 PARAMETER Experiment Name: Zm_Drought_P Parameter: Treatment Value: Drought vs. No Drought
  misc_feature: MA Experiment ID: 20000480 Result: Up-regulated in Transcription
  misc_feature: MA Experiment 20000480 PARAMETER Experiment Name: Zm_Drought_P Parameter: Age (day) Value: 11
  misc_feature: MA Experiment 20000480 PARAMETER Experiment Name: Zm_Drought_P Parameter: Organism Value: Zea mays
  misc_feature: MA Experiment 20000480 PARAMETER Experiment Name: Zm_Drought_P Parameter: Plant Line Value: 35A19
  misc_feature: MA Experiment 20000480 PARAMETER Experiment Name: Zm_Drought_P Parameter: Timepoint (hr) Value: 72
  misc_feature: MA Experiment 20000480 PARAMETER Experiment Name: Zm_Drought_P Parameter: Tissue Value: Aerial
  misc_feature: MA Experiment 20000480 PARAMETER Experiment Name: Zm_Drought_P Parameter: Treatment Value: Drought vs. No Drought
  misc_feature: MA Experiment ID: 20000488 Result: Down-regulated in Transcription
  misc_feature: MA Experiment 20000488 PARAMETER Experiment Name: Zm_50mM_NH4NO3_L_to_H_P Parameter: Organism Value: Zea mays
  misc_feature: MA Experiment 20000488 PARAMETER Experiment Name: Zm_50mM_NH4NO3_L_to_H_P Parameter: Timepoint (hr) Value: 8
  misc_feature: MA Experiment 20000488 PARAMETER Experiment Name: Zm_50mM_NH4NO3_L_to_H_P Parameter: Tissue Value: Leaves
  misc_feature: MA Experiment 20000488 PARAMETER Experiment Name: Zm_50mM_NH4NO3_L_to_H_P Parameter: Treatment Value: 50mM NH4NO3 vs. 100mM Mannitol
  misc_feature: MA Experiment ID: 20000535 Result: Up-regulated in Transcription
  misc_feature: MA Experiment 20000535 PARAMETER Experiment Name: Zm_Hybrid_Seed_Dev_P Parameter: DAP Value: 30 vs. 12
  misc_feature: MA Experiment 20000535 PARAMETER Experiment Name: Zm_Hybrid_Seed_Dev_P Parameter: Organism Value: Zea mays
  misc_feature: MA Experiment 20000535 PARAMETER Experiment Name: Zm_Hybrid_Seed_Dev_P Parameter: Plant Line Value: 35A19
  misc_feature: MA Experiment 20000535 PARAMETER Experiment Name: Zm_Hybrid_Seed_Dev_P Parameter: Tissue Value: Embryo vs. Unfert Floret
tcattggagctagcaaaagctgggtatcagaggccttcacatgtaatcatacatctgaagaattttaggaggtcagagaactttgtaaggcttattaagtgcaacattgacaacgaacgggaacctcaggctctttcactttgctgttcaattcggaaaatgtggagatctcaccaagcagcaatgaaagttataccattgaaggttccatcaggccagcgtcatgtgtattttgtgtcagatgatgataaaaaggaatcccacagtttatctaggcctttgctaagctcgggaggaacctctactgatgttgagcaacagttcataaacaatacagttcactttcagaaaatgtggagcagtgaaccagaaattcagagccgatgcaaactagttgccaagcagattgcggatgacggaagggtgttcagcatatggaggcctctctgccctaatgggtatgtctcaattggtgatattgcgcatgttggcatccatccaccgcattttgctgctgtatacaagaatatcaatgggaactttgcactgcctcttggctatgacctggtttggagaaattgtgctgaggattacaagagccctgtatcaatatggcttccaaggccaccggggggatacgtagctcttgggtgtgttgctgtcccttcattcaaggagcccactcttgactgtgctttctgtgtggatgagagactcgcggaggatgccgcgtatgaggagcaaatcatatgggcctcatcggatgcttacccatggggatgctatatctaccaagttcagagcgcctcaatgcagttcatggcacttcgtgtcccaaaagaacaatctgagctaaggcccaagaagatattggagtcatttctgcagcaagcatcagagactcaaacgtcccgtgcatgaagaagctgcacatgatgcttgtgcgtgcaagagaactcggctgggacaaagggcaagtctcgtgcaagaaagctcgaagaatgccacttctttcggatcactccatttctccgttgtcaaagcatacacagaggacagagccttgcatgccaacactcgggttgacggaagtgttgtatactagaatagtaggttaaaggttgtaaatgtaaagttttgtaacgtttgatatagtttttgtccagctacatttgttaaggcccatgtggacgtgggccatattagttgtggctacatattctactaagaagttctcaggactaatcatactttctctaatttaaggttgttaaggcccatgtggacgtgggccatactagttgtggct

SEQ ID NO: 11674 - protein, 306 aa, Zea mays subsp. mays
  peptide (1)..(306): Ceres Seq. ID no. 12411789
  misc_feature (1)..(300): Homolog of NCBI NO: 37536928 NR Description: unknown protein [Oryza sativa (japonica
  misc_feature (1)..(301): Homolog of NCBI NO: 15235973 NR Description: hypothetical protein; protein id: At4g17110.1
SLELAKAGYQRPSHVIIHLKNFRRSENFVRLIKCNIDNEREPQALSLCCSIRKMWRSHQAAMKVIPLKVPSGQRHVYFVSDDDKKESHSLSRPLLSSGGTSTDVEQQFINNTVHFQKMWSSEPEIQSRCKLVAKQIADDGRVFSIWRPLCPNGYVSIGDIAHVGIHPPHFAAVYKNINGNFALPLGYDLVWRNCAEDYKSPVSIWLPRPPGGYVALGCVAVPSFKEPTLDCAFCVDERLAEDAAYEEQIIWASSDAYPWGCYIYQVQSASMQFMALRVPKEQSELRPKKILESFLQQASETQTSRA

SEQ ID NO: 11675 - protein, 253 aa, Zea mays subsp. mays
  peptide (1)..(253): Ceres Seq. ID no. 12411790
  misc_feature (1)..(247): Homolog of NCBI NO: 37536928 NR Description: unknown protein [Oryza sativa (japonica
  misc_feature (1)..(248): Homolog of NCBI NO: 15235973 NR Description: hypothetical protein; protein id: At4g17110.1
MWRSHQAAMKVIPLKVPSGQRHVYFVSDDDKKESHSLSRPLLSSGGTSTDVEQQFINNTVHFQKMWSSEPEIQSRCKLVAKQIADDGRVFSIWRPLCPNGYVSIGDIAHVGIHPPHFAAVYKNINGNFALPLGYDLVWRNCAEDYKSPVSIWLPRPPGGYVALGCVAVPSFKEPTLDCAFCVDERLAEDAAYEEQIIWASSDAYPWGCYIYQVQSASMQFMALRVPKEQSELRPKKILESFLQQASETQTSRA

SEQ ID NO: 11676 - protein, 245 aa, Zea mays subsp. mays
  peptide (1)..(245): Ceres Seq. ID no. 12411791
  misc_feature (1)..(239): Homolog of NCBI NO: 37536928 NR Description: unknown protein [Oryza sativa (japonica
  misc_feature (1)..(240): Homolog of NCBI NO: 15235973 NR Description: hypothetical protein; protein id: At4g17110.1
MKVIPLKVPSGQRHVYFVSDDDKKESHSLSRPLLSSGGTSTDVEQQFINNTVHFQKMWSSEPEIQSRCKLVAKQIADDGRVFSIWRPLCPNGYVSIGDIAHVGIHPPHFAAVYKNINGNFALPLGYDLVWRNCAEDYKSPVSIWLPRPPGGYVALGCVAVPSFKEPTLDCAFCVDERLAEDAAYEEQIIWASSDAYPWGCYIYQVQSASMQFMALRVPKEQSELRPKKILESFLQQASETQTSRA

SEQ ID NO: 11677 - DNA, 989 bp, Zea mays subsp. mays
  misc_feature (1)..(989): Ceres Seq. ID no. 12372536
  misc_feature: MA Experiment ID: 108522 Result: Down-regulated in Transcription
  misc_feature: MA Experiment 108522 PARAMETER Experiment Name: Zm_42deg_Heat_P Parameter: Age (day) Value: 8
  misc_feature: MA Experiment 108522 PARAMETER Experiment Name: Zm_42deg_Heat_P Parameter: Organism Value: Zea mays
  misc_feature: MA Experiment 108522 PARAMETER Experiment Name: Zm_42deg_Heat_P Parameter: Plant Line Value: 35A19
  misc_feature: MA Experiment 108522 PARAMETER Experiment Name: Zm_42deg_Heat_P Parameter: Temperature (deg C) Value: 42 vs. 22
  misc_feature: MA Experiment 108522 PARAMETER Experiment Name: Zm_42deg_Heat_P Parameter: Timepoint (hr) Value: 1
  misc_feature: MA Experiment 108522 PARAMETER Experiment Name: Zm_42deg_Heat_P Parameter: Tissue Value: Aerial
  misc_feature: MA Experiment ID: 108523 Result: Down-regulated in Transcription
  misc_feature: MA Experiment 108523 PARAMETER Experiment Name: Zm_42deg_Heat_P Parameter: Age (day) Value: 8
  misc_feature: MA Experiment 108523 PARAMETER Experiment Name: Zm_42deg_Heat_P Parameter: Organism Value: Zea mays
  misc_feature: MA Experiment 108523 PARAMETER Experiment Name: Zm_42deg_Heat_P Parameter: Plant Line Value: 35A19
  misc_feature: MA Experiment 108523 PARAMETER Experiment Name: Zm_42deg_Heat_P Parameter: Temperature (deg C) Value: 42 vs. 22
  misc_feature: MA Experiment 108523 PARAMETER Experiment Name: Zm_42deg_Heat_P Parameter: Timepoint (hr) Value: 6
  misc_feature: MA Experiment 108523 PARAMETER Experiment Name: Zm_42deg_Heat_P Parameter: Tissue Value: Aerial
  misc_feature: MA Experiment ID: 108527 Result: Down-regulated in Transcription
  misc_feature: MA Experiment 108527 PARAMETER Experiment Name: Zm_5mM_NO_P Parameter: Age (day) Value: 8
  misc_feature: MA Experiment 108527 PARAMETER Experiment Name: Zm_5mM_NO_P Parameter: Organism Value: Zea mays
  misc_feature: MA Experiment 108527 PARAMETER Experiment Name: Zm_5mM_NO_P Parameter: Plant Line Value: 35A19
  misc_feature: MA Experiment 108527 PARAMETER Experiment Name: Zm_5mM_NO_P Parameter: Timepoint (hr) Value: 6
  misc_feature: MA Experiment 108527 PARAMETER Experiment Name: Zm_5mM_NO_P Parameter: Tissue Value: Aerial
  misc_feature: MA Experiment 108527 PARAMETER Experiment Name: Zm_5mM_NO_P Parameter: Treatment Value: 5mM NO vs. No Treatment
  misc_feature: MA Experiment ID: 108528 Result: Up-regulated in Transcription
  misc_feature: MA Experiment 108528 PARAMETER Experiment Name: Zm_Imbibed_Seeds_P Parameter: Age (day) Value: 5 vs. 2
  misc_feature: MA Experiment 108528 PARAMETER Experiment Name: Zm_Imbibed_Seeds_P Parameter: Organism Value: Zea mays
  misc_feature: MA Experiment 108528 PARAMETER Experiment Name: Zm_Imbibed_Seeds_P Parameter: Plant Line Value: 35A19
  misc_feature: MA Experiment 108528 PARAMETER Experiment Name: Zm_Imbibed_Seeds_P Parameter: Tissue Value: Aerial vs. Embryo
  misc_feature: MA Experiment ID: 108530 Result: Up-regulated in Transcription
  misc_feature: MA Experiment 108530 PARAMETER Experiment Name: Zm_Imbibed_Seeds_P Parameter: Age (day) Value: 6 vs. 2
  misc_feature: MA Experiment 108530 PARAMETER Experiment Name: Zm_Imbibed_Seeds_P Parameter: Organism Value: Zea mays
  misc_feature: MA Experiment 108530 PARAMETER Experiment Name: Zm_Imbibed_Seeds_P Parameter: Plant Line Value: 35A19
  misc_feature: MA Experiment 108530 PARAMETER Experiment Name: Zm_Imbibed_Seeds_P Parameter: Tissue Value: Aerial vs. Embryo
  misc_feature: MA Experiment ID: 108536 Result: Down-regulated in Transcription
  misc_feature: MA Experiment 108536 PARAMETER Experiment Name: Zm_Meristem_P Parameter: Age (day) Value: 8
  misc_feature: MA Experiment 108536 PARAMETER Experiment Name: Zm_Meristem_P Parameter: Organism Value: Zea mays
  misc_feature: MA Experiment 108536 PARAMETER Experiment Name: Zm_Meristem_P Parameter: Plant Line Value: 35A19
  misc_feature: MA Experiment 108536 PARAMETER Experiment Name: Zm_Meristem_P Parameter: Tissue Value: Shoot Meristem vs. Above Shoot Meristem
  misc_feature: MA Experiment ID: 108545 Result: Up-regulated in Transcription
  misc_feature: MA Experiment 108545 PARAMETER Experiment Name: Zm_Imbibed_Seeds_P Parameter: Age (day) Value: 3 vs. 2
  misc_feature: MA Experiment 108545 PARAMETER Experiment Name: Zm_Imbibed_Seeds_P Parameter: Organism Value: Zea mays
  misc_feature: MA Experiment 108545 PARAMETER Experiment Name: Zm_Imbibed_Seeds_P Parameter: Plant Line Value: 35A19
  misc_feature: MA Experiment 108545 PARAMETER Experiment Name: Zm_Imbibed_Seeds_P Parameter: Tissue Value: Aerial vs. Embryo
  misc_feature: MA Experiment ID: 108547 Result: Up-regulated in Transcription
  misc_feature: MA Experiment 108547 PARAMETER Experiment Name: Zm_Imbibed_Seeds_P Parameter: Age (day) Value: 4 vs. 2
  misc_feature: MA Experiment 108547 PARAMETER Experiment Name: Zm_Imbibed_Seeds_P Parameter: Organism Value: Zea mays
  misc_feature: MA Experiment 108547 PARAMETER Experiment Name: Zm_Imbibed_Seeds_P Parameter: Plant Line Value: 35A19
  misc_feature: MA Experiment 108547 PARAMETER Experiment Name: Zm_Imbibed_Seeds_P Parameter: Tissue Value: Aerial vs. Embryo
  misc_feature: MA Experiment ID: 108556 Result: Down-regulated in Transcription
  misc_feature: MA Experiment 108556 PARAMETER Experiment Name: Zm_Drought_P Parameter: Age (day) Value: 9
  misc_feature: MA Experiment 108556 PARAMETER Experiment Name: Zm_Drought_P Parameter: Organism Value: Zea mays
  misc_feature: MA Experiment 108556 PARAMETER Experiment Name: Zm_Drought_P Parameter: Plant Line Value: 35A19
  misc_feature: MA Experiment 108556 PARAMETER Experiment Name: Zm_Drought_P Parameter: Timepoint (hr) Value: 24
  misc_feature: MA Experiment 108556 PARAMETER Experiment Name: Zm_Drought_P Parameter: Tissue Value: Aerial
  misc_feature: MA Experiment 108556 PARAMETER Experiment Name: Zm_Drought_P Parameter: Treatment Value: Drought vs. No Drought
  misc_feature: MA Experiment ID: 108597 Result: Down-regulated in Transcription
  misc_feature: MA Experiment 108597 PARAMETER Experiment Name: Zm_100uM_ABA_P Parameter: Age (day) Value: 9
  misc_feature: MA Experiment 108597 PARAMETER Experiment Name: Zm_100uM_ABA_P Parameter: Organism Value: Zea mays
  misc_feature: MA Experiment 108597 PARAMETER Experiment Name: Zm_100uM_ABA_P Parameter: Plant Line Value: 35A19
  misc_feature: MA Experiment 108597 PARAMETER Experiment Name: Zm_100uM_ABA_P Parameter: Timepoint (hr) Value: 24
  misc_feature: MA Experiment 108597 PARAMETER Experiment Name: Zm_100uM_ABA_P Parameter: Tissue Value: Aerial
  misc_feature: MA Experiment 108597 PARAMETER Experiment Name: Zm_100uM_ABA_P Parameter: Treatment Value: 100uM ABA vs. No Treatment
  misc_feature: MA Experiment ID: 20000478 Result: Down-regulated in Transcription
  misc_feature: MA Experiment 20000478 PARAMETER Experiment Name: Zm_5mM_SA_P Parameter: Age (day) Value: 11
  misc_feature: MA Experiment 20000478 PARAMETER Experiment Name: Zm_5mM_SA_P Parameter: Organism Value: Zea mays
  misc_feature: MA Experiment 20000478 PARAMETER Experiment Name: Zm_5mM_SA_P Parameter: Plant Line Value: 35A19
  misc_feature: MA Experiment 20000478 PARAMETER Experiment Name: Zm_5mM_SA_P Parameter: Timepoint (hr) Value: 72
  misc_feature: MA Experiment 20000478 PARAMETER Experiment Name: Zm_5mM_SA_P Parameter: Tissue Value: Aerial
  misc_feature: MA Experiment 20000478 PARAMETER Experiment Name: Zm_5mM_SA_P Parameter: Treatment Value: 5mM SA vs. No Treatment
  misc_feature: MA Experiment ID: 20000479 Result: Down-regulated in Transcription
  misc_feature: MA Experiment 20000479 PARAMETER Experiment Name: Zm_Drought_P Parameter: Age (day) Value: 10
  misc_feature: MA Experiment 20000479 PARAMETER Experiment Name: Zm_Drought_P Parameter: Organism Value: Zea mays
  misc_feature: MA Experiment 20000479 PARAMETER Experiment Name: Zm_Drought_P Parameter: Plant Line Value: 35A19
  misc_feature: MA Experiment 20000479 PARAMETER Experiment Name: Zm_Drought_P Parameter: Timepoint (hr) Value: 48
  misc_feature: MA Experiment 20000479 PARAMETER Experiment Name: Zm_Drought_P Parameter: Tissue Value: Aerial
  misc_feature: MA Experiment 20000479 PARAMETER Experiment Name: Zm_Drought_P Parameter: Treatment Value: Drought vs. No Drought
  misc_feature: MA Experiment ID: 20000488 Result: Down-regulated in Transcription
  misc_feature: MA Experiment 20000488 PARAMETER Experiment Name: Zm_50mM_NH4NO3_L_to_H_P Parameter: Organism Value: Zea mays
  misc_feature: MA Experiment 20000488 PARAMETER Experiment Name: Zm_50mM_NH4NO3_L_to_H_P Parameter: Timepoint (hr) Value: 8
  misc_feature: MA Experiment 20000488 PARAMETER Experiment Name: Zm_50mM_NH4NO3_L_to_H_P Parameter: Tissue Value: Leaves
  misc_feature: MA Experiment 20000488 PARAMETER Experiment Name: Zm_50mM_NH4NO3_L_to_H_P Parameter: Treatment Value: 50mM NH4NO3 vs. 100mM Mannitol
  misc_feature: MA Experiment ID: 20000626 Result: Down-regulated in Transcription
  misc_feature: MA Experiment 20000626 PARAMETER Experiment Name: Zm_Herbicide-Treatments_P Parameter: Timepoint (hr) Value: 12
  misc_feature: MA Experiment 20000626 PARAMETER Experiment Name: Zm_Herbicide-Treatments_P Parameter: Tissue Value: Aerial
  misc_feature: MA Experiment 20000626 PARAMETER Experiment Name: Zm_Herbicide-Treatments_P Parameter: Treatment Value: Roundup vs. No Treatment
ccacacggccacacacacttcacttcataggcgccccagcagagctcatctctgcctcctgtgtccttctccatgacagagaatctccactccaggaaaatggtacagccaaagaagtttcgtggagtccggcagcgccactggggctcctgggtctctgagatcaggcatcccctccttaagaggagggtctggctgggtacctttgagacggctgaggaggcagcgagagcatatgatgaggctgctgtgctgatgagcggacgcaacgccaagaccaacttcccaatccaaagaagcagcacaggggagcctaccccagctgcgggaagggacgcccgcagcaacttcagcagcggctcctctaccaccaacctgtcccagattctcagtgcgaagctccgcaaatgctgcaaggcgccatcaccgtccctgacctgtctccgccttgaccctgagaagtcccacattggtgtttggcagaagcgtgcaggagcccgtgctgactccaactgggtcatgacagtggagctcaacaaagatgcagcatccactgatgctgcatcacagtccacatcagcaacaactgctccaccagccacgccgatggatgaggaggagaggatcgcactgcaaatgatcgaagagttgctgagcagcagcagcccagcttcaccctcaaacggagatgaccaaggtcgcttcatcatctgaaaagcatggatcaaacagcacaagtcaccatcccagatcagagtttcgctaggtcggttggtacacaagcagttcaggttgcttcagtaatatagatatatgtctattactaaatccaacttacaagaactataaagtttgcaattgtgtgcagttctatgtacgtgaaaagctctacatacacatgttcctatcaagatactttgttacacatcaatgtcagtgatataattgcttataaaagaaataaatagattatgattgtgttactgctc

SEQ ID NO: 11678 - protein, 213 aa, Zea mays subsp. mays
  peptide (1)..(213): Ceres Seq. ID no. 12372537
  misc_feature (14)..(77): Pfam Name: AP2 domain Pfam Description: AP2 domain
  misc_feature (10)..(197): Homolog of NCBI NO: 15218134 NR Description: putative ethylene responsive element; protein id:
  misc_feature (10)..(197): Homolog of NCBI NO: 21553845 NR Description: putative ethylene responsive element [Arabidopsis
  misc_feature (10)..(197): Homolog of NCBI NO: 15238976 NR Description: putative protein; protein id: At5g11190.1 thaliana] >gi|8953381|emb|CAB96654.1| putative protein
  misc_feature (10)..(203): Homolog of NCBI NO: 15239413 NR Description: AP2 domain containing protein; protein id:
  misc_feature (10)..(203): Homolog of NCBI NO: 30689846 NR Description: AP2 domain transcription factor, putative thaliana] >gi|26452577|dbj|BAC43373.1| putative AP2 domain protein [Arabidopsis thaliana] >gi|28973113|gb|AAO63881.1|
  misc_feature (10)..(116): Homolog of NCBI NO: 15238727 NR Description: ethylene-responsive element - like protein; id: At5g25190.1, supported by cDNA: gi_15010715, supported by gi_16974344 [Arabidopsis thaliana] >gi|15010716|gb|AAK74017.1|
  misc_feature (14)..(116): Homolog of NCBI NO: 18650662 NR Description: ethylene response factor 1 [Lycopersicon
  misc_feature (15)..(79): Homolog of NCBI NO: 38343976 NR Description: OSJNBb0022F16.15 [Oryza sativa (japonica
  misc_feature (10)..(116): Homolog of NCBI NO: 131754 NR Description: PPLZ02 PROTEIN >gi|99973|pir||S11881 hypothetical
  misc_feature (11)..(176): Homolog of NCBI NO: 37533596 NR Description: putative AP2-domain transcriptional regulator
MTENLHSRKMVQPKKFRGVRQRHWGSWVSEIRHPLLKRRVWLGTFETAEEAARAYDEAAVLMSGRNAKTNFPIQRSSTGEPTPAAGRDARSNFSSGSSTTNLSQILSAKLRKCCKAPSPSLTCLRLDPEKSHIGVWQKRAGARADSNWVMTVELNKDAASTDAASQSTSATTAPPATPMDEEERIALQMIEELLSSSSPASPSNGDDQGRFII

SEQ ID NO: 11679 - protein, 204 aa, Zea mays subsp. mays
  peptide (1)..(204): Ceres Seq. ID no. 12372538
  misc_feature (5)..(68): Pfam Name: AP2 domain Pfam Description: AP2 domain
  misc_feature (1)..(188): Homolog of NCBI NO: 15218134 NR Description: putative ethylene responsive element; protein id:
  misc_feature (1)..(188): Homolog of NCBI NO: 21553845 NR Description: putative ethylene responsive element [Arabidopsis
  misc_feature (1)..(188): Homolog of NCBI NO: 15238976 NR Description: putative protein; protein id: At5g11190.1 thaliana] >gi|8953381|emb|CAB96654.1| putative protein
  misc_feature (1)..(194): Homolog of NCBI NO: 15239413 NR Description: AP2 domain containing protein; protein id:
  misc_feature (1)..(194): Homolog of NCBI NO: 30689846 NR Description: AP2 domain transcription factor, putative thaliana] >gi|26452577|dbj|BAC43373.1| putative AP2 domain protein [Arabidopsis thaliana] >gi|28973113|gb|AAO63881.1|
  misc_feature (1)..(107): Homolog of NCBI NO: 15238727 NR Description: ethylene-responsive element - like protein; id: At5g25190.1, supported by cDNA: gi_15010715, supported by gi_16974344 [Arabidopsis thaliana] >gi|15010716|gb|AAK74017.1|
  misc_feature (5)..(107): Homolog of NCBI NO: 18650662 NR Description: ethylene response factor 1 [Lycopersicon
  misc_feature (6)..(70): Homolog of NCBI NO: 38343976 NR Description: OSJNBb0022F16.15 [Oryza sativa (japonica
  misc_feature (1)..(107): Homolog of NCBI NO: 131754 NR Description: PPLZ02 PROTEIN >gi|99973|pir||S11881 hypothetical
  misc_feature (2)..(167): Homolog of NCBI NO: 37533596 NR Description: putative AP2-domain transcriptional regulator
MVQPKKFRGVRQRHWGSWVSEIRHPLLKRRVWLGTFETAEEAARAYDEAAVLMSGRNAKTNFPIQRSSTGEPTPAAGRDARSNFSSGSSTTNLSQILSAKLRKCCKAPSPSLTCLRLDPEKSHIGVWQKRAGARADSNWVMTVELNKDAASTDAASQSTSATTAPPATPMDEEERIALQMIEELLSSSSPASPSNGDDQGRFII

SEQ ID NO: 11680 - protein, 152 aa, Zea mays subsp. mays
  peptide (1)..(152): Ceres Seq. ID no. 12372539
  misc_feature (1)..(136): Homolog of NCBI NO: 15218134 NR Description: putative ethylene responsive element; protein id:
  misc_feature (1)..(136): Homolog of NCBI NO: 21553845 NR Description: putative ethylene responsive element [Arabidopsis
  misc_feature (1)..(136): Homolog of NCBI NO: 15238976 NR Description: putative protein; protein id: At5g11190.1 thaliana] >gi|8953381|emb|CAB96654.1| putative protein
  misc_feature (1)..(142): Homolog of NCBI NO: 15239413 NR Description: AP2 domain containing protein; protein id:
  misc_feature (1)..(142): Homolog of NCBI NO: 30689846 NR Description: AP2 domain transcription factor, putative thaliana] >gi|26452577|dbj|BAC43373.1| putative AP2 domain protein [Arabidopsis thaliana] >gi|28973113|gb|AAO63881.1|
  misc_feature (1)..(55): Homolog of NCBI NO: 15238727 NR Description: ethylene-responsive element - like protein; id: At5g25190.1, supported by cDNA: gi_15010715, supported by gi_16974344 [Arabidopsis thaliana] >gi|15010716|gb|AAK74017.1|
  misc_feature (1)..(55): Homolog of NCBI NO: 18650662 NR Description: ethylene response factor 1 [Lycopersicon
  misc_feature (1)..(18): Homolog of NCBI NO: 38343976 NR Description: OSJNBb0022F16.15 [Oryza sativa (japonica
  misc_feature (1)..(55): Homolog of NCBI NO: 131754 NR Description: PPLZ02 PROTEIN >gi|99973|pir||S11881 hypothetical
  misc_feature (1)..(115): Homolog of NCBI NO: 37533596 NR Description: putative AP2-domain transcriptional regulator
MSGRNAKTNFPIQRSSTGEPTPAAGRDARSNFSSGSSTTNLSQILSAKLRKCCKAPSPSLTCLRLDPEKSHIGVWQKRAGARADSNWVMTVELNKDAASTDAASQSTSATTAPPATPMDEEERIALQMIEELLSSSSPASPSNGDDQGRFII

SEQ ID NO: 11681 - DNA, 924 bp, Zea mays subsp. mays
  misc_feature (1)..(924): Ceres Seq. ID no. 12340623
  misc_feature: MA Experiment ID: 108528 Result: Down-regulated in Transcription
  misc_feature: MA Experiment 108528 PARAMETER Experiment Name: Zm_Imbibed_Seeds_P Parameter: Age (day) Value: 5 vs. 2
  misc_feature: MA Experiment 108528 PARAMETER Experiment Name: Zm_Imbibed_Seeds_P Parameter: Organism Value: Zea mays
  misc_feature: MA Experiment 108528 PARAMETER Experiment Name: Zm_Imbibed_Seeds_P Parameter: Plant Line Value: 35A19
  misc_feature: MA Experiment 108528 PARAMETER Experiment Name: Zm_Imbibed_Seeds_P Parameter: Tissue Value: Aerial vs. Embryo
  misc_feature: MA Experiment ID: 108530 Result: Down-regulated in Transcription
  misc_feature: MA Experiment 108530 PARAMETER Experiment Name: Zm_Imbibed_Seeds_P Parameter: Age (day) Value: 6 vs. 2
  misc_feature: MA Experiment 108530 PARAMETER Experiment Name: Zm_Imbibed_Seeds_P Parameter: Organism Value: Zea mays
  misc_feature: MA Experiment 108530 PARAMETER Experiment Name: Zm_Imbibed_Seeds_P Parameter: Plant Line Value: 35A19
  misc_feature: MA Experiment 108530 PARAMETER Experiment Name: Zm_Imbibed_Seeds_P Parameter: Tissue Value: Aerial vs. Embryo
  misc_feature: MA Experiment ID: 108535 Result: Up-regulated in Transcription
  misc_feature: MA Experiment 108535 PARAMETER Experiment Name: Zm_Meristem_P Parameter: Age (day) Value: 8
  misc_feature: MA Experiment 108535 PARAMETER Experiment Name: Zm_Meristem_P Parameter: Organism Value: Zea mays
  misc_feature: MA Experiment 108535 PARAMETER Experiment Name: Zm_Meristem_P Parameter: Plant Line Value: 35A19
  misc_feature: MA Experiment 108535 PARAMETER Experiment Name: Zm_Meristem_P Parameter: Tissue Value: Root Meristem vs. Above Root Meristem
  misc_feature: MA Experiment ID: 108543 Result: Up-regulated in Transcription
  misc_feature: MA Experiment ID: 108547 Result: Down-regulated in Transcription
  misc_feature: MA Experiment 108547 PARAMETER Experiment Name: Zm_Imbibed_Seeds_P Parameter: Age (day) Value: 4 vs. 2
  misc_feature: MA Experiment 108547 PARAMETER Experiment Name: Zm_Imbibed_Seeds_P Parameter: Organism Value: Zea mays
  misc_feature: MA Experiment 108547 PARAMETER Experiment Name: Zm_Imbibed_Seeds_P Parameter: Plant Line Value: 35A19
  misc_feature: MA Experiment 108547 PARAMETER Experiment Name: Zm_Imbibed_Seeds_P Parameter: Tissue Value: Aerial vs. Embryo
  misc_feature: MA Experiment ID: 20000108 Result: Up-regulated in Transcription
  misc_feature: MA Experiment 20000108 PARAMETER Experiment Name: Zm_Root-Tips_P Parameter: Age (day) Value: 12
  misc_feature: MA Experiment 20000108 PARAMETER Experiment Name: Zm_Root-Tips_P Parameter: Organism Value: Zea mays
  misc_feature: MA Experiment 20000108 PARAMETER Experiment Name: Zm_Root-Tips_P Parameter: Tissue Value: Root tips vs. Root mid region    35
  misc_feature: MA Experiment 20000108 PARAMETER Experiment Name: Zm_Root-Tips_P Parameter: Tissue Value: Root tips vs. Root mid region   Sequence Listing-Misc Features (4)
  misc_feature: MA Experiment ID: 20000492 Result: Up-regulated in Transcription
  misc_feature: MA Experiment 20000492 PARAMETER Experiment Name: Zm_Hybrid_Seed_Dev_P Parameter: DAP Value: 12
  misc_feature: MA Experiment 20000492 PARAMETER Experiment Name: Zm_Hybrid_Seed_Dev_P Parameter: Organism Value: Zea mays
  misc_feature: MA Experiment 20000492 PARAMETER Experiment Name: Zm_Hybrid_Seed_Dev_P Parameter: Plant Line Value: 35A19
  misc_feature: MA Experiment 20000492 PARAMETER Experiment Name: Zm_Hybrid_Seed_Dev_P Parameter: Tissue Value: Fert Kernel vs. Unfert Floret
  misc_feature: MA Experiment ID: 20001614 Result: Up-regulated in Transcription
  misc_feature: MA Experiment 20001614 PARAMETER Experiment Name: Zm_50ppm_KNO3_L-to-H_P Parameter: Age (day) Value: 21
  misc_feature: MA Experiment 20001614 PARAMETER Experiment Name: Zm_50ppm_KNO3_L-to-H_P Parameter: Organism Value: Zea mays
  misc_feature: MA Experiment 20001614 PARAMETER Experiment Name: Zm_50ppm_KNO3_L-to-H_P Parameter: Plant Line Value: 35A19
  misc_feature: MA Experiment 20001614 PARAMETER Experiment Name: Zm_50ppm_KNO3_L-to-H_P Parameter: Timepoint (hr) Value: 48
  misc_feature: MA Experiment 20001614 PARAMETER Experiment Name: Zm_50ppm_KNO3_L-to-H_P Parameter: Tissue Value: Roots
  misc_feature: MA Experiment 20001614 PARAMETER Experiment Name: Zm_50ppm_KNO3_L-to-H_P Parameter: Treatment Value: 50ppm KNO3 vs. 50ppm KCl
attagtgctggtgtgtgtggtgtggttcgtccatctctcctgctagcttagctcgctcgctggcaacaacaatgaaagccgcaactggctcgtcatcagtcgctcgcgctcttgcgttgctcttggcggcgtgccttctctggaaggaagccgcgtgcttctcggcgtccgggctaaacaaggcgttcgccaccttctatggcggtagcgacgcttcaggaacgatgggtggggcctgtgggtacggcaacctgtactcgacggggtacggcacggacacggcggcgctgagcacggcgctcttcaacgacggcgcctcgtgcgggcagtgctaccggatctcctgcgactaccaggcggacccgcggttctgcatccgcggcacgtcggtgaccatcaccgccaccaacctgtgccctcccaactacgcgctgcccaacgacgacggcggctggtgcaacccgccgcggcagcacttcgacatggccgagccggcctggctcaagatcggcatctaccgcggcggcatcgtgcccgtcaactaccaaagggtgccgtgtgtgaagaaaggcggggtgaggttcagcatcaacgggcgcgactacttcgagctggtgctcatctccaacgtgggcggctgcgggtccatccagtcggcgtccatcaaggggtcgcgcaccgggtggatggccatgtcccggaactggggcgtcaactggcagtccaacgcgtacctcaatggccagagcctgtcgttccaggtcaccagcagcgacggccagaccaaaaccttccccgacgtcgcgcccgccagctgggggttcggtcagacgtttgcgacctcgcagcagttctcttagtatagacacatctttgttttctgcctcgttcgcttgtcgtttatatatatccctcactcggctc

SEQ ID NO: 11682 - protein, 262 aa, Zea mays subsp. mays
  peptide (1)..(262): Ceres Seq. ID no. 12340624
  misc_feature (169)..(246): Pfam Name: Pollen allergen Pfam Description: Pollen allergen
  misc_feature (1)..(262): Homolog of NCBI NO: 14193755 NR Description: alpha-expansin 3 [Zea mays]
  misc_feature (1)..(262): Homolog of NCBI NO: 7489469 NR Description: expansin - rice >gi|2924247|emb|CAA69105.1|
  misc_feature (13)..(261): Homolog of NCBI NO: 4027891 NR Description: alpha-expansin precursor [Nicotiana tabacum]
MKAATGSSSVARALALLLAACLLWKEAACFSASGLNKAFATFYGGSDASGTMGGACGYGNLYSTGYGTDTAALSTALFNDGASCGQCYRISCDYQADPRFCIRGTSVTITATNLCPPNYALPNDDGGWCNPPRQHFDMAEPAWLKIGIYRGGIVPVNYQRVPCVKKGGVRFSINGRDYFELVLISNVGGCGSIQSASIKGSRTGWMAMSRNWGVNWQSNAYLNGQSLSFQVTSSDGQTKTFPDVAPASWGFGQTFATSQQFS

SEQ ID NO: 11683 - protein, 211 aa, Zea mays subsp. mays
  peptide (1)..(211): Ceres Seq. ID no. 12340625
  misc_feature (118)..(195): Pfam Name: Pollen allergen Pfam Description: Pollen allergen
  misc_feature (1)..(211): Homolog of NCBI NO: 14193755 NR Description: alpha-expansin 3 [Zea mays]
  misc_feature (1)..(211): Homolog of NCBI NO: 7489469 NR Description: expansin - rice >gi|2924247|emb|CAA69105.1|
  misc_feature (1)..(210): Homolog of NCBI NO: 4027891 NR Description: alpha-expansin precursor [Nicotiana tabacum]
MGGACGYGNLYSTGYGTDTAALSTALFNDGASCGQCYRISCDYQADPRFCIRGTSVTITATNLCPPNYALPNDDGGWCNPPRQHFDMAEPAWLKIGIYRGGIVPVNYQRVPCVKKGGVRFSINGRDYFELVLISNVGGCGSIQSASIKGSRTGWMAMSRNWGVNWQSNAYLNGQSLSFQVTSSDGQTKTFPDVAPASWGFGQTFATSQQFS

SEQ ID NO: 11684 - DNA, 757 bp, Zea mays subsp. mays
  misc_feature (1)..(757): Ceres Seq. ID no. 12345655
  misc_feature: MA Experiment ID: 20000535 Result: Down-regulated in Transcription
  misc_feature: MA Experiment 20000535 PARAMETER Experiment Name: Zm_Hybrid_Seed_Dev_P Parameter: DAP Value: 30 vs. 12
  misc_feature: MA Experiment 20000535 PARAMETER Experiment Name: Zm_Hybrid_Seed_Dev_P Parameter: Organism Value: Zea mays
  misc_feature: MA Experiment 20000535 PARAMETER Experiment Name: Zm_Hybrid_Seed_Dev_P Parameter: Plant Line Value: 35A19
  misc_feature: MA Experiment 20000535 PARAMETER Experiment Name: Zm_Hybrid_Seed_Dev_P Parameter: Tissue Value: Embryo vs. Unfert Floret
agccatcgccaccacctccctccgcggctccgccttccgccgcgaacacgccgctgtctcgaccccttgtcctcctccttcagcaagatggcggagattgagataaaaacagcacctgctgacttccgcttccctacaacaaaccaaacaaggcattgttttactcgctatgtcgagtaccacaggtgtttgaatgccaaaggggatgatgctggtgtttgcgaaaaatttgccaagtactacaggtccctttgccctggagaatgggttgagaaatggaacgagcagagggagcatgggacgtttccaggacctctctgaatgtaccgcccgagacctccagttggaccagtcaacaagttggccaggcagtcctactgttccattctgcattcctacttccagaatcgtaaatgccttttgtcccttgctcttcaaccagtcaccacaaaactgttagtgatgcctctcgtatgcagctctaataatttggctacagttgccccacatgcagccttgttttgtgtgtggactgtggacctcattttgtaaacgtctgaatggacttgcattttctttcgtgcctgcgaccgcgtcgtcctgtactgcggcttttgtgtcgtcagtaagctggcattgtagtaatggcctatgaatgtgggtgtacctttcccgtttaaattaagggtctccaattctggaggattggaggggattgagtttaaaaataaactgatttcccctcttattcacctcc

SEQ ID NO: 11685 - protein, 106 aa, Zea mays subsp. mays
  peptide (1)..(106): Ceres Seq. ID no. 12345656
  misc_feature (32)..(105): Pfam Name: Cytochrome oxidase c subunit VIb Pfam Description: Cytochrome oxidase c subunit VIb
  misc_feature (30)..(106): Homolog of NCBI NO: 9967162 NR Description: cytochrome c oxidase subunit 6b [Oryza sativa
  misc_feature (32)..(106): Homolog of NCBI NO: 4586449 NR Description: cytochrome c oxidase subunit 6b-1 [Oryza sativa
  misc_feature (32)..(106): Homolog of NCBI NO: 22204116 NR Description: putative cytochrome c oxidase subunit [Triticum
  misc_feature (32)..(106): Homolog of NCBI NO: 18424030 NR Description: Expressed protein; protein id: At5g57815.1, by cDNA: 22388., supported by cDNA: gi_15724311 [Arabidopsis >gi|15724312|gb|AAL06549.1|AF412096_1 AT4g28060/T13J8_170
  misc_feature (32)..(106): Homolog of NCBI NO: 15219886 NR Description: cytochrome c oxidase subunit, putative; protein At1g22450.1, supported by cDNA: 25361., supported by cDNA: supported by cDNA: gi_20465722, supported by cDNA: gi_6518352
  misc_feature (32)..(106): Homolog of NCBI NO: 21554378 NR Description: cytochrome c oxidase subunit, putative
  misc_feature (32)..(106): Homolog of NCBI NO: 34906824 NR Description: putative cytochrome c oxidase subunit 6b-1 [Oryza
  misc_feature (32)..(106): Homolog of NCBI NO: 21592329 NR Description: cytochrome c oxidase subunit 6b [Arabidopsis
  misc_feature (7)..(106): Homolog of NCBI NO: 15234375 NR Description: putative protein; protein id: At4g28060.1
  misc_feature (24)..(105): Homolog of NCBI NO: 32401320 NR Description: cytochrome c oxidase subunit 6b-1 [Griffithsia
SHRHHLPPRLRLPPRTRRCLDPLSSSFSKMAEIEIKTAPADFRFPTTNQTRHCFTRYVEYHRCLNAKGDDAGVCEKFAKYYRSLCPGEWVEKWNEQREHGTFPGPL

SEQ ID NO: 11686 - protein, 88 aa, Zea mays subsp. mays
  peptide (1)..(88): Ceres Seq. ID no. 12345657
MPKGMMLVFAKNLPSTTGPFALENGLRNGTSRGSMGRFQDLSECTARDLQLDQSTSWPGSPTVPFCIPTSRIVNAFCPLLFNQSPQNC

SEQ ID NO: 11687 - protein, 84 aa, Zea mays subsp. mays
  peptide (1)..(84): Ceres Seq. ID no. 12345658
MMLVFAKNLPSTTGPFALENGLRNGTSRGSMGRFQDLSECTARDLQLDQSTSWPGSPTVPFCIPTSRIVNAFCPLLFNQSPQNC

SEQ ID NO: 11688 - protein, 77 aa, Zea mays subsp. mays
  peptide (1)..(77): Ceres Seq. ID no. 12345659
  misc_feature (3)..(76): Pfam Name: Cytochrome oxidase c subunit VIb Pfam Description: Cytochrome oxidase c subunit VIb
  misc_feature (1)..(77): Homolog of NCBI NO: 9967162 NR Description: cytochrome c oxidase subunit 6b [Oryza sativa
  misc_feature (3)..(77): Homolog of NCBI NO: 4586449 NR Description: cytochrome c oxidase subunit 6b-1 [Oryza sativa
  misc_feature (3)..(77): Homolog of NCBI NO: 22204116 NR Description: putative cytochrome c oxidase subunit [Triticum
  misc_feature (3)..(77): Homolog of NCBI NO: 18424030 NR Description: Expressed protein; protein id: At5g57815.1, by cDNA: 22388., supported by cDNA: gi_15724311 [Arabidopsis >gi|15724312|gb|AAL06549.1|AF412096_1 AT4g28060/T13J8_170
  misc_feature (3)..(77): Homolog of NCBI NO: 15219886 NR Description: cytochrome c oxidase subunit, putative; protein At1g22450.1, supported by cDNA: 25361., supported by cDNA: supported by cDNA: gi_20465722, supported by cDNA: gi_6518352
  misc_feature (3)..(77): Homolog of NCBI NO: 21554378 NR Description: cytochrome c oxidase subunit, putative
  misc_feature (3)..(77): Homolog of NCBI NO: 34906824 NR Description: putative cytochrome c oxidase subunit 6b-1 [Oryza
  misc_feature (3)..(77): Homolog of NCBI NO: 21592329 NR Description: cytochrome c oxidase subunit 6b [Arabidopsis
  misc_feature (1)..(77): Homolog of NCBI NO: 15234375 NR Description: putative protein; protein id: At4g28060.1
  misc_feature (1)..(76): Homolog of NCBI NO: 32401320 NR Description: cytochrome c oxidase subunit 6b-1 [Griffithsia
MAEIEIKTAPADFRFPTTNQTRHCFTRYVEYHRCLNAKGDDAGVCEKFAKYYRSLCPGEWVEKWNEQREHGTFPGPL

SEQ ID NO: 11689 - DNA, 528 bp, Zea mays subsp. mays
  misc_feature (1)..(528): Ceres Seq. ID no. 13492510
  misc_feature: MA Experiment ID: 108530 Result: Down-regulated in Transcription
  misc_feature: MA Experiment 108530 PARAMETER Experiment Name: Zm_Imbibed_Seeds_P Parameter: Age (day) Value: 6 vs. 2
  misc_feature: MA Experiment 108530 PARAMETER Experiment Name: Zm_Imbibed_Seeds_P Parameter: Organism Value: Zea mays
  misc_feature: MA Experiment 108530 PARAMETER Experiment Name: Zm_Imbibed_Seeds_P Parameter: Plant Line Value: 35A19
  misc_feature: MA Experiment 108530 PARAMETER Experiment Name: Zm_Imbibed_Seeds_P Parameter: Tissue Value: Aerial vs. Embryo
  misc_feature: MA Experiment ID: 108535 Result: Up-regulated in Transcription
  misc_feature: MA Experiment 108535 PARAMETER Experiment Name: Zm_Meristem_P Parameter: Age (day) Value: 8
  misc_feature: MA Experiment 108535 PARAMETER Experiment Name: Zm_Meristem_P Parameter: Organism Value: Zea mays
  misc_feature: MA Experiment 108535 PARAMETER Experiment Name: Zm_Meristem_P Parameter: Plant Line Value: 35A19
  misc_feature: MA Experiment 108535 PARAMETER Experiment Name: Zm_Meristem_P Parameter: Tissue Value: Root Meristem vs. Above Root Meristem
  misc_feature: MA Experiment ID: 20000108 Result: Up-regulated in Transcription
  misc_feature: MA Experiment 20000108 PARAMETER Experiment Name: Zm_Root-Tips_P Parameter: Age (day) Value: 12
  misc_feature: MA Experiment 20000108 PARAMETER Experiment Name: Zm_Root-Tips_P Parameter: Organism Value: Zea mays
  misc_feature: MA Experiment 20000108 PARAMETER Experiment Name: Zm_Root-Tips_P Parameter: Tissue Value: Root tips vs. Root mid region    35
  misc_feature: MA Experiment 20000108 PARAMETER Experiment Name: Zm_Root-Tips_P Parameter: Tissue Value: Root tips vs. Root mid region   Sequence Listing-Misc Features (4)
  misc_feature: MA Experiment ID: 20000487 Result: Up-regulated in Transcription
  misc_feature: MA Experiment 20000487 PARAMETER Experiment Name: Zm_50mM_NH4NO3_L_to_H_P Parameter: Organism Value: Zea mays
  misc_feature: MA Experiment 20000487 PARAMETER Experiment Name: Zm_50mM_NH4NO3_L_to_H_P Parameter: Timepoint (hr) Value: 4
  misc_feature: MA Experiment 20000487 PARAMETER Experiment Name: Zm_50mM_NH4NO3_L_to_H_P Parameter: Tissue Value: Leaves
  misc_feature: MA Experiment 20000487 PARAMETER Experiment Name: Zm_50mM_NH4NO3_L_to_H_P Parameter: Treatment Value: 50mM NH4NO3 vs. 100mM Mannitol
  misc_feature: MA Experiment ID: 20000488 Result: Up-regulated in Transcription
  misc_feature: MA Experiment 20000488 PARAMETER Experiment Name: Zm_50mM_NH4NO3_L_to_H_P Parameter: Organism Value: Zea mays
  misc_feature: MA Experiment 20000488 PARAMETER Experiment Name: Zm_50mM_NH4NO3_L_to_H_P Parameter: Timepoint (hr) Value: 8
  misc_feature: MA Experiment 20000488 PARAMETER Experiment Name: Zm_50mM_NH4NO3_L_to_H_P Parameter: Tissue Value: Leaves
  misc_feature: MA Experiment 20000488 PARAMETER Experiment Name: Zm_50mM_NH4NO3_L_to_H_P Parameter: Treatment Value: 50mM NH4NO3 vs. 100mM Mannitol
  misc_feature: MA Experiment ID: 20000492 Result: Up-regulated in Transcription
  misc_feature: MA Experiment 20000492 PARAMETER Experiment Name: Zm_Hybrid_Seed_Dev_P Parameter: DAP Value: 12
  misc_feature: MA Experiment 20000492 PARAMETER Experiment Name: Zm_Hybrid_Seed_Dev_P Parameter: Organism Value: Zea mays
  misc_feature: MA Experiment 20000492 PARAMETER Experiment Name: Zm_Hybrid_Seed_Dev_P Parameter: Plant Line Value: 35A19
  misc_feature: MA Experiment 20000492 PARAMETER Experiment Name: Zm_Hybrid_Seed_Dev_P Parameter: Tissue Value: Fert Kernel vs. Unfert Floret
  misc_feature: MA Experiment ID: 20000535 Result: Up-regulated in Transcription
  misc_feature: MA Experiment 20000535 PARAMETER Experiment Name: Zm_Hybrid_Seed_Dev_P Parameter: DAP Value: 30 vs. 12
  misc_feature: MA Experiment 20000535 PARAMETER Experiment Name: Zm_Hybrid_Seed_Dev_P Parameter: Organism Value: Zea mays
  misc_feature: MA Experiment 20000535 PARAMETER Experiment Name: Zm_Hybrid_Seed_Dev_P Parameter: Plant Line Value: 35A19
  misc_feature: MA Experiment 20000535 PARAMETER Experiment Name: Zm_Hybrid_Seed_Dev_P Parameter: Tissue Value: Embryo vs. Unfert Floret
  misc_feature: MA Experiment ID: 20000632 Result: Down-regulated in Transcription
  misc_feature: MA Experiment 20000632 PARAMETER Experiment Name: Zm_Herbicide-Treatments_P Parameter: Timepoint (hr) Value: 4
  misc_feature: MA Experiment 20000632 PARAMETER Experiment Name: Zm_Herbicide-Treatments_P Parameter: Tissue Value: Aerial
  misc_feature: MA Experiment 20000632 PARAMETER Experiment Name: Zm_Herbicide-Treatments_P Parameter: Treatment Value: Glean vs. No Treatment
  misc_feature: MA Experiment ID: 20000633 Result: Down-regulated in Transcription
  misc_feature: MA Experiment 20000633 PARAMETER Experiment Name: Zm_Herbicide-Treatments_P Parameter: Timepoint (hr) Value: 4
  misc_feature: MA Experiment 20000633 PARAMETER Experiment Name: Zm_Herbicide-Treatments_P Parameter: Tissue Value: Aerial
  misc_feature: MA Experiment 20000633 PARAMETER Experiment Name: Zm_Herbicide-Treatments_P Parameter: Treatment Value: Trimec vs. No Treatment
  misc_feature: MA Experiment ID: 20001606 Result: Up-regulated in Transcription
  misc_feature: MA Experiment 20001606 PARAMETER Experiment Name: Zm_50ppm_KNO3_L-to-H_P Parameter: Age (day) Value: 19
  misc_feature: MA Experiment 20001606 PARAMETER Experiment Name: Zm_50ppm_KNO3_L-to-H_P Parameter: Organism Value: Zea mays
  misc_feature: MA Experiment 20001606 PARAMETER Experiment Name: Zm_50ppm_KNO3_L-to-H_P Parameter: Plant Line Value: 35A19
  misc_feature: MA Experiment 20001606 PARAMETER Experiment Name: Zm_50ppm_KNO3_L-to-H_P Parameter: Timepoint (hr) Value: 8
  misc_feature: MA Experiment 20001606 PARAMETER Experiment Name: Zm_50ppm_KNO3_L-to-H_P Parameter: Tissue Value: Shoots
  misc_feature: MA Experiment 20001606 PARAMETER Experiment Name: Zm_50ppm_KNO3_L-to-H_P Parameter: Treatment Value: 50ppm KNO3 vs. 50ppm KCl
ctcgtctccactgctctgctgctcctcgcaccgccgccgccgccgccgcagcgacgtaatggcttccgccgcggtgctccggaacgccggctcccggcgcctcttctcctaccctactctccgcgccgctgcgatatatgtaccttctgcgctacccgatgcgcccgcggcggcggcagcgccggcccagccgccaccgacggccgggaccctctgggcgaggtctatggccaccttcacgcgcacgaagccccatgtgaatgtcggcaccattgggcacgtcgatcacggcaaaaccactctcactgctgccattaccaaggtcctggccgaggcagggaaggccaaagccgttgctttcgacgagatcgacaaggctccggaggagaaagccagaggaatcaccattgcgacagctcacgtcgagtatgagacggctaaaaggcattatgctcacgttgattgtccaggtcacgcagattatgtcaagaacatgatcactggagctgctcagcgtttcctgtgttc

SEQ ID NO: 11690 - protein, 175 aa, Zea mays subsp. mays
  peptide (1)..(175): Ceres Seq. ID no. 13492511
  misc_feature (83)..(171): Pfam Name: Elongation factor Tu GTP binding domain Pfam Description: Elongation factor Tu GTP binding domain
  misc_feature (20)..(171): Homolog of NCBI NO: 11181616 NR Description: translational elongation factor EF-TuM [Zea mays]
  misc_feature (20)..(171): Homolog of NCBI NO: 18001149 NR Description: translational elongation factor Tu [Oryza sativa] elongation factor Tu [Oryza sativa] >gi|27573344|gb|AAO20062.1|
  misc_feature (20)..(171): Homolog of NCBI NO: 15236220 NR Description: elongation factor Tu (EF-Tu), putative thaliana] >gi|25090254|sp|Q9ZT91|EFTM_ARATH Elongation factor Tu,
  misc_feature (67)..(171): Homolog of NCBI NO: 1149571 NR Description: mitochondrial elongation factor Tu [Arabidopsis
  misc_feature (75)..(171): Homolog of NCBI NO: 18311389 NR Description: elongation factor Tu [Clostridium perfringens]
  misc_feature (35)..(171): Homolog of NCBI NO: 22966137 NR Description: hypothetical protein [Rhodospirillum rubrum]
  misc_feature (79)..(171): Homolog of NCBI NO: 20808662 NR Description: GTPases - translation elongation factors
  misc_feature (79)..(171): Homolog of NCBI NO: 20808676 NR Description: GTPases - translation elongation factors
  misc_feature (72)..(171): Homolog of NCBI NO: 22965193 NR Description: hypothetical protein [Rhodopseudomonas palustris]
  misc_feature (77)..(171): Homolog of NCBI NO: 39997951 NR Description: translation elongation factor Tu [Geobacter PCA] >gi|39997962|ref|NP_953913.1| translation elongation factor [Geobacter sulfurreducens PCA] >gi|39984896|gb|AAR36252.1|
SSPLLCCSSHRRRRRRSDVMASAAVLRNAGSRRLFSYPTLRAAAIYVPSALPDAPAAAAAPAQPPPTAGTLWARSMATFTRTKPHVNVGTIGHVDHGKTTLTAAITKVLAEAGKAKAVAFDEIDKAPEEKARGITIATAHVEYETAKRHYAHVDCPGHADYVKNMITGAAQRFLC

SEQ ID NO: 11691 - protein, 156 aa, Zea mays subsp. mays
  peptide (1)..(156): Ceres Seq. ID no. 13492512
  misc_feature (64)..(152): Pfam Name: Elongation factor Tu GTP binding domain Pfam Description: Elongation factor Tu GTP binding domain
  misc_feature (1)..(152): Homolog of NCBI NO: 18001149 NR Description: translational elongation factor Tu [Oryza sativa] elongation factor Tu [Oryza sativa] >gi|27573344|gb|AAO20062.1|
  misc_feature (1)..(152): Homolog of NCBI NO: 15236220 NR Description: elongation factor Tu (EF-Tu), putative thaliana] >gi|25090254|sp|Q9ZT91|EFTM_ARATH Elongation factor Tu,
  misc_feature (48)..(152): Homolog of NCBI NO: 1149571 NR Description: mitochondrial elongation factor Tu [Arabidopsis
  misc_feature (56)..(152): Homolog of NCBI NO: 18311389 NR Description: elongation factor Tu [Clostridium perfringens]
  misc_feature (16)..(152): Homolog of NCBI NO: 22966137 NR Description: hypothetical protein [Rhodospirillum rubrum]
  misc_feature (1)..(152): Homolog of NCBI NO: 11181616 NR Description: translational elongation factor EF-TuM [Zea mays]
  misc_feature (60)..(152): Homolog of NCBI NO: 20808662 NR Description: GTPases - translation elongation factors
  misc_feature (60)..(152): Homolog of NCBI NO: 20808676 NR Description: GTPases - translation elongation factors
  misc_feature (53)..(152): Homolog of NCBI NO: 22965193 NR Description: hypothetical protein [Rhodopseudomonas palustris]
  misc_feature (58)..(152): Homolog of NCBI NO: 39997951 NR Description: translation elongation factor Tu [Geobacter PCA] >gi|39997962|ref|NP_953913.1| translation elongation factor [Geobacter sulfurreducens PCA] >gi|39984896|gb|AAR36252.1|
MASAAVLRNAGSRRLFSYPTLRAAAIYVPSALPDAPAAAAAPAQPPPTAGTLWARSMATFTRTKPHVNVGTIGHVDHGKTTLTAAITKVLAEAGKAKAVAFDEIDKAPEEKARGITIATAHVEYETAKRHYAHVDCPGHADYVKNMITGAAQRFLC

SEQ ID NO: 11692 - protein, 143 aa, Zea mays subsp. mays
  peptide (1)..(143): Ceres Seq. ID no. 13492513
LVSTALLLLAPPPPPPQRRNGFRRGAPERRLPAPLLLPYSPRRCDICTFCATRCARGGGSAGPAATDGRDPLGEVYGHLHAHEAPCECRHHWARRSRQNHSHCCHYQGPGRGREGQSRCFRRDRQGSGGESQRNHHCDSSRRV

SEQ ID NO: 11693 - DNA, 1320 bp, Zea mays subsp. mays
  misc_feature (1)..(1320): Ceres Seq. ID no. 12350438
  misc_feature: MA Experiment ID: 108689 Result: Up-regulated in Transcription
  misc_feature: MA Experiment 108689 PARAMETER Experiment Name: Zm_Drought_Roots_P Parameter: Age (day) Value: 9
  misc_feature: MA Experiment 108689 PARAMETER Experiment Name: Zm_Drought_Roots_P Parameter: Organism Value: Zea mays
  misc_feature: MA Experiment 108689 PARAMETER Experiment Name: Zm_Drought_Roots_P Parameter: Plant Line Value: 35A19
  misc_feature: MA Experiment 108689 PARAMETER Experiment Name: Zm_Drought_Roots_P Parameter: Timepoint (hr) Value: 24
  misc_feature: MA Experiment 108689 PARAMETER Experiment Name: Zm_Drought_Roots_P Parameter: Tissue Value: Roots
  misc_feature: MA Experiment 108689 PARAMETER Experiment Name: Zm_Drought_Roots_P Parameter: Treatment Value: Drought vs. No Drought
  misc_feature: MA Experiment ID: 20000534 Result: Down-regulated in Transcription
  misc_feature: MA Experiment 20000534 PARAMETER Experiment Name: Zm_Hybrid_Pollen_P Parameter: Age (day) Value: 8
  misc_feature: MA Experiment 20000534 PARAMETER Experiment Name: Zm_Hybrid_Pollen_P Parameter: Organism Value: Zea mays
  misc_feature: MA Experiment 20000534 PARAMETER Experiment Name: Zm_Hybrid_Pollen_P Parameter: Plant Line Value: 35A19
  misc_feature: MA Experiment 20000534 PARAMETER Experiment Name: Zm_Hybrid_Pollen_P Parameter: Tissue Value: Pollen vs. Aerial
aagatctccgtgctcgatagctcacatcgattcccgccagcgggttccctcaaaattttcggtctctcttcttcccacgggaccagcagtgttcgattcgagcagagatggcggcggcatgggcggtgctggctttgttcctcgtcgcggcgcaggtggcggcggcggcgccggtcacggcgccagcgttcctgtgggcgcccaaaaactacggattcagctctgatgatgctaaggaggtagtccattaccaaacaatctcaccaaagagcttagctaaatctgttctcgaggaaggtggctgtcaaacttcatgtgctcaagggaggatactcagaataatgttgatgttgccattgtttttattggctcaaagctgcaatcgtcagacatatctaaagataagcaagttgatccagctttagcagacacactgaagctctccttcacacgctcagagttttccatggcattcccctacgtttccaccacagtcgacgagagactagaggactcgttgctatccagctttgccgagaactgcaacaatggtttcggaagaaaccgcgtcacctacacagacacgtgtaccggtcaagatctgaagaaataccacaacatggatgccatcaatgacctggtagtgtcaggggtagcgtcaaggagagtcaaccacccaagtggacagaccgatgtaatcgtcttctgtagcggcgggttcgagaatccaggcactgcgaaatcagaaggagagctgctttcccagcttgtggacttgctggacttgtcgggagccaaatatacggtcctctatgcgtcccaaccgtctggtttgctggagagcccttcgggcctgccgctgggtaggcatctcgcggagaagaagactaacggcacgaaagctgtccagggcgaaaaatgcgatggcgagtgcctcgtcaaatctagtctcctcgaaggaactttcgttgggatagtgcttctcatcatcctgatatcaggactcatgtgcatgatggggatcgatactccctcgaggtttgaagctccccaggagtcttgatctctcccttggactgcagaatccgcggggcggttgtgacgagggcacgcggcggcgttgaggggggccggtgttctgttggtctgcactgtggatatatatcgtttagcttcccatttggaagggagtacgccttgtgtatttttttttaccgagccaactgtcactcacaatgtgctagaattttttggtgtaatatttggctatttgcgtttcgcgtctacggacaactaataagctgaggcctgaggcattgc

SEQ ID NO: 11694 - protein, 249 aa, Zea mays subsp. mays; identical to SEQ ID NO: 4545
  peptide (1)..(249): Ceres Seq. ID no. 12350439
  misc_feature (1)..(249): Homolog of NCBI NO: 24417230 NR Description: unknown [Arabidopsis thaliana]
  misc_feature (1)..(249): Homolog of NCBI NO: 30682651 NR Description: expressed protein [Arabidopsis thaliana] unknown protein [Arabidopsis thaliana] unknown protein [Arabidopsis thaliana]
  misc_feature (45)..(249): Homolog of NCBI NO: 21618303 NR Description: unknown [Arabidopsis thaliana]
  misc_feature (1)..(42): Homolog of NCBI NO: 25405838 NR Description: hypothetical protein T5A14.4 [imported] - thaliana >gi|4204260|gb|AAD10641.1| Hypothetical protein

SEQ ID NO: 11695 - protein, 198 aa, Zea mays subsp. mays
  peptide (1)..(198): Ceres Seq. ID no. 12350440
  misc_feature (1)..(198): Homolog of NCBI NO: 24417230 NR Description: unknown [Arabidopsis thaliana]
  misc_feature (1)..(198): Homolog of NCBI NO: 30682651 NR Description: expressed protein [Arabidopsis thaliana] unknown protein [Arabidopsis thaliana] unknown protein [Arabidopsis thaliana]
  misc_feature (1)..(198): Homolog of NCBI NO: 21618303 NR Description: unknown [Arabidopsis thaliana]
MAFPYVSTTVDERLEDSLLSSFAENCNNGFGRNRVTYTDTCTGQDLKKYHNMDAINDLVVSGVASRRVNHPSGQTDVIVFCSGGFENPGTAKSEGELLSQLVDLLDLSGAKYTVLYASQPSGLLESPSGLPLGRHLAEKKTNGTKAVQGEKCDGECLVKSSLLEGTFVGIVLLIILISGLMCMMGIDTPSRFEAPQES

SEQ ID NO: 11696 - protein, 147 aa, Zea mays subsp. mays
  peptide (1)..(147): Ceres Seq. ID no. 12350441
  misc_feature (1)..(147): Homolog of NCBI NO: 24417230 NR Description: unknown [Arabidopsis thaliana]
  misc_feature (1)..(147): Homolog of NCBI NO: 30682651 NR Description: expressed protein [Arabidopsis thaliana] unknown protein [Arabidopsis thaliana] unknown protein [Arabidopsis thaliana]
  misc_feature (1)..(147): Homolog of NCBI NO: 21618303 NR Description: unknown [Arabidopsis thaliana]
MDAINDLVVSGVASRRVNHPSGQTDVIVFCSGGFENPGTAKSEGELLSQLVDLLDLSGAKYTVLYASQPSGLLESPSGLPLGRHLAEKKTNGTKAVQGEKCDGECLVKSSLLEGTFVGIVLLIILISGLMCMMGIDTPSRFEAPQES

SEQ ID NO: 11697 - DNA, 1364 bp, Zea mays subsp. mays
  misc_feature (1)..(1364): Ceres Seq. ID no. 13498509
  misc_feature: MA Experiment ID: 20000534 Result: Down-regulated in Transcription
  misc_feature: MA Experiment 20000534 PARAMETER Experiment Name: Zm_Hybrid_Pollen_P Parameter: Age (day) Value: 8
  misc_feature: MA Experiment 20000534 PARAMETER Experiment Name: Zm_Hybrid_Pollen_P Parameter: Organism Value: Zea mays
  misc_feature: MA Experiment 20000534 PARAMETER Experiment Name: Zm_Hybrid_Pollen_P Parameter: Plant Line Value: 35A19
  misc_feature: MA Experiment 20000534 PARAMETER Experiment Name: Zm_Hybrid_Pollen_P Parameter: Tissue Value: Pollen vs. Aerial
acgcacctggtttcgtccccaaatctcactcaatccccagtcccgacacccatcctctccaccgaagtcaccaccgcatggacgacgccgcgaatcccacccctccaccatccacctccgccgcatccgcggcggccgcggcggcgcaacaccagcagctccagcgccaactcttcctaatgcagcaggcgcagtcccatccgcagcagctgtcgcagcaggccatgtcccgcttcccctccaacatcgacgctcacctccgccctctagggccgcttcgcttccaacagccccagccccagccccagccgtcccactcccagggtccatctcagtcgccgtcgcaggccacgcagcaggcgtcaccccagcagcagcagcagcaggcggcggcggcggcggcagcggcgcaggcacaagcacaggcccaggcccaggcggcacgggtacgaagccccgagatggagatggcgctgcaggacgccatgcgggtctgcaatccggacgtcaagacgcccttccagtccatcgaggacgctgtcaacaggttattaccttaccatgttgttgccgactatgaggctgaagaagatgacaggatccttgatagcgacacaacaggccagatcccttctcgcctgcagcaatgggaccataatattctggtgaagattgctgagttcacgacaacttttgacaagcaagtattggcatataacataatgaccaagaaaagggccatcggtgagttcaggtcggaggagcggctcatgctggagcaagccttattgcaggaggaaaagcaagctatgctgggactgagggcagagatggagtcgagagagaaagctggtcgcgaggctgccgaagtgaagatgcgtttggcaatggagcatgctcgtgctgaggcacaagctcactctgagatgatgaatcatggtcctataagggccagtgctgttgcttcgcaaggggaggatggtccgagtcatgacatggtgcaagaacatggcgaagatgggtggggaaattctcagagggatgatgaagatccatcggaggatttcctcaacgatgagaacgaacctgagaatgggaactcagatgggcaggaggactggcgcagatctggggagtttgatctcaactctaggtaaggcagttggatttccacatgaaggtttctaggtaggctacgacatgctggtattgtatctactattctattgttgtgttcggtgaagatgtctttgtggctgtaaacatggcattcgaacaattcagtttctttgtaatttgactagtaatatttacttgagcactcaatatgtgccatttccaacttggagaaaaaaaattacaat

SEQ ID NO: 11698 - protein, 384 aa, Zea mays subsp. mays
  peptide (1)..(384): Ceres Seq. ID no. 13498510
  misc_feature (49)..(384): Homolog of NCBI NO: 15237973 NR Description: glutamine-rich protein [Arabidopsis thaliana]
  misc_feature (49)..(384): Homolog of NCBI NO: 15228554 NR Description: hypothetical protein [Arabidopsis thaliana]
  misc_feature (97)..(310): Homolog of NCBI NO: 38347218 NR Description: OSJNBa0055C08.12 [Oryza sativa (japonica
  misc_feature (90)..(324): Homolog of NCBI NO: 38347219 NR Description: OSJNBa0055C08.13 [Oryza sativa (japonica
  misc_feature (49)..(157): Homolog of NCBI NO: 34881108 NR Description: similar to OPA-containing protein 1 [Rattus
  misc_feature (36)..(159): Homolog of NCBI NO: 7209261 NR Description: alpha-gliadin [Triticum aestivum]
  misc_feature (49)..(157): Homolog of NCBI NO: 91094 NR Description: Mopa box protein - mouse (fragment)
  misc_feature (183)..(304): Homolog of NCBI NO: 38347215 NR Description: OSJNBa0055C08.9 [Oryza sativa (japonica
  misc_feature (49)..(323): Homolog of NCBI NO: 39584063 NR Description: Hypothetical protein CBG11746 [Caenorhabditis
APGFVPKSHSIPSPDTHPLHRSHHRMDDAANPTPPPSTSAASAAAAAAQHQQLQRQLFLMQQAQSHPQQLSQQAMSRFPSNIDAHLRPLGPLRFQQPQPQPQPSHSQGPSQSPSQATQQASPQQQQQQAAAAAAAAQAQAQAQAQAARVRSPEMEMALQDAMRVCNPDVKTPFQSIEDAVNRLLPYHVVADYEAEEDDRILDSDTTGQIPSRLQQWDHNILVKIAEFTTTFDKQVLAYNIMTKKRAIGEFRSEERLMLEQALLQEEKQAMLGLRAEMESREKAGREAAEVKMRLAMEHARAEAQAHSEMMNHGPIRASAVASQGEDGPSHDMVQEHGEDGWGNSQRDDEDPSEDFLNDENEPENGNSDGQEDWRRSGEFDLNSR

SEQ ID NO: 11699 - protein, 359 aa, Zea mays subsp. mays
  peptide (1)..(359): Ceres Seq. ID no. 13498511
  misc_feature (24)..(359): Homolog of NCBI NO: 15237973 NR Description: glutamine-rich protein [Arabidopsis thaliana]
  misc_feature (24)..(359): Homolog of NCBI NO: 15228554 NR Description: hypothetical protein [Arabidopsis thaliana]
  misc_feature (72)..(285): Homolog of NCBI NO: 38347218 NR Description: OSJNBa0055C08.12 [Oryza sativa (japonica
  misc_feature (65)..(299): Homolog of NCBI NO: 38347219 NR Description: OSJNBa0055C08.13 [Oryza sativa (japonica
  misc_feature (24)..(132): Homolog of NCBI NO: 34881108 NR Description: similar to OPA-containing protein 1 [Rattus
  misc_feature (11)..(134): Homolog of NCBI NO: 7209261 NR Description: alpha-gliadin [Triticum aestivum]
  misc_feature (24)..(132): Homolog of NCBI NO: 91094 NR Description: Mopa box protein - mouse (fragment)
  misc_feature (158)..(279): Homolog of NCBI NO: 38347215 NR Description: OSJNBa0055C08.9 [Oryza sativa (japonica
  misc_feature (24)..(298): Homolog of NCBI NO: 39584063 NR Description: Hypothetical protein CBG11746 [Caenorhabditis
MDDAANPTPPPSTSAASAAAAAAQHQQLQRQLFLMQQAQSHPQQLSQQAMSRFPSNIDAHLRPLGPLRFQQPQPQPQPSHSQGPSQSPSQATQQASPQQQQQQAAAAAAAAQAQAQAQAQAARVRSPEMEMALQDAMRVCNPDVKTPFQSIEDAVNRLLPYHVVADYEAEEDDRILDSDTTGQIPSRLQQWDHNILVKIAEFTTTFDKQVLAYNIMTKKRAIGEFRSEERLMLEQALLQEEKQAMLGLRAEMESREKAGREAAEVKMRLAMEHARAEAQAHSEMMNHGPIRASAVASQGEDGPSHDMVQEHGEDGWGNSQRDDEDPSEDFLNDENEPENGNSDGQEDWRRSGEFDLNSR

SEQ ID NO: 11700 - protein, 325 aa, Zea mays subsp. mays
  peptide (1)..(325): Ceres Seq. ID no. 13498512
  misc_feature (1)..(325): Homolog of NCBI NO: 15237973 NR Description: glutamine-rich protein [Arabidopsis thaliana]
  misc_feature (1)..(325): Homolog of NCBI NO: 15228554 NR Description: hypothetical protein [Arabidopsis thaliana]
  misc_feature (38)..(251): Homolog of NCBI NO: 38347218 NR Description: OSJNBa0055C08.12 [Oryza sativa (japonica
  misc_feature (31)..(265): Homolog of NCBI NO: 38347219 NR Description: OSJNBa0055C08.13 [Oryza sativa (japonica
  misc_feature (1)..(98): Homolog of NCBI NO: 34881108 NR Description: similar to OPA-containing protein 1 [Rattus
  misc_feature (1)..(100): Homolog of NCBI NO: 7209261 NR Description: alpha-gliadin [Triticum aestivum]
  misc_feature (1)..(98): Homolog of NCBI NO: 91094 NR Description: Mopa box protein - mouse (fragment)
  misc_feature (124)..(245): Homolog of NCBI NO: 38347215 NR Description: OSJNBa0055C08.9 [Oryza sativa (japonica
  misc_feature (1)..(264): Homolog of NCBI NO: 39584063 NR Description: Hypothetical protein CBG11746 [Caenorhabditis
MQQAQSHPQQLSQQAMSRFPSNIDAHLRPLGPLRFQQPQPQPQPSHSQGPSQSPSQATQQASPQQQQQQAAAAAAAAQAQAQAQAQAARVRSPEMEMALQDAMRVCNPDVKTPFQSIEDAVNRLLPYHVVADYEAEEDDRILDSDTTGQIPSRLQQWDHNILVKIAEFTTTFDKQVLAYNIMTKKRAIGEFRSEERLMLEQALLQEEKQAMLGLRAEMESREKAGREAAEVKMRLAMEHARAEAQAHSEMMNHGPIRASAVASQGEDGPSHDMVQEHGEDGWGNSQRDDEDPSEDFLNDENEPENGNSDGQEDWRRSGEFDLNSR

SEQ ID NO: 11701 - DNA, 1351 bp, Zea mays subsp. mays
  misc_feature (1)..(1351): Ceres Seq. ID no. 13498901
  misc_feature: MA Experiment ID: 108522 Result: Down-regulated in Transcription
  misc_feature: MA Experiment 108522 PARAMETER Experiment Name: Zm_42deg_Heat_P Parameter: Age (day) Value: 8
  misc_feature: MA Experiment 108522 PARAMETER Experiment Name: Zm_42deg_Heat_P Parameter: Organism Value: Zea mays
  misc_feature: MA Experiment 108522 PARAMETER Experiment Name: Zm_42deg_Heat_P Parameter: Plant Line Value: 35A19
  misc_feature: MA Experiment 108522 PARAMETER Experiment Name: Zm_42deg_Heat_P Parameter: Temperature (deg C) Value: 42 vs. 22
  misc_feature: MA Experiment 108522 PARAMETER Experiment Name: Zm_42deg_Heat_P Parameter: Timepoint (hr) Value: 1
  misc_feature: MA Experiment 108522 PARAMETER Experiment Name: Zm_42deg_Heat_P Parameter: Tissue Value: Aerial
  misc_feature: MA Experiment ID: 108523 Result: Down-regulated in Transcription
  misc_feature: MA Experiment 108523 PARAMETER Experiment Name: Zm_42deg_Heat_P Parameter: Age (day) Value: 8
  misc_feature: MA Experiment 108523 PARAMETER Experiment Name: Zm_42deg_Heat_P Parameter: Organism Value: Zea mays
  misc_feature: MA Experiment 108523 PARAMETER Experiment Name: Zm_42deg_Heat_P Parameter: Plant Line Value: 35A19
  misc_feature: MA Experiment 108523 PARAMETER Experiment Name: Zm_42deg_Heat_P Parameter: Temperature (deg C) Value: 42 vs. 22
  misc_feature: MA Experiment 108523 PARAMETER Experiment Name: Zm_42deg_Heat_P Parameter: Timepoint (hr) Value: 6
  misc_feature: MA Experiment 108523 PARAMETER Experiment Name: Zm_42deg_Heat_P Parameter: Tissue Value: Aerial
  misc_feature: MA Experiment ID: 20000492 Result: Up-regulated in Transcription
  misc_feature: MA Experiment 20000492 PARAMETER Experiment Name: Zm_Hybrid_Seed_Dev_P Parameter: DAP Value: 12
  misc_feature: MA Experiment 20000492 PARAMETER Experiment Name: Zm_Hybrid_Seed_Dev_P Parameter: Organism Value: Zea mays
  misc_feature: MA Experiment 20000492 PARAMETER Experiment Name: Zm_Hybrid_Seed_Dev_P Parameter: Plant Line Value: 35A19
  misc_feature: MA Experiment 20000492 PARAMETER Experiment Name: Zm_Hybrid_Seed_Dev_P Parameter: Tissue Value: Fert Kernel vs. Unfert Floret
attcgaaaaagcaaaaatgatatgcacgtcacaatagttgttccccagatttgttttgtcacgcgccccgcccgacgcccgccacggcgccaccatgtcgcaggctacggaggtcgtcggaaacccgtacgccgccgagctcgctgcagccaagaaggccgtcgccctagcggcccgcctctgccagagagtgcagcggagcattttgcactctgacattcaatcgaaggcagacaagactcctgttacagttgcggattatggatcacaggtactggtatgtctggtcctgaagaaggaattgccttctcactctttctcaatcatagctgaagaggattcaaaagacttgagagaagatggtgcccaagaaattatagaacacattaccaccctcattaatgaaaccatcgtaaatgatggttcatacaacatgtcgttatctaaggaagatgtgctttctgcaattgatggtggtaaatctgagggaggtccatctgggcgacattggatattagacccaatagatggcactaaaggtttcataaggggagatcagtatgcagttgcacttggactacttgatgagggcaaagttgttctgggtgtgttgggatgtccaaatcttccattaaaatcaacaaacaagaacaatagcagctcttttggggatcgaataggttccctcttttttgctacaattggttgtggagcgcaagttgaggccttagaaggatctgagccacaaaagattagtgtttgctccaccaataatccagttgacgcctcattctttgaatcctttgaagcatcacactccaagcgtgatttaactagctccattgcagagaaacttggtgtccgagctcctcctgttagaatggatagccaagcaaaatatggtgccctagcacgtggtgatggtgccatttttctgcgcatcccgcacaaaagttacatagaaacagtttgggatcatgcagctggatcaattattgtcacagaagctggtggcatggtaaaagatgccgcaggaaacgatttggatttttgcaaaggtagatatcttgatcgtgacagaggaattattgcaacaaacaagcatttaatgccactagttctaaaggcggttcaagaggctatgaaggaggaacagtaggctgctgtgttcatggagcagttgcaatatttgttatgacatttcctgtttgaatcttaatattagttttgcacaatctcgatgtgcggaaaagttgttgtacttgtaccatatgctagtgtatcgtgtgagtcatatgccactcacatactcacatttccttatctcaacaaatggatatgaatttacctg

SEQ ID NO: 11702 - protein, 354 aa, Zea mays subsp. mays
  peptide (1)..(354): Ceres Seq. ID no. 13498902
  misc_feature (9)..(354): Homolog of NCBI NO: 14268820 NR Description: diphosphonucleotide phosphatase 1 [Zea mays]
  misc_feature (1)..(354): Homolog of NCBI NO: 3913517 NR Description: 3'(2'),5'-BISPHOSPHATE NUCLEOTIDASE (3'(2'),5-
  misc_feature (12)..(354): Homolog of NCBI NO: 15237567 NR Description: 3(2),5-bisphosphate nucleotidase [Arabidopsis
  misc_feature (11)..(353): Homolog of NCBI NO: 34395640 NR Description: Probable SAL4 phosphatase (3'(2'),5'-bisphosphate
  misc_feature (12)..(354): Homolog of NCBI NO: 18424775 NR Description: 3(2),5-bisphosphate nucleotidase [Arabidopsis
  misc_feature (12)..(354): Homolog of NCBI NO: 21618152 NR Description: 3(2),5-bisphosphate nucleotidase [Arabidopsis
  misc_feature (12)..(353): Homolog of NCBI NO: 15237589 NR Description: 3(2),5-bisphosphate nucleotidase (emb|CAB05889.1)
  misc_feature (11)..(353): Homolog of NCBI NO: 15242383 NR Description: 3'(2'),5'-bisphosphate nucleotidase-related
  misc_feature (12)..(354): Homolog of NCBI NO: 8777312 NR Description: 3'(2'),5'-bisphosphate nucleotidase [Arabidopsis
  misc_feature (9)..(181): Homolog of NCBI NO: 15451579 NR Description: Putative PAP-specific phosphatase [Oryza sativa]
MSQATEVVGNPYAAELAAAKKAVALAARLCQRVQRSILHSDIQSKADKTPVTVADYGSQVLVCLVLKKELPSHSFSIIAEEDSKDLREDGAQEIIEHITTLINETIVNDGSYNMSLSKEDVLSAIDGGKSEGGPSGRHWILDPIDGTKGFIRGDQYAVALGLLDEGKVVLGVLGCPNLPLKSTNKNNSSSFGDRIGSLFFATIGCGAQVEALEGSEPQKISVCSTNNPVDASFFESFEASHSKRDLTSSIAEKLGVRAPPVRMDSQAKYGALARGDGAIFLRIPHKSYIETVWDHAAGSIIVTEAGGMVKDAAGNDLDFCKGRYLDRDRGIIATNKHLMPLVLKAVQEAMKEEQ

SEQ ID NO: 11703 - protein, 241 aa, Zea mays subsp. mays
  peptide (1)..(241): Ceres Seq. ID no. 13498903
  misc_feature (1)..(241): Homolog of NCBI NO: 14268820 NR Description: diphosphonucleotide phosphatase 1 [Zea mays]
  misc_feature (1)..(241): Homolog of NCBI NO: 3913517 NR Description: 3'(2'),5'-BISPHOSPHATE NUCLEOTIDASE (3'(2'),5-
  misc_feature (1)..(241): Homolog of NCBI NO: 15237567 NR Description: 3(2),5-bisphosphate nucleotidase [Arabidopsis
  misc_feature (1)..(240): Homolog of NCBI NO: 34395640 NR Description: Probable SAL4 phosphatase (3'(2'),5'-bisphosphate
  misc_feature (1)..(241): Homolog of NCBI NO: 18424775 NR Description: 3(2),5-bisphosphate nucleotidase [Arabidopsis
  misc_feature (1)..(241): Homolog of NCBI NO: 21618152 NR Description: 3(2),5-bisphosphate nucleotidase [Arabidopsis
  misc_feature (1)..(240): Homolog of NCBI NO: 15237589 NR Description: 3(2),5-bisphosphate nucleotidase (emb|CAB05889.1)
  misc_feature (1)..(240): Homolog of NCBI NO: 15242383 NR Description: 3'(2'),5'-bisphosphate nucleotidase-related
  misc_feature (1)..(241): Homolog of NCBI NO: 8777312 NR Description: 3'(2'),5'-bisphosphate nucleotidase [Arabidopsis
  misc_feature (1)..(68): Homolog of NCBI NO: 15451579 NR Description: Putative PAP-specific phosphatase [Oryza sativa]
MSLSKEDVLSAIDGGKSEGGPSGRHWILDPIDGTKGFIRGDQYAVALGLLDEGKVVLGVLGCPNLPLKSTNKNNSSSFGDRIGSLFFATIGCGAQVEALEGSEPQKISVCSTNNPVDASFFESFEASHSKRDLTSSIAEKLGVRAPPVRMDSQAKYGALARGDGAIFLRIPHKSYIETVWDHAAGSIIVTEAGGMVKDAAGNDLDFCKGRYLDRDRGIIATNKHLMPLVLKAVQEAMKEEQ

SEQ ID NO: 11704 - DNA, 1814 bp, Zea mays subsp. mays
  misc_feature (1)..(1814): Ceres Seq. ID no. 12411778
  misc_feature: MA Experiment ID: 20000478 Result: Down-regulated in Transcription
  misc_feature: MA Experiment 20000478 PARAMETER Experiment Name: Zm_5mM_SA_P Parameter: Age (day) Value: 11
  misc_feature: MA Experiment 20000478 PARAMETER Experiment Name: Zm_5mM_SA_P Parameter: Organism Value: Zea mays
  misc_feature: MA Experiment 20000478 PARAMETER Experiment Name: Zm_5mM_SA_P Parameter: Plant Line Value: 35A19
  misc_feature: MA Experiment 20000478 PARAMETER Experiment Name: Zm_5mM_SA_P Parameter: Timepoint (hr) Value: 72
  misc_feature: MA Experiment 20000478 PARAMETER Experiment Name: Zm_5mM_SA_P Parameter: Tissue Value: Aerial
  misc_feature: MA Experiment 20000478 PARAMETER Experiment Name: Zm_5mM_SA_P Parameter: Treatment Value: 5mM SA vs. No Treatment
acaggaagggaaggggaggaagcagcagcagcacacagctttgctctcgctctcggctccccgtccaccaaaggaggaaacgcgcagcccgcagcgctagccgtcgtctatctcgtctcctagtccaaggaaggaaagaggcgcttggcatgaagcgacctaccaagaatgagacgctgggctacccctggcacaagtagagcaagagccccagcaaccgagccacagtgaggaggactcgagggaagagatgggcaactgcggcacgcgggaggagaatgccgtcgtcgctgcgcacgcacaagttcaacagctccacttgttacaaaatcctgccaagaatgccattggagataggaagcacaaccgcacctcatcagatataagtgatccttccacacctaggaaagctgaagatgccaagaacatttccatatacaacgatgtgattgtcttcacattgtttgagctagagacaatcacaaagagcttccgtgccgattatgttctcggcgaaggaggatttgggaccgtttacaagggctacatagatgaaaatgtcagggtggggctgaagtcactgcctgttgcagtcaaggtgctcaacaaagatggacaccaagggcacagagaatggcttaccgaagttaactgcctggggcagttaaggcatccaaacttggtgaagttgatcggatattgctgcgaagatgaccatcggctgcttgtctacgagttcatgtttcgaggaagcctagaaaaccacctattccgaaagacagctacaccattaccctggggtactaggatgtcaatcgcactgggagctgctaaagggcttgcttgcctccacaatgctcaaaggcctgtcatctacagagatttcaagacatcaaatattctactggactctgattatactgctaagctgtctgactttggcctggcaaaagctggccctgaaggtgatcagacccatgtatcaacacgggtgatgggaacctacggttatgctgcccctgaatatgtgatgactggccacttgactgctagaagtgatgtctacagcttcggtgtggtccttctggagctcttgacagggcgcaagtcaatcgacaagtcgcggcccagcagggagcagagcctggttgactgggccctccccaagctgaacgacaagaggcggcttctccagatcatcgacccgagactggaggggcagtactcggccagagccgcccacaaagcctgcagccttgcgttctactgcctgagccagaaccccaaggccaggccactcatgagcgacgtcgtcgagaccctcgaaccgttgcagggcagcggtggaggcgacggacgcggccagccttctggccttcctgactataggggtcgccgcaggataaccgggaacagcgtccacttcagggccatcccgaaccccaagtgctcccccgccgtcccggccacggcttgccgagtgcggtgatgggtgctgtgtttcggttggagttgccggggtaggttccgttgtgtatattgcggccgtgggcggtggtgtgtgtgtgggtgcatgtgtgtgcttggcggcggcggggtttcggtttcttctcgggttttggccggcgttttgatgtgtaaatttgatctgcgtgctgcattgctgctgctgcttttgtaaggccctctaattttcactgtggtcttatgtatccttcgactgagcgagccctgctgaaactggcgggttcgggattaaccctagaaatgaaatgaaaggctgaaccgagagcgggttggatgattgatatggc

SEQ ID NO: 11705 - protein, 412 aa, Zea mays subsp. mays
  peptide (1)..(412): Ceres Seq. ID no. 12411779
  misc_feature (81)..(358): Pfam Name: Protein kinase domain Pfam Description: Protein kinase domain
  misc_feature (1)..(412): Homolog of NCBI NO: 30679085 NR Description: protein kinase family [Arabidopsis thaliana]
  misc_feature (1)..(412): Homolog of NCBI NO: 9542860 NR Description: protein kinase-like protein [Arabidopsis thaliana]
  misc_feature (44)..(362): Homolog of NCBI NO: 15225019 NR Description: putative protein kinase; protein id: At2g05940.1, by cDNA: gi_15810412, supported by cDNA: gi_21280976 [Arabidopsis >gi|25287639|pir||C84473 probable protein kinase putative protein
  misc_feature (45)..(362): Homolog of NCBI NO: 30013675 NR Description: Avr9/Cf-9 rapidly elicited protein 264 [Nicotiana
  misc_feature (1)..(364): Homolog of NCBI NO: 15241220 NR Description: protein kinase-like protein; protein id:
  misc_feature (22)..(365): Homolog of NCBI NO: 22325532 NR Description: putative protein kinase; protein id: At2g07180.1, by cDNA: gi_19423981 [Arabidopsis thaliana]
  misc_feature (22)..(365): Homolog of NCBI NO: 25287636 NR Description: probable protein kinase [imported] - Arabidopsis >gi|3805765|gb|AAC69121.1| putative protein kinase [Arabidopsis
  misc_feature (22)..(365): Homolog of NCBI NO: 19423982 NR Description: putative protein kinase [Arabidopsis thaliana]
  misc_feature (48)..(362): Homolog of NCBI NO: 22773239 NR Description: Putative protein kinase [Oryza sativa (japonica
  misc_feature (44)..(362): Homolog of NCBI NO: 10176804 NR Description: serine/threonine protein kinase-like [Arabidopsis
MGNCGTREENAVVAAHAQVQQLHLLQNPAKNAIGDRKHNRTSSDISDPSTPRKAEDAKNISIYNDVIVFTLFELETITKSFRADYVLGEGGFGTVYKGYIDENVRVGLKSLPVAVKVLNKDGHQGHREWLTEVNCLGQLRHPNLVKLIGYCCEDDHRLLVYEFMFRGSLENHLFRKTATPLPWGTRMSIALGAAKGLACLHNAQRPVIYRDFKTSNILLDSDYTAKLSDFGLAKAGPEGDQTHVSTRVMGTYGYAAPEYVMTGHLTARSDVYSFGVVLLELLTGRKSIDKSRPSREQSLVDWALPKLNDKRRLLQIIDPRLEGQYSARAAHKACSLAFYCLSQNPKARPLMSDVVETLEPLQGSGGGDGRGQPSGLPDYRGRRRITGNSVHFRAIPNPKCSPAVPATACRVR

SEQ ID NO: 11706 - protein, 249 aa, Zea mays subsp. mays
  peptide (1)..(249): Ceres Seq. ID no. 12411780
  misc_feature (1)..(195): Pfam Name: Protein kinase domain Pfam Description: Protein kinase domain
  misc_feature (1)..(249): Homolog of NCBI NO: 30679085 NR Description: protein kinase family [Arabidopsis thaliana]
  misc_feature (1)..(249): Homolog of NCBI NO: 9542860 NR Description: protein kinase-like protein [Arabidopsis thaliana]
  misc_feature (1)..(199): Homolog of NCBI NO: 15225019 NR Description: putative protein kinase; protein id: At2g05940.1, by cDNA: gi_15810412, supported by cDNA: gi_21280976 [Arabidopsis >gi|25287639|pir||C84473 probable protein kinase putative protein
  misc_feature (1)..(199): Homolog of NCBI NO: 30013675 NR Description: Avr9/Cf-9 rapidly elicited protein 264 [Nicotiana
  misc_feature (1)..(201): Homolog of NCBI NO: 15241220 NR Description: protein kinase-like protein; protein id:
  misc_feature (1)..(202): Homolog of NCBI NO: 22325532 NR Description: putative protein kinase; protein id: At2g07180.1, by cDNA: gi_19423981 [Arabidopsis thaliana]
  misc_feature (1)..(202): Homolog of NCBI NO: 25287636 NR Description: probable protein kinase [imported] - Arabidopsis >gi|3805765|gb|AAC69121.1| putative protein kinase [Arabidopsis
  misc_feature (1)..(202): Homolog of NCBI NO: 19423982 NR Description: putative protein kinase [Arabidopsis thaliana]
  misc_feature (1)..(199): Homolog of NCBI NO: 22773239 NR Description: Putative protein kinase [Oryza sativa (japonica
  misc_feature (1)..(199): Homolog of NCBI NO: 10176804 NR Description: serine/threonine protein kinase-like [Arabidopsis
MFRGSLENHLFRKTATPLPWGTRMSIALGAAKGLACLHNAQRPVIYRDFKTSNILLDSDYTAKLSDFGLAKAGPEGDQTHVSTRVMGTYGYAAPEYVMTGHLTARSDVYSFGVVLLELLTGRKSIDKSRPSREQSLVDWALPKLNDKRRLLQIIDPRLEGQYSARAAHKACSLAFYCLSQNPKARPLMSDVVETLEPLQGSGGGDGRGQPSGLPDYRGRRRITGNSVHFRAIPNPKCSPAVPATACRVR

SEQ ID NO: 11707 - protein, 226 aa, Zea mays subsp. mays
  peptide (1)..(226): Ceres Seq. ID no. 12411781
  misc_feature (1)..(172): Pfam Name: Protein kinase domain Pfam Description: Protein kinase domain
  misc_feature (1)..(226): Homolog of NCBI NO: 30679085 NR Description: protein kinase family [Arabidopsis thaliana]
  misc_feature (1)..(226): Homolog of NCBI NO: 9542860 NR Description: protein kinase-like protein [Arabidopsis thaliana]
  misc_feature (1)..(176): Homolog of NCBI NO: 15225019 NR Description: putative protein kinase; protein id: At2g05940.1, by cDNA: gi_15810412, supported by cDNA: gi_21280976 [Arabidopsis >gi|25287639|pir||C84473 probable protein kinase putative protein
  misc_feature (1)..(176): Homolog of NCBI NO: 30013675 NR Description: Avr9/Cf-9 rapidly elicited protein 264 [Nicotiana
  misc_feature (1)..(178): Homolog of NCBI NO: 15241220 NR Description: protein kinase-like protein; protein id:
  misc_feature (1)..(179): Homolog of NCBI NO: 22325532 NR Description: putative protein kinase; protein id: At2g07180.1, by cDNA: gi_19423981 [Arabidopsis thaliana]
  misc_feature (1)..(179): Homolog of NCBI NO: 25287636 NR Description: probable protein kinase [imported] - Arabidopsis >gi|3805765|gb|AAC69121.1| putative protein kinase [Arabidopsis
  misc_feature (1)..(179): Homolog of NCBI NO: 19423982 NR Description: putative protein kinase [Arabidopsis thaliana]
  misc_feature (1)..(176): Homolog of NCBI NO: 22773239 NR Description: Putative protein kinase [Oryza sativa (japonica
  misc_feature (1)..(176): Homolog of NCBI NO: 10176804 NR Description: serine/threonine protein kinase-like [Arabidopsis
MSIALGAAKGLACLHNAQRPVIYRDFKTSNILLDSDYTAKLSDFGLAKAGPEGDQTHVSTRVMGTYGYAAPEYVMTGHLTARSDVYSFGVVLLELLTGRKSIDKSRPSREQSLVDWALPKLNDKRRLLQIIDPRLEGQYSARAAHKACSLAFYCLSQNPKARPLMSDVVETLEPLQGSGGGDGRGQPSGLPDYRGRRRITGNSVHFRAIPNPKCSPAVPATACRVR

SEQ ID NO: 11708 - DNA, 1314 bp, Zea mays subsp. mays
  misc_feature (1)..(1314): Ceres Seq. ID no. 12342241
  misc_feature: MA Experiment ID: 108523 Result: Down-regulated in Transcription
  misc_feature: MA Experiment 108523 PARAMETER Experiment Name: Zm_42deg_Heat_P Parameter: Age (day) Value: 8
  misc_feature: MA Experiment 108523 PARAMETER Experiment Name: Zm_42deg_Heat_P Parameter: Organism Value: Zea mays
  misc_feature: MA Experiment 108523 PARAMETER Experiment Name: Zm_42deg_Heat_P Parameter: Plant Line Value: 35A19
  misc_feature: MA Experiment 108523 PARAMETER Experiment Name: Zm_42deg_Heat_P Parameter: Temperature (deg C) Value: 42 vs. 22
  misc_feature: MA Experiment 108523 PARAMETER Experiment Name: Zm_42deg_Heat_P Parameter: Timepoint (hr) Value: 6
  misc_feature: MA Experiment 108523 PARAMETER Experiment Name: Zm_42deg_Heat_P Parameter: Tissue Value: Aerial
  misc_feature: MA Experiment ID: 108527 Result: Down-regulated in Transcription
  misc_feature: MA Experiment 108527 PARAMETER Experiment Name: Zm_5mM_NO_P Parameter: Age (day) Value: 8
  misc_feature: MA Experiment 108527 PARAMETER Experiment Name: Zm_5mM_NO_P Parameter: Organism Value: Zea mays
  misc_feature: MA Experiment 108527 PARAMETER Experiment Name: Zm_5mM_NO_P Parameter: Plant Line Value: 35A19
  misc_feature: MA Experiment 108527 PARAMETER Experiment Name: Zm_5mM_NO_P Parameter: Timepoint (hr) Value: 6
  misc_feature: MA Experiment 108527 PARAMETER Experiment Name: Zm_5mM_NO_P Parameter: Tissue Value: Aerial
  misc_feature: MA Experiment 108527 PARAMETER Experiment Name: Zm_5mM_NO_P Parameter: Treatment Value: 5mM NO vs. No Treatment
  misc_feature: MA Experiment ID: 108530 Result: Up-regulated in Transcription
  misc_feature: MA Experiment 108530 PARAMETER Experiment Name: Zm_Imbibed_Seeds_P Parameter: Age (day) Value: 6 vs. 2
  misc_feature: MA Experiment 108530 PARAMETER Experiment Name: Zm_Imbibed_Seeds_P Parameter: Organism Value: Zea mays
  misc_feature: MA Experiment 108530 PARAMETER Experiment Name: Zm_Imbibed_Seeds_P Parameter: Plant Line Value: 35A19
  misc_feature: MA Experiment 108530 PARAMETER Experiment Name: Zm_Imbibed_Seeds_P Parameter: Tissue Value: Aerial vs. Embryo
  misc_feature: MA Experiment ID: 108534 Result: Down-regulated in Transcription
  misc_feature: MA Experiment 108534 PARAMETER Experiment Name: Zm_4deg_Cold_P Parameter: Age (hr) Value: 8
  misc_feature: MA Experiment 108534 PARAMETER Experiment Name: Zm_4deg_Cold_P Parameter: Organism Value: Zea mays
  misc_feature: MA Experiment 108534 PARAMETER Experiment Name: Zm_4deg_Cold_P Parameter: Plant Line Value: 35A19
  misc_feature: MA Experiment 108534 PARAMETER Experiment Name: Zm_4deg_Cold_P Parameter: Temperature (deg C) Value: 4 vs. 22
  misc_feature: MA Experiment 108534 PARAMETER Experiment Name: Zm_4deg_Cold_P Parameter: Timepoint (hr) Value: 6
  misc_feature: MA Experiment 108534 PARAMETER Experiment Name: Zm_4deg_Cold_P Parameter: Tissue Value: Aerial
  misc_feature: MA Experiment ID: 108535 Result: Down-regulated in Transcription
  misc_feature: MA Experiment 108535 PARAMETER Experiment Name: Zm_Meristem_P Parameter: Age (day) Value: 8
  misc_feature: MA Experiment 108535 PARAMETER Experiment Name: Zm_Meristem_P Parameter: Organism Value: Zea mays
  misc_feature: MA Experiment 108535 PARAMETER Experiment Name: Zm_Meristem_P Parameter: Plant Line Value: 35A19
  misc_feature: MA Experiment 108535 PARAMETER Experiment Name: Zm_Meristem_P Parameter: Tissue Value: Root Meristem vs. Above Root Meristem
  misc_feature: MA Experiment ID: 108543 Result: Up-regulated in Transcription
  misc_feature: MA Experiment ID: 108544 Result: Up-regulated in Transcription
  misc_feature: MA Experiment ID: 108559 Result: Down-regulated in Transcription
  misc_feature: MA Experiment 108559 PARAMETER Experiment Name: Zm_5mM_NO_P Parameter: Age (day) Value: 8
  misc_feature: MA Experiment 108559 PARAMETER Experiment Name: Zm_5mM_NO_P Parameter: Organism Value: Zea mays
  misc_feature: MA Experiment 108559 PARAMETER Experiment Name: Zm_5mM_NO_P Parameter: Plant Line Value: 35A19
  misc_feature: MA Experiment 108559 PARAMETER Experiment Name: Zm_5mM_NO_P Parameter: Timepoint (hr) Value: 12
  misc_feature: MA Experiment 108559 PARAMETER Experiment Name: Zm_5mM_NO_P Parameter: Tissue Value: Aerial
  misc_feature: MA Experiment 108559 PARAMETER Experiment Name: Zm_5mM_NO_P Parameter: Treatment Value: 5mM NO vs. No Treatment
  misc_feature: MA Experiment ID: 20000492 Result: Down-regulated in Transcription
  misc_feature: MA Experiment 20000492 PARAMETER Experiment Name: Zm_Hybrid_Seed_Dev_P Parameter: DAP Value: 12
  misc_feature: MA Experiment 20000492 PARAMETER Experiment Name: Zm_Hybrid_Seed_Dev_P Parameter: Organism Value: Zea mays
  misc_feature: MA Experiment 20000492 PARAMETER Experiment Name: Zm_Hybrid_Seed_Dev_P Parameter: Plant Line Value: 35A19
  misc_feature: MA Experiment 20000492 PARAMETER Experiment Name: Zm_Hybrid_Seed_Dev_P Parameter: Tissue Value: Fert Kernel vs. Unfert Floret
  misc_feature: MA Experiment ID: 20000535 Result: Down-regulated in Transcription
  misc_feature: MA Experiment 20000535 PARAMETER Experiment Name: Zm_Hybrid_Seed_Dev_P Parameter: DAP Value: 30 vs. 12
  misc_feature: MA Experiment 20000535 PARAMETER Experiment Name: Zm_Hybrid_Seed_Dev_P Parameter: Organism Value: Zea mays
  misc_feature: MA Experiment 20000535 PARAMETER Experiment Name: Zm_Hybrid_Seed_Dev_P Parameter: Plant Line Value: 35A19
  misc_feature: MA Experiment 20000535 PARAMETER Experiment Name: Zm_Hybrid_Seed_Dev_P Parameter: Tissue Value: Embryo vs. Unfert Floret
  misc_feature: MA Experiment ID: 20001608 Result: Down-regulated in Transcription
  misc_feature: MA Experiment 20001608 PARAMETER Experiment Name: Zm_50ppm_KNO3_L-to-H_P Parameter: Age (day) Value: 21
  misc_feature: MA Experiment 20001608 PARAMETER Experiment Name: Zm_50ppm_KNO3_L-to-H_P Parameter: Organism Value: Zea mays
  misc_feature: MA Experiment 20001608 PARAMETER Experiment Name: Zm_50ppm_KNO3_L-to-H_P Parameter: Plant Line Value: 35A19
  misc_feature: MA Experiment 20001608 PARAMETER Experiment Name: Zm_50ppm_KNO3_L-to-H_P Parameter: Timepoint (hr) Value: 48
  misc_feature: MA Experiment 20001608 PARAMETER Experiment Name: Zm_50ppm_KNO3_L-to-H_P Parameter: Tissue Value: Shoots
  misc_feature: MA Experiment 20001608 PARAMETER Experiment Name: Zm_50ppm_KNO3_L-to-H_P Parameter: Treatment Value: 50ppm KNO3 vs. 50ppm KCl
gctttccatgaagaaccaagaaatagtacaggcatcagggaacagatcttggacattcttacattcgagacattatggttttgtgttattgatcaacttggatcaagtaataatgttgtcaaatctgttctcatcaacatcatcgtcagaataataccatttgttctgtggggtctaaaatctgcacatgttatttgcaggttcgtattgatgccgctggcagtatttgtcttcctagcctataaatactggaaaacacggataacaatagatgcagtcgagaagttcctgcgaatgcagcatatgctcgttccgatgagatatgcatacacaaacatcattgcaatcaccagccatttcagagacaagctcggacaaggaggctacggtactgtatacaagggggtgctacagccaggtgaagttcatgttgctattaagatgctaggcaactccaactgtaacggagacgagttcatcagtgaggtggccaccattggaaagatccaccatgtcaatgttgtgcgcctcattgggttttgctccgaggaaaatatcagggcacttatctatgagttcatgccccgtggatctctcgataagtacatcttctcgtcggagaagacattctcatgggacaaactcaacgagatcgctctgggcattgctagaggtctcaactacctacatcacgggtgtgatatgcagattgtacacttcgacatcaagccacacaacatccttcttgacagcaactttgttccaaaagttgctgattttgggcttgccaaactgttcccaagaggcgacactttcgtgccactgagcgctatgcggggaacgataggatatatagctccagatggtatctcgaagctttggtgtcatctctagcaaatctgatgtgtatagctttggaatgctactgttggagatgacgggcgggcgaaggaatgcagatcctcatgcaggaagctccagtcaagcatactacccatccttggtgtacagccaactaagccaaggagatgtgggcgggatcagtaaaggtgttgatatgcacgagttagagaagaagctatgtatcattggactttggtgcatccagatgaagacgcaagatcgacagacgatgagtgaggtcatagagatgcttgaagctagtgtcgatggcatccaaatgcctccaaggccattcttttgtgatgacgagggtgatagttcttactctgcaatctctgaattggatacaatagaagagtagtagtagtaaaatacacttgtgtatatttgatcttaatgtattagactact

SEQ ID NO: 11709 - protein, 297 aa, Zea mays subsp. mays
  peptide (1)..(297): Ceres Seq. ID no. 12342242
  misc_feature (28)..(292): Homolog of NCBI NO: 13377507 NR Description: TAK14 [Triticum aestivum]
  misc_feature (64)..(292): Homolog of NCBI NO: 13377503 NR Description: TAK33 [Triticum aestivum]
  misc_feature (47)..(292): Homolog of NCBI NO: 5523858 NR Description: receptor-like kinase ARK1AS [Hordeum vulgare]
  misc_feature (28)..(292): Homolog of NCBI NO: 5499713 NR Description: receptor-like kinase ARK1AS [Triticum aestivum]
  misc_feature (64)..(292): Homolog of NCBI NO: 5523856 NR Description: receptor-like kinase [Hordeum vulgare]
  misc_feature (67)..(292): Homolog of NCBI NO: 34895304 NR Description: putative receptor kinase [Oryza sativa (japonica group)] >gi|11071999|dbj|BAB17344.1| putative receptor kinase
  misc_feature (67)..(292): Homolog of NCBI NO: 34895310 NR Description: putative receptor kinase [Oryza sativa (japonica group)] >gi|11072002|dbj|BAB17347.1| putative receptor kinase
  misc_feature (67)..(292): Homolog of NCBI NO: 34895286 NR Description: putative receptor kinase [Oryza sativa (japonica group)] >gi|11071990|dbj|BAB17335.1| putative receptor kinase
  misc_feature (64)..(292): Homolog of NCBI NO: 34895290 NR Description: putative receptor kinase [Oryza sativa (japonica group)] >gi|11071992|dbj|BAB17337.1| putative receptor kinase
  misc_feature (44)..(292): Homolog of NCBI NO: 7716489 NR Description: receptor-like protein kinase [Oryza sativa]
AFHEEPRNSTGIREQILDILTFETLWFCVIDQLGSSNNVVKSVLINIIVRIIPFVLWGLKSAHVICRFVLMPLAVFVFLAYKYWKTRITIDAVEKFLRMQHMLVPMRYAYTNIIAITSHFRDKLGQGGYGTVYKGVLQPGEVHVAIKMLGNSNCNGDEFISEVATIGKIHHVNVVRLIGFCSEENIRALIYEFMPRGSLDKYIFSSEKTFSWDKLNEIALGIARGLNYLHHGCDMQIVHFDIKPHNILLDSNFVPKVADFGLAKLFPRGDTFVPLSAMRGTIGYIAPDGISKLWCHL

SEQ ID NO: 11710 - protein, 227 aa, Zea mays subsp. mays
  peptide (1)..(227): Ceres Seq. ID no. 12342243
  misc_feature (1)..(222): Homolog of NCBI NO: 13377507 NR Description: TAK14 [Triticum aestivum]
  misc_feature (1)..(222): Homolog of NCBI NO: 13377503 NR Description: TAK33 [Triticum aestivum]
  misc_feature (1)..(222): Homolog of NCBI NO: 5523858 NR Description: receptor-like kinase ARK1AS [Hordeum vulgare]
  misc_feature (1)..(222): Homolog of NCBI NO: 5499713 NR Description: receptor-like kinase ARK1AS [Triticum aestivum]
  misc_feature (1)..(222): Homolog of NCBI NO: 5523856 NR Description: receptor-like kinase [Hordeum vulgare]
  misc_feature (1)..(222): Homolog of NCBI NO: 34895304 NR Description: putative receptor kinase [Oryza sativa (japonica group)] >gi|11071999|dbj|BAB17344.1| putative receptor kinase
  misc_feature (1)..(222): Homolog of NCBI NO: 34895310 NR Description: putative receptor kinase [Oryza sativa (japonica group)] >gi|11072002|dbj|BAB17347.1| putative receptor kinase
  misc_feature (1)..(222): Homolog of NCBI NO: 34895286 NR Description: putative receptor kinase [Oryza sativa (japonica group)] >gi|11071990|dbj|BAB17335.1| putative receptor kinase
  misc_feature (1)..(222): Homolog of NCBI NO: 34895290 NR Description: putative receptor kinase [Oryza sativa (japonica group)] >gi|11071992|dbj|BAB17337.1| putative receptor kinase
  misc_feature (1)..(222): Homolog of NCBI NO: 7716489 NR Description: receptor-like protein kinase [Oryza sativa]
MPLAVFVFLAYKYWKTRITIDAVEKFLRMQHMLVPMRYAYTNIIAITSHFRDKLGQGGYGTVYKGVLQPGEVHVAIKMLGNSNCNGDEFISEVATIGKIHHVNVVRLIGFCSEENIRALIYEFMPRGSLDKYIFSSEKTFSWDKLNEIALGIARGLNYLHHGCDMQIVHFDIKPHNILLDSNFVPKVADFGLAKLFPRGDTFVPLSAMRGTIGYIAPDGISKLWCHL

SEQ ID NO: 11711 - protein, 199 aa, Zea mays subsp. mays
  peptide (1)..(199): Ceres Seq. ID no. 12342244
  misc_feature (1)..(194): Homolog of NCBI NO: 34895286 NR Description: putative receptor kinase [Oryza sativa (japonica group)] >gi|11071990|dbj|BAB17335.1| putative receptor kinase
  misc_feature (1)..(194): Homolog of NCBI NO: 34895290 NR Description: putative receptor kinase [Oryza sativa (japonica group)] >gi|11071992|dbj|BAB17337.1| putative receptor kinase
  misc_feature (1)..(194): Homolog of NCBI NO: 7716489 NR Description: receptor-like protein kinase [Oryza sativa]
  misc_feature (1)..(194): Homolog of NCBI NO: 13377507 NR Description: TAK14 [Triticum aestivum]
  misc_feature (1)..(194): Homolog of NCBI NO: 13377503 NR Description: TAK33 [Triticum aestivum]
  misc_feature (1)..(194): Homolog of NCBI NO: 5523858 NR Description: receptor-like kinase ARK1AS [Hordeum vulgare]
  misc_feature (1)..(194): Homolog of NCBI NO: 5499713 NR Description: receptor-like kinase ARK1AS [Triticum aestivum]
  misc_feature (1)..(194): Homolog of NCBI NO: 5523856 NR Description: receptor-like kinase [Hordeum vulgare]
  misc_feature (1)..(194): Homolog of NCBI NO: 34895304 NR Description: putative receptor kinase [Oryza sativa (japonica group)] >gi|11071999|dbj|BAB17344.1| putative receptor kinase
  misc_feature (1)..(194): Homolog of NCBI NO: 34895310 NR Description: putative receptor kinase [Oryza sativa (japonica group)] >gi|11072002|dbj|BAB17347.1| putative receptor kinase
MQHMLVPMRYAYTNIIAITSHFRDKLGQGGYGTVYKGVLQPGEVHVAIKMLGNSNCNGDEFISEVATIGKIHHVNVVRLIGFCSEENIRALIYEFMPRGSLDKYIFSSEKTFSWDKLNEIALGIARGLNYLHHGCDMQIVHFDIKPHNILLDSNFVPKVADFGLAKLFPRGDTFVPLSAMRGTIGYIAPDGISKLWCHL

SEQ ID NO: 11712 - DNA, 1056 bp, Zea mays subsp. mays
  misc_feature (1)..(1056): Ceres Seq. ID no. 13493533
  misc_feature: MA Experiment ID: 108504 Result: Up-regulated in Transcription
  misc_feature: MA Experiment 108504 PARAMETER Experiment Name: Zm_Drought_P Parameter: Age (day) Value: 8
  misc_feature: MA Experiment 108504 PARAMETER Experiment Name: Zm_Drought_P Parameter: Organism Value: Zea mays
  misc_feature: MA Experiment 108504 PARAMETER Experiment Name: Zm_Drought_P Parameter: Plant Line Value: 35A19
  misc_feature: MA Experiment 108504 PARAMETER Experiment Name: Zm_Drought_P Parameter: Timepoint (hr) Value: 12
  misc_feature: MA Experiment 108504 PARAMETER Experiment Name: Zm_Drought_P Parameter: Tissue Value: Aerial
  misc_feature: MA Experiment 108504 PARAMETER Experiment Name: Zm_Drought_P Parameter: Treatment Value: Drought vs. No Drought
  misc_feature: MA Experiment ID: 108523 Result: Up-regulated in Transcription
  misc_feature: MA Experiment 108523 PARAMETER Experiment Name: Zm_42deg_Heat_P Parameter: Age (day) Value: 8
  misc_feature: MA Experiment 108523 PARAMETER Experiment Name: Zm_42deg_Heat_P Parameter: Organism Value: Zea mays
  misc_feature: MA Experiment 108523 PARAMETER Experiment Name: Zm_42deg_Heat_P Parameter: Plant Line Value: 35A19
  misc_feature: MA Experiment 108523 PARAMETER Experiment Name: Zm_42deg_Heat_P Parameter: Temperature (deg C) Value: 42 vs. 22
  misc_feature: MA Experiment 108523 PARAMETER Experiment Name: Zm_42deg_Heat_P Parameter: Timepoint (hr) Value: 6
  misc_feature: MA Experiment 108523 PARAMETER Experiment Name: Zm_42deg_Heat_P Parameter: Tissue Value: Aerial
  misc_feature: MA Experiment ID: 108527 Result: Up-regulated in Transcription
  misc_feature: MA Experiment 108527 PARAMETER Experiment Name: Zm_5mM_NO_P Parameter: Age (day) Value: 8
  misc_feature: MA Experiment 108527 PARAMETER Experiment Name: Zm_5mM_NO_P Parameter: Organism Value: Zea mays
  misc_feature: MA Experiment 108527 PARAMETER Experiment Name: Zm_5mM_NO_P Parameter: Plant Line Value: 35A19
  misc_feature: MA Experiment 108527 PARAMETER Experiment Name: Zm_5mM_NO_P Parameter: Timepoint (hr) Value: 6
  misc_feature: MA Experiment 108527 PARAMETER Experiment Name: Zm_5mM_NO_P Parameter: Tissue Value: Aerial
  misc_feature: MA Experiment 108527 PARAMETER Experiment Name: Zm_5mM_NO_P Parameter: Treatment Value: 5mM NO vs. No Treatment
  misc_feature: MA Experiment ID: 108534 Result: Up-regulated in Transcription
  misc_feature: MA Experiment 108534 PARAMETER Experiment Name: Zm_4deg_Cold_P Parameter: Age (hr) Value: 8
  misc_feature: MA Experiment 108534 PARAMETER Experiment Name: Zm_4deg_Cold_P Parameter: Organism Value: Zea mays
  misc_feature: MA Experiment 108534 PARAMETER Experiment Name: Zm_4deg_Cold_P Parameter: Plant Line Value: 35A19
  misc_feature: MA Experiment 108534 PARAMETER Experiment Name: Zm_4deg_Cold_P Parameter: Temperature (deg C) Value: 4 vs. 22
  misc_feature: MA Experiment 108534 PARAMETER Experiment Name: Zm_4deg_Cold_P Parameter: Timepoint (hr) Value: 6
  misc_feature: MA Experiment 108534 PARAMETER Experiment Name: Zm_4deg_Cold_P Parameter: Tissue Value: Aerial
  misc_feature: MA Experiment ID: 108536 Result: Up-regulated in Transcription
  misc_feature: MA Experiment 108536 PARAMETER Experiment Name: Zm_Meristem_P Parameter: Age (day) Value: 8
  misc_feature: MA Experiment 108536 PARAMETER Experiment Name: Zm_Meristem_P Parameter: Organism Value: Zea mays
  misc_feature: MA Experiment 108536 PARAMETER Experiment Name: Zm_Meristem_P Parameter: Plant Line Value: 35A19
  misc_feature: MA Experiment 108536 PARAMETER Experiment Name: Zm_Meristem_P Parameter: Tissue Value: Shoot Meristem vs. Above Shoot Meristem
  misc_feature: MA Experiment ID: 108556 Result: Up-regulated in Transcription
  misc_feature: MA Experiment 108556 PARAMETER Experiment Name: Zm_Drought_P Parameter: Age (day) Value: 9
  misc_feature: MA Experiment 108556 PARAMETER Experiment Name: Zm_Drought_P Parameter: Organism Value: Zea mays
  misc_feature: MA Experiment 108556 PARAMETER Experiment Name: Zm_Drought_P Parameter: Plant Line Value: 35A19
  misc_feature: MA Experiment 108556 PARAMETER Experiment Name: Zm_Drought_P Parameter: Timepoint (hr) Value: 24
  misc_feature: MA Experiment 108556 PARAMETER Experiment Name: Zm_Drought_P Parameter: Tissue Value: Aerial
  misc_feature: MA Experiment 108556 PARAMETER Experiment Name: Zm_Drought_P Parameter: Treatment Value: Drought vs. No Drought
  misc_feature: MA Experiment ID: 20000479 Result: Up-regulated in Transcription
  misc_feature: MA Experiment 20000479 PARAMETER Experiment Name: Zm_Drought_P Parameter: Age (day) Value: 10
  misc_feature: MA Experiment 20000479 PARAMETER Experiment Name: Zm_Drought_P Parameter: Organism Value: Zea mays
  misc_feature: MA Experiment 20000479 PARAMETER Experiment Name: Zm_Drought_P Parameter: Plant Line Value: 35A19
  misc_feature: MA Experiment 20000479 PARAMETER Experiment Name: Zm_Drought_P Parameter: Timepoint (hr) Value: 48
  misc_feature: MA Experiment 20000479 PARAMETER Experiment Name: Zm_Drought_P Parameter: Tissue Value: Aerial
  misc_feature: MA Experiment 20000479 PARAMETER Experiment Name: Zm_Drought_P Parameter: Treatment Value: Drought vs. No Drought
ctagacgccacacacacacatcgcttctccacacgacctcgctgaaccggaagacccgcacacacacgccacttgtgcaccatggcgccccgggtggcggacaagtcgccattgccgctggccaccggcctgaagctgggcgtaggcggaggcatgggcctgggtccacactaccgaggcgtgaggaagcggccgtggggacgttacgccgcggagatccgcgacccagccaagaagagtcgcgtgtggctgggcacgtacgacacggccgaggaggccgccaaggcctacgacgtcgccgcccgcgagttccgtggcgccaaggccaagactaacttcccgttccccctcgccgtcgccgtcgccgtcgccggcggtgctggtagccccagcagcgacagcaccaccttggaatcgagctgtggcggcagcgggtgtggcgtcgaagcgcctgtgcaggcggccatgccgctgaccccggccctcgacctcgatctcttccaccgggcggccgccgtcagcgcggtcaccaccggcggcatgccctttccgttcaaggccttccccgtcgtgcgcccgaccccacatcagtacttcctctacaatcaggccgcggcggccgcggcagccgggtacaggatggtcaaggtcgcctcagctccagtcaccgtagccgccgtcgcgcagagcgactccgactcctcgtctgtggttgatcgcacctgttcgcctcccgcggtgacggcaaagaaggaggtcagcttcgaactggatctgaactggccgccgccggcagagaactagtcgcaccggagttttcagctgacgactttgcagtttcctttttcccttttggccttcatcaggaattgtagtgtagctctgggtgtttggtcttttttttttcttgcatgtagagtgtagactatgatatggtggagccttgtacatagtactgtagtgttttttttttccgccgagacggagtagatctgttcgtgtgtctggacagatcaaaccggcgttgatatgggctttaaaccatggagcatgttg

SEQ ID NO: 11713 - protein, 240 aa, Zea mays subsp. mays
  peptide (1)..(240): Ceres Seq. ID no. 13493534
  misc_feature (28)..(88): Pfam Name: AP2 domain Pfam Description: AP2 domain
  misc_feature (1)..(240): Homolog of NCBI NO: 34908900 NR Description: ethylene-responsive element binding factor 3
  misc_feature (1)..(239): Homolog of NCBI NO: 4099921 NR Description: EREBP-3 homolog [Stylosanthes hamata]
  misc_feature (1)..(239): Homolog of NCBI NO: 4099914 NR Description: ethylene-responsive element binding protein
  misc_feature (1)..(239): Homolog of NCBI NO: 38345793 NR Description: OSJNBa0085I10.10 [Oryza sativa (japonica
  misc_feature (30)..(239): Homolog of NCBI NO: 8809573 NR Description: ethylene-responsive element binding factor
  misc_feature (31)..(239): Homolog of NCBI NO: 15232526 NR Description: ethylene responsive element binding factor 4 [Arabidopsis thaliana] >gi|7531110|sp|O80340|ERF4_ARATH Ethylene element binding factor 4 (AtERF4) >gi|25453552|pir||T52019
  misc_feature (30)..(239): Homolog of NCBI NO: 7489114 NR Description: DNA binding protein EREBP-3 - common tobacco
  misc_feature (24)..(240): Homolog of NCBI NO: 30526297 NR Description: ethylene response factor 2 [Lycopersicon
  misc_feature (5)..(240): Homolog of NCBI NO: 28274832 NR Description: ethylene response factor 3 [Lycopersicon
  misc_feature (31)..(212): Homolog of NCBI NO: 2281635 NR Description: AP2 domain containing protein RAP2.5 [Arabidopsis
MAPRVADKSPLPLATGLKLGVGGGMGLGPHYRGVRKRPWGRYAAEIRDPAKKSRVWLGTYDTAEEAAKAYDVAAREFRGAKAKTNFPFPLAVAVAVAGGAGSPSSDSTTLESSCGGSGCGVEAPVQAAMPLTPALDLDLFHRAAAVSAVTTGGMPFPFKAFPVVRPTPHQYFLYNQAAAAAAAGYRMVKVASAPVTVAAVAQSDSDSSSVVDRTCSPPAVTAKKEVSFELDLNWPPPAEN

SEQ ID NO: 11714 - protein, 216 aa, Zea mays subsp. mays
  peptide (1)..(216): Ceres Seq. ID no. 13493535
  misc_feature (4)..(64): Pfam Name: AP2 domain Pfam Description: AP2 domain
  misc_feature (1)..(216): Homolog of NCBI NO: 34908900 NR Description: ethylene-responsive element binding factor 3
  misc_feature (1)..(215): Homolog of NCBI NO: 4099921 NR Description: EREBP-3 homolog [Stylosanthes hamata]
  misc_feature (1)..(215): Homolog of NCBI NO: 4099914 NR Description: ethylene-responsive element binding protein
  misc_feature (1)..(215): Homolog of NCBI NO: 38345793 NR Description: OSJNBa0085I10.10 [Oryza sativa (japonica
  misc_feature (6)..(215): Homolog of NCBI NO: 8809573 NR Description: ethylene-responsive element binding factor
  misc_feature (7)..(215): Homolog of NCBI NO: 15232526 NR Description: ethylene responsive element binding factor 4 [Arabidopsis thaliana] >gi|7531110|sp|O80340|ERF4_ARATH Ethylene element binding factor 4 (AtERF4) >gi|25453552|pir||T52019
  misc_feature (6)..(215): Homolog of NCBI NO: 7489114 NR Description: DNA binding protein EREBP-3 - common tobacco
  misc_feature (1)..(216): Homolog of NCBI NO: 30526297 NR Description: ethylene response factor 2 [Lycopersicon
  misc_feature (1)..(216): Homolog of NCBI NO: 28274832 NR Description: ethylene response factor 3 [Lycopersicon
  misc_feature (7)..(188): Homolog of NCBI NO: 2281635 NR Description: AP2 domain containing protein RAP2.5 [Arabidopsis
MGLGPHYRGVRKRPWGRYAAEIRDPAKKSRVWLGTYDTAEEAAKAYDVAAREFRGAKAKTNFPFPLAVAVAVAGGAGSPSSDSTTLESSCGGSGCGVEAPVQAAMPLTPALDLDLFHRAAAVSAVTTGGMPFPFKAFPVVRPTPHQYFLYNQAAAAAAAGYRMVKVASAPVTVAAVAQSDSDSSSVVDRTCSPPAVTAKKEVSFELDLNWPPPAEN

SEQ ID NO: 11715 - DNA, 1081 bp, Zea mays subsp. mays
  misc_feature (1)..(1081): Ceres Seq. ID no. 12386976
  misc_feature: MA Experiment ID: 108523 Result: Down-regulated in Transcription
  misc_feature: MA Experiment 108523 PARAMETER Experiment Name: Zm_42deg_Heat_P Parameter: Age (day) Value: 8
  misc_feature: MA Experiment 108523 PARAMETER Experiment Name: Zm_42deg_Heat_P Parameter: Organism Value: Zea mays
  misc_feature: MA Experiment 108523 PARAMETER Experiment Name: Zm_42deg_Heat_P Parameter: Plant Line Value: 35A19
  misc_feature: MA Experiment 108523 PARAMETER Experiment Name: Zm_42deg_Heat_P Parameter: Temperature (deg C) Value: 42 vs. 22
  misc_feature: MA Experiment 108523 PARAMETER Experiment Name: Zm_42deg_Heat_P Parameter: Timepoint (hr) Value: 6
  misc_feature: MA Experiment 108523 PARAMETER Experiment Name: Zm_42deg_Heat_P Parameter: Tissue Value: Aerial
  misc_feature: MA Experiment ID: 108527 Result: Up-regulated in Transcription
  misc_feature: MA Experiment 108527 PARAMETER Experiment Name: Zm_5mM_NO_P Parameter: Age (day) Value: 8
  misc_feature: MA Experiment 108527 PARAMETER Experiment Name: Zm_5mM_NO_P Parameter: Organism Value: Zea mays
  misc_feature: MA Experiment 108527 PARAMETER Experiment Name: Zm_5mM_NO_P Parameter: Plant Line Value: 35A19
  misc_feature: MA Experiment 108527 PARAMETER Experiment Name: Zm_5mM_NO_P Parameter: Timepoint (hr) Value: 6
  misc_feature: MA Experiment 108527 PARAMETER Experiment Name: Zm_5mM_NO_P Parameter: Tissue Value: Aerial
  misc_feature: MA Experiment 108527 PARAMETER Experiment Name: Zm_5mM_NO_P Parameter: Treatment Value: 5mM NO vs. No Treatment
  misc_feature: MA Experiment ID: 108534 Result: Up-regulated in Transcription
  misc_feature: MA Experiment 108534 PARAMETER Experiment Name: Zm_4deg_Cold_P Parameter: Age (hr) Value: 8
  misc_feature: MA Experiment 108534 PARAMETER Experiment Name: Zm_4deg_Cold_P Parameter: Organism Value: Zea mays
  misc_feature: MA Experiment 108534 PARAMETER Experiment Name: Zm_4deg_Cold_P Parameter: Plant Line Value: 35A19
  misc_feature: MA Experiment 108534 PARAMETER Experiment Name: Zm_4deg_Cold_P Parameter: Temperature (deg C) Value: 4 vs. 22
  misc_feature: MA Experiment 108534 PARAMETER Experiment Name: Zm_4deg_Cold_P Parameter: Timepoint (hr) Value: 6
  misc_feature: MA Experiment 108534 PARAMETER Experiment Name: Zm_4deg_Cold_P Parameter: Tissue Value: Aerial
  misc_feature: MA Experiment ID: 108535 Result: Up-regulated in Transcription
  misc_feature: MA Experiment 108535 PARAMETER Experiment Name: Zm_Meristem_P Parameter: Age (day) Value: 8
  misc_feature: MA Experiment 108535 PARAMETER Experiment Name: Zm_Meristem_P Parameter: Organism Value: Zea mays
  misc_feature: MA Experiment 108535 PARAMETER Experiment Name: Zm_Meristem_P Parameter: Plant Line Value: 35A19
  misc_feature: MA Experiment 108535 PARAMETER Experiment Name: Zm_Meristem_P Parameter: Tissue Value: Root Meristem vs. Above Root Meristem
  misc_feature: MA Experiment ID: 108543 Result: Up-regulated in Transcription
  misc_feature: MA Experiment ID: 108559 Result: Up-regulated in Transcription
  misc_feature: MA Experiment 108559 PARAMETER Experiment Name: Zm_5mM_NO_P Parameter: Age (day) Value: 8
  misc_feature: MA Experiment 108559 PARAMETER Experiment Name: Zm_5mM_NO_P Parameter: Organism Value: Zea mays
  misc_feature: MA Experiment 108559 PARAMETER Experiment Name: Zm_5mM_NO_P Parameter: Plant Line Value: 35A19
  misc_feature: MA Experiment 108559 PARAMETER Experiment Name: Zm_5mM_NO_P Parameter: Timepoint (hr) Value: 12
  misc_feature: MA Experiment 108559 PARAMETER Experiment Name: Zm_5mM_NO_P Parameter: Tissue Value: Aerial
  misc_feature: MA Experiment 108559 PARAMETER Experiment Name: Zm_5mM_NO_P Parameter: Treatment Value: 5mM NO vs. No Treatment
  misc_feature: MA Experiment ID: 108689 Result: Up-regulated in Transcription
  misc_feature: MA Experiment 108689 PARAMETER Experiment Name: Zm_Drought_Roots_P Parameter: Age (day) Value: 9
  misc_feature: MA Experiment 108689 PARAMETER Experiment Name: Zm_Drought_Roots_P Parameter: Organism Value: Zea mays
  misc_feature: MA Experiment 108689 PARAMETER Experiment Name: Zm_Drought_Roots_P Parameter: Plant Line Value: 35A19
  misc_feature: MA Experiment 108689 PARAMETER Experiment Name: Zm_Drought_Roots_P Parameter: Timepoint (hr) Value: 24
  misc_feature: MA Experiment 108689 PARAMETER Experiment Name: Zm_Drought_Roots_P Parameter: Tissue Value: Roots
  misc_feature: MA Experiment 108689 PARAMETER Experiment Name: Zm_Drought_Roots_P Parameter: Treatment Value: Drought vs. No Drought
  misc_feature: MA Experiment ID: 20000488 Result: Down-regulated in Transcription
  misc_feature: MA Experiment 20000488 PARAMETER Experiment Name: Zm_50mM_NH4NO3_L_to_H_P Parameter: Organism Value: Zea mays
  misc_feature: MA Experiment 20000488 PARAMETER Experiment Name: Zm_50mM_NH4NO3_L_to_H_P Parameter: Timepoint (hr) Value: 8
  misc_feature: MA Experiment 20000488 PARAMETER Experiment Name: Zm_50mM_NH4NO3_L_to_H_P Parameter: Tissue Value: Leaves
  misc_feature: MA Experiment 20000488 PARAMETER Experiment Name: Zm_50mM_NH4NO3_L_to_H_P Parameter: Treatment Value: 50mM NH4NO3 vs. 100mM Mannitol
aaaggctacaagcctacaagcaaccgcgtccgcgtgtggagcaaggaaggagaggggagccgagcgggcaaaggggagcgcggcgacagacatggcggagcagcacaaggaggagtcgggcgtgacagtgctggacaagatctccgacaagctccacgggcgcgggggcggctcgtcttcgtcgtcggactcggacgacgagcgctcgtcggcgacggccgccgtgaaggccaagatctaccgcatcttcgggcgcgagaagcccgtgcactccgtcctcggcggcggcaagccggccgatctgtttctatggaggaacaagaggatctctggtggggtgctcgcaggcgcaactgccttctggctgctgtttgaggtcatggattaccacctcctcaccctgctatgccactgcctcatcctcaccctggccatcctgttcctctggtccaatgccacgactttcatcaacaagtctcctcctaacatccccgaggtgaagatcccagatgacctggctgtgaattttgcacgttccctgagatatgagatcaacaggggttttgctaccttgagggagattggccaaggccatgacctcaagaaatttctgattgtgattgcaggactgtggatcctttctgttcttgggagctgctgcaatttcctcaccttgtcttacatagtttttatggtactgtacactgtaccggtcctgtatgagaaacatgaggataaggttgatgcttttggtgagaaggccatggtcgagctgaagaagtactacgccatcttcgacgagaaatgtctatcaaagattccgaagggcccattaaaagacaagaagcaacattagaagcgtagaatcagataagggtctgcggtgatttatcatctcttttgaccattactcgtcggttttggaggatggatgtgattccatgtctaaatacctggacgtgctctagtgttttagtgtggtcagtatcaatgttctaaattatctgagattacgctgaatcatgttctgaagtccacgtttaactttgctctccctatcctttggaagtggcaatttcct

SEQ ID NO: 11716 - protein, 284 aa, Zea mays subsp. mays
  peptide (1)..(284): Ceres Seq. ID no. 12386977
  misc_feature (31)..(282): Homolog of NCBI NO: 34909318 NR Description: OSJNBb0021A09.5 [Oryza sativa (japonica
  misc_feature (66)..(282): Homolog of NCBI NO: 34904202 NR Description: P0492F05.25 [Oryza sativa (japonica
  misc_feature (37)..(77): Homolog of NCBI NO: 34904202 NR Description: P0492F05.25 [Oryza sativa (japonica
  misc_feature (42)..(283): Homolog of NCBI NO: 15236556 NR Description: putative protein; protein id: At4g23630.1, by cDNA: 39185., supported by cDNA: gi_15215585 [Arabidopsis
  misc_feature (42)..(283): Homolog of NCBI NO: 15237093 NR Description: putative protein; protein id: At4g11220.1, by cDNA: 23536., supported by cDNA: gi_14334419, supported by gi_15081760, supported by cDNA: gi_16209686 [Arabidopsis
  misc_feature (31)..(282): Homolog of NCBI NO: 15238125 NR Description: putative protein; protein id: At5g41600.1, by cDNA: gi_14334529, supported by cDNA: gi_16323068 [Arabidopsis >gi|10178014|dbj|BAB11466.1| contains similarity to 24 kDa seed
  misc_feature (31)..(276): Homolog of NCBI NO: 15222616 NR Description: hypothetical protein; protein id: At1g64090.1, by cDNA: gi_17381217 [Arabidopsis thaliana] F22C12.15 [Arabidopsis thaliana] >gi|17381218|gb|AAL36421.1|
  misc_feature (31)..(281): Homolog of NCBI NO: 18406991 NR Description: expressed protein; protein id: At2g46170.1, by cDNA: gi_15450758, supported by cDNA: gi_18491130 [Arabidopsis >gi|25408969|pir||E84899 hypothetical protein At2g46170
  misc_feature (35)..(281): Homolog of NCBI NO: 15233147 NR Description: putative protein; protein id: At3g61560.1
  misc_feature (55)..(274): Homolog of NCBI NO: 15234108 NR Description: hypothetical protein; protein id: At4g01230.1
KATSLQATASACGARKERGAERAKGSAATDMAEQHKEESGVTVLDKISDKLHGRGGGSSSSSDSDDERSSATAAVKAKIYRIFGREKPVHSVLGGGKPADLFLWRNKRISGGVLAGATAFWLLFEVMDYHLLTLLCHCLILTLAILFLWSNATTFINKSPPNIPEVKIPDDLAVNFARSLRYEINRGFATLREIGQGHDLKKFLIVIAGLWILSVLGSCCNFLTLSYIVFMVLYTVPVLYEKHEDKVDAFGEKAMVELKKYYAIFDEKCLSKIPKGPLKDKKQH

SEQ ID NO: 11717 - protein, 254 aa, Zea mays subsp. mays
  peptide (1)..(254): Ceres Seq. ID no. 12386978
  misc_feature (1)..(252): Homolog of NCBI NO: 34909318 NR Description: OSJNBb0021A09.5 [Oryza sativa (japonica
  misc_feature (36)..(252): Homolog of NCBI NO: 34904202 NR Description: P0492F05.25 [Oryza sativa (japonica
  misc_feature (7)..(47): Homolog of NCBI NO: 34904202 NR Description: P0492F05.25 [Oryza sativa (japonica
  misc_feature (12)..(253): Homolog of NCBI NO: 15236556 NR Description: putative protein; protein id: At4g23630.1, by cDNA: 39185., supported by cDNA: gi_15215585 [Arabidopsis
  misc_feature (12)..(253): Homolog of NCBI NO: 15237093 NR Description: putative protein; protein id: At4g11220.1, by cDNA: 23536., supported by cDNA: gi_14334419, supported by gi_15081760, supported by cDNA: gi_16209686 [Arabidopsis
  misc_feature (1)..(252): Homolog of NCBI NO: 15238125 NR Description: putative protein; protein id: At5g41600.1, by cDNA: gi_14334529, supported by cDNA: gi_16323068 [Arabidopsis >gi|10178014|dbj|BAB11466.1| contains similarity to 24 kDa seed
  misc_feature (1)..(246): Homolog of NCBI NO: 15222616 NR Description: hypothetical protein; protein id: At1g64090.1, by cDNA: gi_17381217 [Arabidopsis thaliana] F22C12.15 [Arabidopsis thaliana] >gi|17381218|gb|AAL36421.1|
  misc_feature (1)..(251): Homolog of NCBI NO: 18406991 NR Description: expressed protein; protein id: At2g46170.1, by cDNA: gi_15450758, supported by cDNA: gi_18491130 [Arabidopsis >gi|25408969|pir||E84899 hypothetical protein At2g46170
  misc_feature (5)..(251): Homolog of NCBI NO: 15233147 NR Description: putative protein; protein id: At3g61560.1
  misc_feature (25)..(244): Homolog of NCBI NO: 15234108 NR Description: hypothetical protein; protein id: At4g01230.1
MAEQHKEESGVTVLDKISDKLHGRGGGSSSSSDSDDERSSATAAVKAKIYRIFGREKPVHSVLGGGKPADLFLWRNKRISGGVLAGATAFWLLFEVMDYHLLTLLCHCLILTLAILFLWSNATTFINKSPPNIPEVKIPDDLAVNFARSLRYEINRGFATLREIGQGHDLKKFLIVIAGLWILSVLGSCCNFLTLSYIVFMVLYTVPVLYEKHEDKVDAFGEKAMVELKKYYAIFDEKCLSKIPKGPLKDKKQH

SEQ ID NO: 11718 - protein, 158 aa, Zea mays subsp. mays
  peptide (1)..(158): Ceres Seq. ID no. 12386979
  misc_feature (1)..(156): Homolog of NCBI NO: 34909318 NR Description: OSJNBb0021A09.5 [Oryza sativa (japonica
  misc_feature (1)..(156): Homolog of NCBI NO: 34904202 NR Description: P0492F05.25 [Oryza sativa (japonica
  misc_feature (1)..(157): Homolog of NCBI NO: 15236556 NR Description: putative protein; protein id: At4g23630.1, by cDNA: 39185., supported by cDNA: gi_15215585 [Arabidopsis
  misc_feature (1)..(157): Homolog of NCBI NO: 15237093 NR Description: putative protein; protein id: At4g11220.1, by cDNA: 23536., supported by cDNA: gi_14334419, supported by gi_15081760, supported by cDNA: gi_16209686 [Arabidopsis
  misc_feature (1)..(156): Homolog of NCBI NO: 15238125 NR Description: putative protein; protein id: At5g41600.1, by cDNA: gi_14334529, supported by cDNA: gi_16323068 [Arabidopsis >gi|10178014|dbj|BAB11466.1| contains similarity to 24 kDa seed
  misc_feature (1)..(150): Homolog of NCBI NO: 15222616 NR Description: hypothetical protein; protein id: At1g64090.1, by cDNA: gi_17381217 [Arabidopsis thaliana] F22C12.15 [Arabidopsis thaliana] >gi|17381218|gb|AAL36421.1|
  misc_feature (1)..(155): Homolog of NCBI NO: 18406991 NR Description: expressed protein; protein id: At2g46170.1, by cDNA: gi_15450758, supported by cDNA: gi_18491130 [Arabidopsis >gi|25408969|pir||E84899 hypothetical protein At2g46170
  misc_feature (1)..(155): Homolog of NCBI NO: 15233147 NR Description: putative protein; protein id: At3g61560.1
  misc_feature (1)..(148): Homolog of NCBI NO: 15234108 NR Description: hypothetical protein; protein id: At4g01230.1
  misc_feature (1)..(157): Homolog of NCBI NO: 18398810 NR Description: expressed protein; protein id: At3g10260.1, by cDNA: 15153., supported by cDNA: gi_20259182 [Arabidopsis >gi|6056199|gb|AAF02816.1|AC009400_12 unknown protein
MDYHLLTLLCHCLILTLAILFLWSNATTFINKSPPNIPEVKIPDDLAVNFARSLRYEINRGFATLREIGQGHDLKKFLIVIAGLWILSVLGSCCNFLTLSYIVFMVLYTVPVLYEKHEDKVDAFGEKAMVELKKYYAIFDEKCLSKIPKGPLKDKKQH

SEQ ID NO: 11719 - DNA, 1445 bp, Zea mays subsp. mays
  misc_feature (1)..(1445): Ceres Seq. ID no. 12411772
  misc_feature: MA Experiment ID: 108522 Result: Down-regulated in Transcription
  misc_feature: MA Experiment 108522 PARAMETER Experiment Name: Zm_42deg_Heat_P Parameter: Age (day) Value: 8
  misc_feature: MA Experiment 108522 PARAMETER Experiment Name: Zm_42deg_Heat_P Parameter: Organism Value: Zea mays
  misc_feature: MA Experiment 108522 PARAMETER Experiment Name: Zm_42deg_Heat_P Parameter: Plant Line Value: 35A19
  misc_feature: MA Experiment 108522 PARAMETER Experiment Name: Zm_42deg_Heat_P Parameter: Temperature (deg C) Value: 42 vs. 22
  misc_feature: MA Experiment 108522 PARAMETER Experiment Name: Zm_42deg_Heat_P Parameter: Timepoint (hr) Value: 1
  misc_feature: MA Experiment 108522 PARAMETER Experiment Name: Zm_42deg_Heat_P Parameter: Tissue Value: Aerial
  misc_feature: MA Experiment ID: 108544 Result: Down-regulated in Transcription
  misc_feature: MA Experiment ID: 108556 Result: Down-regulated in Transcription
  misc_feature: MA Experiment 108556 PARAMETER Experiment Name: Zm_Drought_P Parameter: Age (day) Value: 9
  misc_feature: MA Experiment 108556 PARAMETER Experiment Name: Zm_Drought_P Parameter: Organism Value: Zea mays
  misc_feature: MA Experiment 108556 PARAMETER Experiment Name: Zm_Drought_P Parameter: Plant Line Value: 35A19
  misc_feature: MA Experiment 108556 PARAMETER Experiment Name: Zm_Drought_P Parameter: Timepoint (hr) Value: 24
  misc_feature: MA Experiment 108556 PARAMETER Experiment Name: Zm_Drought_P Parameter: Tissue Value: Aerial
  misc_feature: MA Experiment 108556 PARAMETER Experiment Name: Zm_Drought_P Parameter: Treatment Value: Drought vs. No Drought
  misc_feature: MA Experiment ID: 108689 Result: Up-regulated in Transcription
  misc_feature: MA Experiment 108689 PARAMETER Experiment Name: Zm_Drought_Roots_P Parameter: Age (day) Value: 9
  misc_feature: MA Experiment 108689 PARAMETER Experiment Name: Zm_Drought_Roots_P Parameter: Organism Value: Zea mays
  misc_feature: MA Experiment 108689 PARAMETER Experiment Name: Zm_Drought_Roots_P Parameter: Plant Line Value: 35A19
  misc_feature: MA Experiment 108689 PARAMETER Experiment Name: Zm_Drought_Roots_P Parameter: Timepoint (hr) Value: 24
  misc_feature: MA Experiment 108689 PARAMETER Experiment Name: Zm_Drought_Roots_P Parameter: Tissue Value: Roots
  misc_feature: MA Experiment 108689 PARAMETER Experiment Name: Zm_Drought_Roots_P Parameter: Treatment Value: Drought vs. No Drought
  misc_feature: MA Experiment ID: 20000477 Result: Down-regulated in Transcription
  misc_feature: MA Experiment 20000477 PARAMETER Experiment Name: Zm_5mM_SA_P Parameter: Age (day) Value: 10
  misc_feature: MA Experiment 20000477 PARAMETER Experiment Name: Zm_5mM_SA_P Parameter: Organism Value: Zea mays
  misc_feature: MA Experiment 20000477 PARAMETER Experiment Name: Zm_5mM_SA_P Parameter: Plant Line Value: 35A19
  misc_feature: MA Experiment 20000477 PARAMETER Experiment Name: Zm_5mM_SA_P Parameter: Timepoint (hr) Value: 48
  misc_feature: MA Experiment 20000477 PARAMETER Experiment Name: Zm_5mM_SA_P Parameter: Tissue Value: Aerial
  misc_feature: MA Experiment 20000477 PARAMETER Experiment Name: Zm_5mM_SA_P Parameter: Treatment Value: 5mM SA vs. No Treatment
  misc_feature: MA Experiment ID: 20000479 Result: Down-regulated in Transcription
  misc_feature: MA Experiment 20000479 PARAMETER Experiment Name: Zm_Drought_P Parameter: Age (day) Value: 10
  misc_feature: MA Experiment 20000479 PARAMETER Experiment Name: Zm_Drought_P Parameter: Organism Value: Zea mays
  misc_feature: MA Experiment 20000479 PARAMETER Experiment Name: Zm_Drought_P Parameter: Plant Line Value: 35A19
  misc_feature: MA Experiment 20000479 PARAMETER Experiment Name: Zm_Drought_P Parameter: Timepoint (hr) Value: 48
  misc_feature: MA Experiment 20000479 PARAMETER Experiment Name: Zm_Drought_P Parameter: Tissue Value: Aerial
  misc_feature: MA Experiment 20000479 PARAMETER Experiment Name: Zm_Drought_P Parameter: Treatment Value: Drought vs. No Drought
  misc_feature: MA Experiment ID: 20000534 Result: Up-regulated in Transcription
  misc_feature: MA Experiment 20000534 PARAMETER Experiment Name: Zm_Hybrid_Pollen_P Parameter: Age (day) Value: 8
  misc_feature: MA Experiment 20000534 PARAMETER Experiment Name: Zm_Hybrid_Pollen_P Parameter: Organism Value: Zea mays
  misc_feature: MA Experiment 20000534 PARAMETER Experiment Name: Zm_Hybrid_Pollen_P Parameter: Plant Line Value: 35A19
  misc_feature: MA Experiment 20000534 PARAMETER Experiment Name: Zm_Hybrid_Pollen_P Parameter: Tissue Value: Pollen vs. Aerial
  misc_feature: MA Experiment ID: 20000626 Result: Down-regulated in Transcription
  misc_feature: MA Experiment 20000626 PARAMETER Experiment Name: Zm_Herbicide-Treatments_P Parameter: Timepoint (hr) Value: 12
  misc_feature: MA Experiment 20000626 PARAMETER Experiment Name: Zm_Herbicide-Treatments_P Parameter: Tissue Value: Aerial
  misc_feature: MA Experiment 20000626 PARAMETER Experiment Name: Zm_Herbicide-Treatments_P Parameter: Treatment Value: Roundup vs. No Treatment
actatccattttcattcaatgcgtccgcgccgcgcgcctccattcctctcgattcccttcctccttccttgttcgaggacctccgtgaccgtggccgagggattgaggacggaaagcgaaaatgatgctgacgcgggcgtcgatgggggtgatggatgcggcggcggtggacgaggtggtgcgtcgcctcgtcgagggcggccgcgggggccggcaggtgcagatgtccgaggccgagatccgccagctctgcgtcgaggccaaacaggtgctgctgtcgcagcccaacctcctccgcatccacgcgcccgtcaagatctgcggtgatatccatggacaatttgttgatctcttgaggctctttgatttgggtggttatcctccaacttcaacttatattttccttggagactatgtggatagaggcaaacaaagcttagaaaccatatgtctgcttctggcatacaagttgaagtaccctgataatatataccttttaaggggaaaccatgaagatgcaaaaattaacagagtttatggtttctatgatgaatgtaaaaggagattcaatgttcgactatggaagatattctgtgattgcttcaactgcttgcctatggcagcacttattgatgacaaaatattatgcatgcatggtggcctctcacctgaattgactagcttggatcaaataaaagatattgagaggcctaccgaaattccagactatggtcttctgtgcgatctcctttggtctgatcccagtcatgatacagaaggttggggggagagtgatagaggtgtttcttgcacttttggcgcagataagcttgttgaatttttggagaagaatgatcttgaccttgtgtgcagagctcatcaggtggtagaagatggctacgagttctttgcagagagaagactagtgaccatcttttcagctccaaactactgtggcgaatttgataatgcaggtgctctattgagcatagatgaaagcttgatgtgttcttttcagatcttgaaaccaaatgaaacaggtgcaccacattcaaggaaacctcttccaagcaaggcaccaaaaggagagaacgtctaatttgtatccagtgacctaatcacaatcgatgtcagctcgaagggggcgatctcgttgtctcggatccaccagggcatggcattagcgttctacacttgctgaatttgtgtggactcaatcggcagcgcttacattcttctgtacagcagcagtgtttctaacttggcatatcgtccgttctgatagttacattgccacagctgcaatattttagtcgggtggacaaggcattttgttgggtacagtagctgttgttttgttagcctttttttggtaatgtttgtttggttgattgaacgctgtgagttttgtttgccgcgtatcttcgtcaggctcgggtatttac

SEQ ID NO: 11720 - protein, 325 aa, Zea mays subsp. mays
  peptide (1)..(325): Ceres Seq. ID no. 12411773
  misc_feature (62)..(257): Pfam Name: Calcineurin-like phosphoesterase Pfam Description: Calcineurin-like phosphoesterase
  misc_feature (8)..(324): Homolog of NCBI NO: 34895162 NR Description: putative serine/threonine protein phosphatase
  misc_feature (9)..(320): Homolog of NCBI NO: 29290586 NR Description: serine threonine protein phosphatase [Phaseolus
  misc_feature (11)..(321): Homolog of NCBI NO: 1346765 NR Description: SERINE/THREONINE PROTEIN PHOSPHATASE PP1
  misc_feature (2)..(316): Homolog of NCBI NO: 30690812 NR Description: serine/threonine protein phosphatase type [Arabidopsis thaliana] >gi|21431804|sp|O82734|PP18_ARATH
  misc_feature (2)..(321): Homolog of NCBI NO: 15230010 NR Description: serine/threonine protein phosphatase (PP1); id: At3g05580.1 [Arabidopsis thaliana] putative serine/threonine protein phosphatase type one
  misc_feature (2)..(313): Homolog of NCBI NO: 30690815 NR Description: serine/threonine protein phosphatase type
  misc_feature (2)..(316): Homolog of NCBI NO: 3153205 NR Description: serine/threonine protein phosphatase type one
  misc_feature (10)..(313): Homolog of NCBI NO: 21593410 NR Description: TOPP8 serine/threonine protein phosphatase type
  misc_feature (11)..(309): Homolog of NCBI NO: 15227080 NR Description: phosphoprotein phosphatase-type 1 catalytic protein id: At2g29400.1, supported by cDNA: gi_166571, supported cDNA: gi_19424067 [Arabidopsis thaliana]
  misc_feature (9)..(308): Homolog of NCBI NO: 5917726 NR Description: serine/threonine protein phosphatase 1; PP1
MMLTRASMGVMDAAAVDEVVRRLVEGGRGGRQVQMSEAEIRQLCVEAKQVLLSQPNLLRIHAPVKICGDIHGQFVDLLRLFDLGGYPPTSTYIFLGDYVDRGKQSLETICLLLAYKLKYPDNIYLLRGNHEDAKINRVYGFYDECKRRFNVRLWKIFCDCFNCLPMAALIDDKILCMHGGLSPELTSLDQIKDIERPTEIPDYGLLCDLLWSDPSHDTEGWGESDRGVSCTFGADKLVEFLEKNDLDLVCRAHQVVEDGYEFFAERRLVTIFSAPNYCGEFDNAGALLSIDESLMCSFQILKPNETGAPHSRKPLPSKAPKGENV

SEQ ID NO: 11721 - protein, 324 aa, Zea mays subsp. mays
  peptide (1)..(324): Ceres Seq. ID no. 12411774
  misc_feature (61)..(256): Pfam Name: Calcineurin-like phosphoesterase Pfam Description: Calcineurin-like phosphoesterase
  misc_feature (7)..(323): Homolog of NCBI NO: 34895162 NR Description: putative serine/threonine protein phosphatase
  misc_feature (8)..(319): Homolog of NCBI NO: 29290586 NR Description: serine threonine protein phosphatase [Phaseolus
  misc_feature (10)..(320): Homolog of NCBI NO: 1346765 NR Description: SERINE/THREONINE PROTEIN PHOSPHATASE PP1
  misc_feature (1)..(315): Homolog of NCBI NO: 30690812 NR Description: serine/threonine protein phosphatase type [Arabidopsis thaliana] >gi|21431804|sp|O82734|PP18_ARATH
  misc_feature (1)..(320): Homolog of NCBI NO: 15230010 NR Description: serine/threonine protein phosphatase (PP1); id: At3g05580.1 [Arabidopsis thaliana] putative serine/threonine protein phosphatase type one
  misc_feature (1)..(312): Homolog of NCBI NO: 30690815 NR Description: serine/threonine protein phosphatase type
  misc_feature (1)..(315): Homolog of NCBI NO: 3153205 NR Description: serine/threonine protein phosphatase type one
  misc_feature (9)..(312): Homolog of NCBI NO: 21593410 NR Description: TOPP8 serine/threonine protein phosphatase type
  misc_feature (10)..(308): Homolog of NCBI NO: 15227080 NR Description: phosphoprotein phosphatase-type 1 catalytic protein id: At2g29400.1, supported by cDNA: gi_166571, supported cDNA: gi_19424067 [Arabidopsis thaliana]
  misc_feature (8)..(307): Homolog of NCBI NO: 5917726 NR Description: serine/threonine protein phosphatase 1; PP1
MLTRASMGVMDAAAVDEVVRRLVEGGRGGRQVQMSEAEIRQLCVEAKQVLLSQPNLLRIHAPVKICGDIHGQFVDLLRLFDLGGYPPTSTYIFLGDYVDRGKQSLETICLLLAYKLKYPDNIYLLRGNHEDAKINRVYGFYDECKRRFNVRLWKIFCDCFNCLPMAALIDDKILCMHGGLSPELTSLDQIKDIERPTEIPDYGLLCDLLWSDPSHDTEGWGESDRGVSCTFGADKLVEFLEKNDLDLVCRAHQVVEDGYEFFAERRLVTIFSAPNYCGEFDNAGALLSIDESLMCSFQILKPNETGAPHSRKPLPSKAPKGENV

SEQ ID NO: 11722 - protein, 318 aa, Zea mays subsp. mays
  peptide (1)..(318): Ceres Seq. ID no. 12411775
  misc_feature (55)..(250): Pfam Name: Calcineurin-like phosphoesterase Pfam Description: Calcineurin-like phosphoesterase
  misc_feature (1)..(317): Homolog of NCBI NO: 34895162 NR Description: putative serine/threonine protein phosphatase
  misc_feature (2)..(313): Homolog of NCBI NO: 29290586 NR Description: serine threonine protein phosphatase [Phaseolus
  misc_feature (4)..(314): Homolog of NCBI NO: 1346765 NR Description: SERINE/THREONINE PROTEIN PHOSPHATASE PP1
  misc_feature (1)..(309): Homolog of NCBI NO: 30690812 NR Description: serine/threonine protein phosphatase type [Arabidopsis thaliana] >gi|21431804|sp|O82734|PP18_ARATH
  misc_feature (1)..(314): Homolog of NCBI NO: 15230010 NR Description: serine/threonine protein phosphatase (PP1); id: At3g05580.1 [Arabidopsis thaliana] putative serine/threonine protein phosphatase type one
  misc_feature (1)..(306): Homolog of NCBI NO: 30690815 NR Description: serine/threonine protein phosphatase type
  misc_feature (1)..(309): Homolog of NCBI NO: 3153205 NR Description: serine/threonine protein phosphatase type one
  misc_feature (3)..(306): Homolog of NCBI NO: 21593410 NR Description: TOPP8 serine/threonine protein phosphatase type
  misc_feature (4)..(302): Homolog of NCBI NO: 15227080 NR Description: phosphoprotein phosphatase-type 1 catalytic protein id: At2g29400.1, supported by cDNA: gi_166571, supported cDNA: gi_19424067 [Arabidopsis thaliana]
  misc_feature (2)..(301): Homolog of NCBI NO: 5917726 NR Description: serine/threonine protein phosphatase 1; PP1
MGVMDAAAVDEVVRRLVEGGRGGRQVQMSEAEIRQLCVEAKQVLLSQPNLLRIHAPVKICGDIHGQFVDLLRLFDLGGYPPTSTYIFLGDYVDRGKQSLETICLLLAYKLKYPDNIYLLRGNHEDAKINRVYGFYDECKRRFNVRLWKIFCDCFNCLPMAALIDDKILCMHGGLSPELTSLDQIKDIERPTEIPDYGLLCDLLWSDPSHDTEGWGESDRGVSCTFGADKLVEFLEKNDLDLVCRAHQVVEDGYEFFAERRLVTIFSAPNYCGEFDNAGALLSIDESLMCSFQILKPNETGAPHSRKPLPSKAPKGENV

SEQ ID NO: 11723 - DNA, 1995 bp, Zea mays subsp. mays
  misc_feature (1)..(1995): Ceres Seq. ID no. 12423833
  misc_feature: MA Experiment ID: 20000534 Result: Up-regulated in Transcription
  misc_feature: MA Experiment 20000534 PARAMETER Experiment Name: Zm_Hybrid_Pollen_P Parameter: Age (day) Value: 8
  misc_feature: MA Experiment 20000534 PARAMETER Experiment Name: Zm_Hybrid_Pollen_P Parameter: Organism Value: Zea mays
  misc_feature: MA Experiment 20000534 PARAMETER Experiment Name: Zm_Hybrid_Pollen_P Parameter: Plant Line Value: 35A19
  misc_feature: MA Experiment 20000534 PARAMETER Experiment Name: Zm_Hybrid_Pollen_P Parameter: Tissue Value: Pollen vs. Aerial
gcacgagaccattacctagaacatcctaatcaaaaagagacgcgaatccctccctcgccccacgtccgaggtcgctcgccaattcgatccgcctcatcgtcgcccgcccgcccgtccgccggtcgaccttgactgctccgtcgcacgtggcgtttcgcagcgcggaatctacccctgggttgggttgggagatccggggaaacccttgttcccgggcgctccgggctcgaatctcgctgcagacgggcaatgtgagcgctctccatcggagagggacgatctgcggggcggttgttggccgggtgaatcgtgcggtgcggggttgcgggaatggagcacgtgatcggagggaagtttaagcttgggaagaagatcgggagcggatctttcggggagctctatctcggtgtgaacgtacagagcggcgaagaggtggctatcaagttggaatctgtaaaatcaaggcatcctcagcttcattatgagtcaaaactatacatgcttctccaagggggaactggaattcctcatttgaaatggtttggagtggatggggagtacaatgtcatggtcattgatcttcttggtccaagcctcgaagacttgttcaactactgtaacagaaagttttctcttaaaacagtacttatgctagctgatcagatgatatctagggtagagtacatgcacacgagggggtttcttcatcgtgatatcaagccagacaacttcctcatgggcttaggccgtaaaacaagtcaggtttatgtcattgactatggccttgcgaagaagtatcgggacctccaaactcatagacacattccatacagggagaacaaaaacctcacaggaacagcacgatatgctagtgtaaacacccatcttggagtagaacaaagcaggagagatgacttagagtctcttggttatgtgctgatgtacttcttaagaggaagccttccttggcaaggcctgaaagctggaacgaaaaaacaaaagtatgacaaaattagtgagaagaaaatgctaacctcaattgaggccctgtgtaaatcttatccatcagaattcgttacatatttccattattgccgctctttgcaatttgaagataagccagactacagctatttgaagaaaaattttcgggatttattcatccgtgaaggttaccagcctgattatgtatttgattggactgtatcaaggcaagctgcggacaataacagattgcgactgagtgggaagacaggtgggttggtgggaccatctgtggatcgggctgaacgagctgcatcaaaacaggatgttccacatagattcactggtccagctgatgcattggctaaaagaactggctctggttctggtcattatggagaacacacaaagcacagaactctgttggattcccttatggcatccaatatgggtgttgactcggataaaagaaggcattcatcatctcgcaatggaagcacatcaaggaaggctcttctgtcaagcaaccgaggttctggagaccccagtgaaccaaatcgcagcagccacctagttccgaccaccaccagcagcagccgtccatcgaccaatcaaaggcttcaccactcaactggacttgagggcaggacctcatcatttccaaaacctggaagaatcggctatgatgatcccacaatgaggagttttgaacgccttactattagcgcagagaggaggaaatgaatctttggaagagcaaacgatctgagctgctcccggcgagtatactgattcactgaatggattctgtgctgtgcatggtgctgagctctgcacatagcggtgctcattgattcttggcacagatgatttgagttatgtacattcgtttaactcttccaaaaggttagcgaagcattttacaccccgctatgagggaccggggatcggctgcaatgtttaagccgtggtgatttaagatgatgttgactctaatacttatataatgac

SEQ ID NO: 11724 - protein, 465 aa, Zea mays subsp. mays
  peptide (1)..(465): Ceres Seq. ID no. 12423834
  misc_feature (1)..(465): Homolog of NCBI NO: 15236471 NR Description: casein kinase I; protein id: At4g14340.1, by cDNA: gi_15450524, supported by cDNA: gi_16974430, supported cDNA: gi_9965744 [Arabidopsis thaliana] >gi|7488072|pir||C71405
  misc_feature (1)..(465): Homolog of NCBI NO: 15239840 NR Description: casein kinase I; protein id: At5g43320.1, by cDNA: gi_13430689, supported by cDNA: gi_14532893 [Arabidopsis >gi|8843885|dbj|BAA97411.1| casein kinase I [Arabidopsis
  misc_feature (1)..(459): Homolog of NCBI NO: 18417216 NR Description: protein kinase ADK1-like protein; protein id: supported by cDNA: 113439., supported by cDNA: gi_20466497
  misc_feature (1)..(459): Homolog of NCBI NO: 21536851 NR Description: protein kinase ADK1-like protein [Arabidopsis
  misc_feature (1)..(459): Homolog of NCBI NO: 15240091 NR Description: casein kinase I; protein id: At5g44100.1, by cDNA: gi_18087639 [Arabidopsis thaliana]
  misc_feature (1)..(459): Homolog of NCBI NO: 18087640 NR Description: AT5g44100/MLN1_2 [Arabidopsis thaliana]
  misc_feature (1)..(465): Homolog of NCBI NO: 15219733 NR Description: putative casein kinase I; protein id: At1g04440.1
  misc_feature (1)..(465): Homolog of NCBI NO: 27754653 NR Description: putative casein kinase I [Arabidopsis thaliana]
  misc_feature (1)..(438): Homolog of NCBI NO: 15229427 NR Description: putative casein kinase I; protein id: supported by cDNA: gi_15809823, supported by cDNA: gi_18377818 thaliana] >gi|11994319|dbj|BAB02278.1| casein kinase [Arabidopsis
  misc_feature (1)..(300): Homolog of NCBI NO: 4503093 NR Description: casein kinase 1 epsilon; CKI-epsilon; casein I epsilon [Homo sapiens] >gi|23199991|ref|NP_689407.1| casein
MEHVIGGKFKLGKKIGSGSFGELYLGVNVQSGEEVAIKLESVKSRHPQLHYESKLYMLLQGGTGIPHLKWFGVDGEYNVMVIDLLGPSLEDLFNYCNRKFSLKTVLMLADQMISRVEYMHTRGFLHRDIKPDNFLMGLGRKTSQVYVIDYGLAKKYRDLQTHRHIPYRENKNLTGTARYASVNTHLGVEQSRRDDLESLGYVLMYFLRGSLPWQGLKAGTKKQKYDKISEKKMLTSIEALCKSYPSEFVTYFHYCRSLQFEDKPDYSYLKKNFRDLFIREGYQPDYVFDWTVSRQAADNNRLRLSGKTGGLVGPSVDRAERAASKQDVPHRFTGPADALAKRTGSGSGHYGEHTKHRTLLDSLMASNMGVDSDKRRHSSSRNGSTSRKALLSSNRGSGDPSEPNRSSHLVPTTTSSSRPSTNQRLHHSTGLEGRTSSFPKPGRIGYDDPTMRSFERLTISAERRK

SEQ ID NO: 11725 - protein, 409 aa, Zea mays subsp. mays
  peptide (1)..(409): Ceres Seq. ID no. 12423835
  misc_feature (1)..(409): Homolog of NCBI NO: 15236471 NR Description: casein kinase I; protein id: At4g14340.1, by cDNA: gi_15450524, supported by cDNA: gi_16974430, supported cDNA: gi_9965744 [Arabidopsis thaliana] >gi|7488072|pir||C71405
  misc_feature (1)..(409): Homolog of NCBI NO: 15239840 NR Description: casein kinase I; protein id: At5g43320.1, by cDNA: gi_13430689, supported by cDNA: gi_14532893 [Arabidopsis >gi|8843885|dbj|BAA97411.1| casein kinase I [Arabidopsis
  misc_feature (1)..(403): Homolog of NCBI NO: 18417216 NR Description: protein kinase ADK1-like protein; protein id: supported by cDNA: 113439., supported by cDNA: gi_20466497
  misc_feature (1)..(403): Homolog of NCBI NO: 21536851 NR Description: protein kinase ADK1-like protein [Arabidopsis
  misc_feature (1)..(403): Homolog of NCBI NO: 15240091 NR Description: casein kinase I; protein id: At5g44100.1, by cDNA: gi_18087639 [Arabidopsis thaliana]
  misc_feature (1)..(403): Homolog of NCBI NO: 18087640 NR Description: AT5g44100/MLN1_2 [Arabidopsis thaliana]
  misc_feature (1)..(409): Homolog of NCBI NO: 15219733 NR Description: putative casein kinase I; protein id: At1g04440.1
  misc_feature (1)..(409): Homolog of NCBI NO: 27754653 NR Description: putative casein kinase I [Arabidopsis thaliana]
  misc_feature (1)..(382): Homolog of NCBI NO: 15229427 NR Description: putative casein kinase I; protein id: supported by cDNA: gi_15809823, supported by cDNA: gi_18377818 thaliana] >gi|11994319|dbj|BAB02278.1| casein kinase [Arabidopsis
  misc_feature (1)..(244): Homolog of NCBI NO: 4503093 NR Description: casein kinase 1 epsilon; CKI-epsilon; casein I epsilon [Homo sapiens] >gi|23199991|ref|NP_689407.1| casein
MLLQGGTGIPHLKWFGVDGEYNVMVIDLLGPSLEDLFNYCNRKFSLKTVLMLADQMISRVEYMHTRGFLHRDIKPDNFLMGLGRKTSQVYVIDYGLAKKYRDLQTHRHIPYRENKNLTGTARYASVNTHLGVEQSRRDDLESLGYVLMYFLRGSLPWQGLKAGTKKQKYDKISEKKMLTSIEALCKSYPSEFVTYFHYCRSLQFEDKPDYSYLKKNFRDLFIREGYQPDYVFDWTVSRQAADNNRLRLSGKTGGLVGPSVDRAERAASKQDVPHRFTGPADALAKRTGSGSGHYGEHTKHRTLLDSLMASNMGVDSDKRRHSSSRNGSTSRKALLSSNRGSGDPSEPNRSSHLVPTTTSSSRPSTNQRLHHSTGLEGRTSSFPKPGRIGYDDPTMRSFERLTISAERRK

SEQ ID NO: 11726 - protein, 386 aa, Zea mays subsp. mays
  peptide (1)..(386): Ceres Seq. ID no. 12423836
  misc_feature (1)..(386): Homolog of NCBI NO: 15236471 NR Description: casein kinase I; protein id: At4g14340.1, by cDNA: gi_15450524, supported by cDNA: gi_16974430, supported cDNA: gi_9965744 [Arabidopsis thaliana] >gi|7488072|pir||C71405
  misc_feature (1)..(386): Homolog of NCBI NO: 15239840 NR Description: casein kinase I; protein id: At5g43320.1, by cDNA: gi_13430689, supported by cDNA: gi_14532893 [Arabidopsis >gi|8843885|dbj|BAA97411.1| casein kinase I [Arabidopsis
  misc_feature (1)..(380): Homolog of NCBI NO: 18417216 NR Description: protein kinase ADK1-like protein; protein id: supported by cDNA: 113439., supported by cDNA: gi_20466497
  misc_feature (1)..(380): Homolog of NCBI NO: 21536851 NR Description: protein kinase ADK1-like protein [Arabidopsis
  misc_feature (1)..(380): Homolog of NCBI NO: 15240091 NR Description: casein kinase I; protein id: At5g44100.1, by cDNA: gi_18087639 [Arabidopsis thaliana]
  misc_feature (1)..(380): Homolog of NCBI NO: 18087640 NR Description: AT5g44100/MLN1_2 [Arabidopsis thaliana]
  misc_feature (1)..(386): Homolog of NCBI NO: 15219733 NR Description: putative casein kinase I; protein id: At1g04440.1
  misc_feature (1)..(386): Homolog of NCBI NO: 27754653 NR Description: putative casein kinase I [Arabidopsis thaliana]
  misc_feature (1)..(359): Homolog of NCBI NO: 15229427 NR Description: putative casein kinase I; protein id: supported by cDNA: gi_15809823, supported by cDNA: gi_18377818 thaliana] >gi|11994319|dbj|BAB02278.1| casein kinase [Arabidopsis
  misc_feature (1)..(221): Homolog of NCBI NO: 4503093 NR Description: casein kinase 1 epsilon; CKI-epsilon; casein I epsilon [Homo sapiens] >gi|23199991|ref|NP_689407.1| casein
MVIDLLGPSLEDLFNYCNRKFSLKTVLMLADQMISRVEYMHTRGFLHRDIKPDNFLMGLGRKTSQVYVIDYGLAKKYRDLQTHRHIPYRENKNLTGTARYASVNTHLGVEQSRRDDLESLGYVLMYFLRGSLPWQGLKAGTKKQKYDKISEKKMLTSIEALCKSYPSEFVTYFHYCRSLQFEDKPDYSYLKKNFRDLFIREGYQPDYVFDWTVSRQAADNNRLRLSGKTGGLVGPSVDRAERAASKQDVPHRFTGPADALAKRTGSGSGHYGEHTKHRTLLDSLMASNMGVDSDKRRHSSSRNGSTSRKALLSSNRGSGDPSEPNRSSHLVPTTTSSSRPSTNQRLHHSTGLEGRTSSFPKPGRIGYDDPTMRSFERLTISAERRK

SEQ ID NO: 11727 - DNA, 1289 bp, Zea mays subsp. mays
  misc_feature (1)..(1289): Ceres Seq. ID no. 12351725
  misc_feature: MA Experiment ID: 108535 Result: Up-regulated in Transcription
  misc_feature: MA Experiment 108535 PARAMETER Experiment Name: Zm_Meristem_P Parameter: Age (day) Value: 8
  misc_feature: MA Experiment 108535 PARAMETER Experiment Name: Zm_Meristem_P Parameter: Organism Value: Zea mays
  misc_feature: MA Experiment 108535 PARAMETER Experiment Name: Zm_Meristem_P Parameter: Plant Line Value: 35A19
  misc_feature: MA Experiment 108535 PARAMETER Experiment Name: Zm_Meristem_P Parameter: Tissue Value: Root Meristem vs. Above Root Meristem
  misc_feature: MA Experiment ID: 20000535 Result: Up-regulated in Transcription
  misc_feature: MA Experiment 20000535 PARAMETER Experiment Name: Zm_Hybrid_Seed_Dev_P Parameter: DAP Value: 30 vs. 12
  misc_feature: MA Experiment 20000535 PARAMETER Experiment Name: Zm_Hybrid_Seed_Dev_P Parameter: Organism Value: Zea mays
  misc_feature: MA Experiment 20000535 PARAMETER Experiment Name: Zm_Hybrid_Seed_Dev_P Parameter: Plant Line Value: 35A19
  misc_feature: MA Experiment 20000535 PARAMETER Experiment Name: Zm_Hybrid_Seed_Dev_P Parameter: Tissue Value: Embryo vs. Unfert Floret
gacctgatcctgacccgtgcgggcgtgcggctcctcgcggacagctccagactccagagccgcctcttcgccctctcgccatcggcaggctacggtggctgcttccccgagcctgcaggtagaccaccttgtgttgattcctcgagtcttcacctggtgcttccgtttgcagcttcatttttaactaagatgtcacaagccaaggaagtgaggtacactgcacggtctattacacctcctgctgatagaaatggcacttcaaggtcgcctcctccaaagagacgcagcccttcaaggtcacctccaccaaagagtgcttcacggtccccacgtccaaggagtccaaagagacgcagcacttcaaggtctcctcctaggagacgtggtagatcaaggtcaagggataggagtcggtccaggagcccagatgatagaaatccagggaataacctttatgtaactggattgtctactcgtgtaacggaagatgatcttgagaagttctttagtaaagaaggaaaggttaagaactgtcatgttgttcttgatcctaggacaaaagaatcccgtggctttgccttcgtgactatggatactcttgaaggtgcaagacgctccatcaagtatctgcaccgcactgtacttgaaggtcgcctggtcactgtagagaaggctaaaagaactcgtgaaaggacccctactcctggaaaatactgtggtcgaagaggaggatctcaaaggagcccatcaccttaccgccctcgtagaagggagcgttcgcgctcaagggaacgcagaagggagcgttcgcgttcaagggatcgaagggagcggtctcgctcaagggatcgaagggagcggtctcgctcaagggaacgccgaagggagcggtctcgttcaagggaccgcagggagaggtctcgctcaagggaccgccggagggagcgctcacgctcaagggaccgcagaagggagcgctcacgctcaagggaccggaggggcagttcaccccatggcagaaggcatagagatcggtccaggtcacccaccagcaatgggaaccataaggcagactaggaagcgcttttatggacttgtcgttgattgcgtgaacaaaggaacttgtaacactacctataaactggtcagactgagacggttagcatggatttttagtagtgttgctgtattttgttgtttcatacaagtactctattctgttagctttcggatcgaaatgtcggatgatgatggttgttattgttctggaaatcgtagacatgtcctcc

SEQ ID NO: 11728 - protein, 358 aa, Zea mays subsp. mays
  peptide (1)..(358): Ceres Seq. ID no. 12351726
  misc_feature (151)..(222): Pfam Name: RNA recognition motif. (a.k.a. RRM, RBD, or RNP domain) Pfam Description: RNA recognition motif. (a.k.a. RRM, RBD, or RNP
  misc_feature (64)..(331): Homolog of NCBI NO: 40253470 NR Description: putative transformer-SR ribonucleoprotein [Oryza
  misc_feature (102)..(348): Homolog of NCBI NO: 28973767 NR Description: putative transformer-SR ribonucleoprotein
  misc_feature (117)..(348): Homolog of NCBI NO: 18390758 NR Description: transformer serine/arginine-rich putative; protein id: At1g07350.1, supported by cDNA: gi_15292732
  misc_feature (92)..(300): Homolog of NCBI NO: 11275253 NR Description: transformer-2-like protein - liverwort
  misc_feature (138)..(348): Homolog of NCBI NO: 8778550 NR Description: F22G5.31 [Arabidopsis thaliana]
  misc_feature (102)..(282): Homolog of NCBI NO: 7489207 NR Description: transformer-SR ribonucleoprotein - common tobacco
  misc_feature (131)..(346): Homolog of NCBI NO: 34902002 NR Description: putative transformer serine/arginine-rich
  misc_feature (87)..(358): Homolog of NCBI NO: 40253470 NR Description: putative transformer-SR ribonucleoprotein [Oryza
  misc_feature (137)..(349): Homolog of NCBI NO: 28175397 NR Description: Unknown (protein for MGC:53177) [Xenopus laevis]
  misc_feature (137)..(349): Homolog of NCBI NO: 266991 NR Description: Splicing factor, arginine/serine-rich 2 (Splicing
DLILTRAGVRLLADSSRLQSRLFALSPSAGYGGCFPEPAGRPPCVDSSSLHLVLPFAASFLTKMSQAKEVRYTARSITPPADRNGTSRSPPPKRRSPSRSPPPKSASRSPRPRSPKRRSTSRSPPRRRGRSRSRDRSRSRSPDDRNPGNNLYVTGLSTRVTEDDLEKFFSKEGKVKNCHVVLDPRTKESRGFAFVTMDTLEGARRSIKYLHRTVLEGRLVTVEKAKRTRERTPTPGKYCGRRGGSQRSPSPYRPRRRERSRSRERRRERSRSRDRRERSRSRDRRERSRSRERRRERSRSRDRRERSRSRDRRRERSRSRDRRRERSRSRDRRGSSPHGRRHRDRSRSPTSNGNHKAD

SEQ ID NO: 11729 - protein, 295 aa, Zea mays subsp. mays
  peptide (1)..(295): Ceres Seq. ID no. 12351727
  misc_feature (88)..(159): Pfam Name: RNA recognition motif. (a.k.a. RRM, RBD, or RNP domain) Pfam Description: RNA recognition motif. (a.k.a. RRM, RBD, or RNP
  misc_feature (1)..(268): Homolog of NCBI NO: 40253470 NR Description: putative transformer-SR ribonucleoprotein [Oryza
  misc_feature (39)..(285): Homolog of NCBI NO: 28973767 NR Description: putative transformer-SR ribonucleoprotein
  misc_feature (54)..(285): Homolog of NCBI NO: 18390758 NR Description: transformer serine/arginine-rich putative; protein id: At1g07350.1, supported by cDNA: gi_15292732
  misc_feature (29)..(237): Homolog of NCBI NO: 11275253 NR Description: transformer-2-like protein - liverwort
  misc_feature (75)..(285): Homolog of NCBI NO: 8778550 NR Description: F22G5.31 [Arabidopsis thaliana]
  misc_feature (39)..(219): Homolog of NCBI NO: 7489207 NR Description: transformer-SR ribonucleoprotein - common tobacco
  misc_feature (68)..(283): Homolog of NCBI NO: 34902002 NR Description: putative transformer serine/arginine-rich
  misc_feature (24)..(295): Homolog of NCBI NO: 40253470 NR Description: putative transformer-SR ribonucleoprotein [Oryza
  misc_feature (74)..(286): Homolog of NCBI NO: 28175397 NR Description: Unknown (protein for MGC:53177) [Xenopus laevis]
  misc_feature (74)..(286): Homolog of NCBI NO: 266991 NR Description: Splicing factor, arginine/serine-rich 2 (Splicing
MSQAKEVRYTARSITPPADRNGTSRSPPPKRRSPSRSPPPKSASRSPRPRSPKRRSTSRSPPRRRGRSRSRDRSRSRSPDDRNPGNNLYVTGLSTRVTEDDLEKFFSKEGKVKNCHVVLDPRTKESRGFAFVTMDTLEGARRSIKYLHRTVLEGRLVTVEKAKRTRERTPTPGKYCGRRGGSQRSPSPYRPRRRERSRSRERRRERSRSRDRRERSRSRDRRERSRSRERRRERSRSRDRRERSRSRDRRRERSRSRDRRRERSRSRDRRGSSPHGRRHRDRSRSPTSNGNHKAD

SEQ ID NO: 11730 - DNA, 657 bp, Zea mays subsp. mays
  misc_feature (1)..(657): Ceres Seq. ID no. 12341116
  misc_feature: MA Experiment ID: 20000626 Result: Up-regulated in Transcription
  misc_feature: MA Experiment 20000626 PARAMETER Experiment Name: Zm_Herbicide-Treatments_P Parameter: Timepoint (hr) Value: 12
  misc_feature: MA Experiment 20000626 PARAMETER Experiment Name: Zm_Herbicide-Treatments_P Parameter: Tissue Value: Aerial
  misc_feature: MA Experiment 20000626 PARAMETER Experiment Name: Zm_Herbicide-Treatments_P Parameter: Treatment Value: Roundup vs. No Treatment
actagaaaagaggatcttgagagtgttgttggcatggcttcgtcagcaacagcaagcggtgggaagtttgacgagaagttgcctggcgagaaacctccaaagcaccctggcaaacatagaaagttcctcccagttgctgaggggaagggaatgggcagcctggagaaacagcagaatgacaaaatcctgagctctctacttgccagaaactctgatgaaccgcttgatgtcagcaaggcaattacaatgtacaaggtgaaaaaggaaaagcagagaaggaaagagaaaaatatgccatcaaaatctgataagcttaagccccagaagaaaccccacaagaaatcatcgaagaaaagggcttaggtccacgtctttcagttgaccacagttttgaaagctgaagcaaggaggcctgtcacatattggattgtatttgtgagctttgaatctctgggagaaatattgttattccgtctaatggttatgatacaaaaacctgaatgctttgccatggtatgcgcccatcttgtacttttcaaattatgtttgggatgtggtttgtagcttggtaagagtccctccctttggttctgaaacctgttcaaaggagctgtcctggaaacagtaccaatgaagctactgtctagtgtcgatggt

SEQ ID NO: 11731 - protein, 120 aa, Zea mays subsp. mays
  peptide (1)..(120): Ceres Seq. ID no. 12341117
  misc_feature (1)..(120): Homolog of NCBI NO: 32488712 NR Description: OSJNBa0088H09.13 [Oryza sativa (japonica
  misc_feature (3)..(118): Homolog of NCBI NO: 18404610 NR Description: expressed protein; protein id: At2g37990.1,
  misc_feature (3)..(118): Homolog of NCBI NO: 21362906 NR Description: Ribosome biogenesis regulatory protein homolog
  misc_feature (3)..(118): Homolog of NCBI NO: 21593609 NR Description: unknown [Arabidopsis thaliana]
  misc_feature (3)..(104): Homolog of NCBI NO: 33585885 NR Description: Ribosome biogenesis regulatory protein homolog
TRKEDLESVVGMASSATASGGKFDEKLPGEKPPKHPGKHRKFLPVAEGKGMGSLEKQQNDKILSSLLARNSDEPLDVSKAITMYKVKKEKQRRKEKNMPSKSDKLKPQKKPHKKSSKKRA

SEQ ID NO: 11732 - protein, 109 aa, Zea mays subsp. mays
  peptide (1)..(109): Ceres Seq. ID no. 12341118
  misc_feature (1)..(109): Homolog of NCBI NO: 32488712 NR Description: OSJNBa0088H09.13 [Oryza sativa (japonica
  misc_feature (1)..(107): Homolog of NCBI NO: 18404610 NR Description: expressed protein; protein id: At2g37990.1,
  misc_feature (1)..(107): Homolog of NCBI NO: 21362906 NR Description: Ribosome biogenesis regulatory protein homolog
  misc_feature (1)..(107): Homolog of NCBI NO: 21593609 NR Description: unknown [Arabidopsis thaliana]
  misc_feature (1)..(93): Homolog of NCBI NO: 33585885 NR Description: Ribosome biogenesis regulatory protein homolog
MASSATASGGKFDEKLPGEKPPKHPGKHRKFLPVAEGKGMGSLEKQQNDKILSSLLARNSDEPLDVSKAITMYKVKKEKQRRKEKNMPSKSDKLKPQKKPHKKSSKKRA

SEQ ID NO: 11733 - protein, 70 aa, Zea mays subsp. mays
  peptide (1)..(70): Ceres Seq. ID no. 12341119
  misc_feature (1)..(70): Homolog of NCBI NO: 32488712 NR Description: OSJNBa0088H09.13 [Oryza sativa (japonica
  misc_feature (1)..(68): Homolog of NCBI NO: 18404610 NR Description: expressed protein; protein id: At2g37990.1,
  misc_feature (1)..(68): Homolog of NCBI NO: 21362906 NR Description: Ribosome biogenesis regulatory protein homolog
  misc_feature (1)..(68): Homolog of NCBI NO: 21593609 NR Description: unknown [Arabidopsis thaliana]
  misc_feature (1)..(54): Homolog of NCBI NO: 33585885 NR Description: Ribosome biogenesis regulatory protein homolog
MGSLEKQQNDKILSSLLARNSDEPLDVSKAITMYKVKKEKQRRKEKNMPSKSDKLKPQKKPHKKSSKKRA

SEQ ID NO: 11734 - DNA, 1365 bp, Zea mays subsp. mays
  misc_feature (1)..(1365): Ceres Seq. ID no. 12367526
  misc_feature: MA Experiment ID: 108529 Result: Down-regulated in Transcription
  misc_feature: MA Experiment 108529 PARAMETER Experiment Name: Zm_Imbibed_Seeds_P Parameter: Age (day) Value: 5 vs. 2
  misc_feature: MA Experiment 108529 PARAMETER Experiment Name: Zm_Imbibed_Seeds_P Parameter: Organism Value: Zea mays
  misc_feature: MA Experiment 108529 PARAMETER Experiment Name: Zm_Imbibed_Seeds_P Parameter: Plant Line Value: 35A19
  misc_feature: MA Experiment 108529 PARAMETER Experiment Name: Zm_Imbibed_Seeds_P Parameter: Tissue Value: Roots vs. Embryo
  misc_feature: MA Experiment ID: 108535 Result: Up-regulated in Transcription
  misc_feature: MA Experiment 108535 PARAMETER Experiment Name: Zm_Meristem_P Parameter: Age (day) Value: 8
  misc_feature: MA Experiment 108535 PARAMETER Experiment Name: Zm_Meristem_P Parameter: Organism Value: Zea mays
  misc_feature: MA Experiment 108535 PARAMETER Experiment Name: Zm_Meristem_P Parameter: Plant Line Value: 35A19
  misc_feature: MA Experiment 108535 PARAMETER Experiment Name: Zm_Meristem_P Parameter: Tissue Value: Root Meristem vs. Above Root Meristem
  misc_feature: MA Experiment ID: 108544 Result: Up-regulated in Transcription
  misc_feature: MA Experiment ID: 108556 Result: Down-regulated in Transcription
  misc_feature: MA Experiment 108556 PARAMETER Experiment Name: Zm_Drought_P Parameter: Age (day) Value: 9
  misc_feature: MA Experiment 108556 PARAMETER Experiment Name: Zm_Drought_P Parameter: Organism Value: Zea mays
  misc_feature: MA Experiment 108556 PARAMETER Experiment Name: Zm_Drought_P Parameter: Plant Line Value: 35A19
  misc_feature: MA Experiment 108556 PARAMETER Experiment Name: Zm_Drought_P Parameter: Timepoint (hr) Value: 24
  misc_feature: MA Experiment 108556 PARAMETER Experiment Name: Zm_Drought_P Parameter: Tissue Value: Aerial
  misc_feature: MA Experiment 108556 PARAMETER Experiment Name: Zm_Drought_P Parameter: Treatment Value: Drought vs. No Drought
  misc_feature: MA Experiment ID: 108687 Result: Up-regulated in Transcription
  misc_feature: MA Experiment 108687 PARAMETER Experiment Name: Zm_Embryos-Flowers__P Parameter: Tissue Value: Embryo vs. Aerial+
  misc_feature: MA Experiment ID: 108689 Result: Down-regulated in Transcription
  misc_feature: MA Experiment 108689 PARAMETER Experiment Name: Zm_Drought_Roots_P Parameter: Age (day) Value: 9
  misc_feature: MA Experiment 108689 PARAMETER Experiment Name: Zm_Drought_Roots_P Parameter: Organism Value: Zea mays
  misc_feature: MA Experiment 108689 PARAMETER Experiment Name: Zm_Drought_Roots_P Parameter: Plant Line Value: 35A19
  misc_feature: MA Experiment 108689 PARAMETER Experiment Name: Zm_Drought_Roots_P Parameter: Timepoint (hr) Value: 24
  misc_feature: MA Experiment 108689 PARAMETER Experiment Name: Zm_Drought_Roots_P Parameter: Tissue Value: Roots
  misc_feature: MA Experiment 108689 PARAMETER Experiment Name: Zm_Drought_Roots_P Parameter: Treatment Value: Drought vs. No Drought
  misc_feature: MA Experiment ID: 20000108 Result: Up-regulated in Transcription
  misc_feature: MA Experiment 20000108 PARAMETER Experiment Name: Zm_Root-Tips_P Parameter: Age (day) Value: 12
  misc_feature: MA Experiment 20000108 PARAMETER Experiment Name: Zm_Root-Tips_P Parameter: Organism Value: Zea mays
  misc_feature: MA Experiment 20000108 PARAMETER Experiment Name: Zm_Root-Tips_P Parameter: Tissue Value: Root tips vs. Root mid region    35
  misc_feature: MA Experiment 20000108 PARAMETER Experiment Name: Zm_Root-Tips_P Parameter: Tissue Value: Root tips vs. Root mid region   Sequence Listing-Misc Features (4)
  misc_feature: MA Experiment ID: 20000479 Result: Down-regulated in Transcription
  misc_feature: MA Experiment 20000479 PARAMETER Experiment Name: Zm_Drought_P Parameter: Age (day) Value: 10
  misc_feature: MA Experiment 20000479 PARAMETER Experiment Name: Zm_Drought_P Parameter: Organism Value: Zea mays
  misc_feature: MA Experiment 20000479 PARAMETER Experiment Name: Zm_Drought_P Parameter: Plant Line Value: 35A19
  misc_feature: MA Experiment 20000479 PARAMETER Experiment Name: Zm_Drought_P Parameter: Timepoint (hr) Value: 48
  misc_feature: MA Experiment 20000479 PARAMETER Experiment Name: Zm_Drought_P Parameter: Tissue Value: Aerial
  misc_feature: MA Experiment 20000479 PARAMETER Experiment Name: Zm_Drought_P Parameter: Treatment Value: Drought vs. No Drought
  misc_feature: MA Experiment ID: 20000480 Result: Down-regulated in Transcription
  misc_feature: MA Experiment 20000480 PARAMETER Experiment Name: Zm_Drought_P Parameter: Age (day) Value: 11
  misc_feature: MA Experiment 20000480 PARAMETER Experiment Name: Zm_Drought_P Parameter: Organism Value: Zea mays
  misc_feature: MA Experiment 20000480 PARAMETER Experiment Name: Zm_Drought_P Parameter: Plant Line Value: 35A19
  misc_feature: MA Experiment 20000480 PARAMETER Experiment Name: Zm_Drought_P Parameter: Timepoint (hr) Value: 72
  misc_feature: MA Experiment 20000480 PARAMETER Experiment Name: Zm_Drought_P Parameter: Tissue Value: Aerial
  misc_feature: MA Experiment 20000480 PARAMETER Experiment Name: Zm_Drought_P Parameter: Treatment Value: Drought vs. No Drought
  misc_feature: MA Experiment ID: 20000492 Result: Up-regulated in Transcription
  misc_feature: MA Experiment 20000492 PARAMETER Experiment Name: Zm_Hybrid_Seed_Dev_P Parameter: DAP Value: 12
  misc_feature: MA Experiment 20000492 PARAMETER Experiment Name: Zm_Hybrid_Seed_Dev_P Parameter: Organism Value: Zea mays
  misc_feature: MA Experiment 20000492 PARAMETER Experiment Name: Zm_Hybrid_Seed_Dev_P Parameter: Plant Line Value: 35A19
  misc_feature: MA Experiment 20000492 PARAMETER Experiment Name: Zm_Hybrid_Seed_Dev_P Parameter: Tissue Value: Fert Kernel vs. Unfert Floret
  misc_feature: MA Experiment ID: 20000532 Result: Up-regulated in Transcription
  misc_feature: MA Experiment 20000532 PARAMETER Experiment Name: Zm_0.001percent_MeJA_P Parameter: Age (day) Value: 10
  misc_feature: MA Experiment 20000532 PARAMETER Experiment Name: Zm_0.001percent_MeJA_P Parameter: Organism Value: Zea mays
  misc_feature: MA Experiment 20000532 PARAMETER Experiment Name: Zm_0.001percent_MeJA_P Parameter: Plant Line Value: 35A19
  misc_feature: MA Experiment 20000532 PARAMETER Experiment Name: Zm_0.001percent_MeJA_P Parameter: Timepoint (hr) Value: 48
  misc_feature: MA Experiment 20000532 PARAMETER Experiment Name: Zm_0.001percent_MeJA_P Parameter: Tissue Value: Aerial
  misc_feature: MA Experiment 20000532 PARAMETER Experiment Name: Zm_0.001percent_MeJA_P Parameter: Treatment Value: 0.001percent MeJA vs. No Treatment
  misc_feature: MA Experiment ID: 20000534 Result: Down-regulated in Transcription
  misc_feature: MA Experiment 20000534 PARAMETER Experiment Name: Zm_Hybrid_Pollen_P Parameter: Age (day) Value: 8
  misc_feature: MA Experiment 20000534 PARAMETER Experiment Name: Zm_Hybrid_Pollen_P Parameter: Organism Value: Zea mays
  misc_feature: MA Experiment 20000534 PARAMETER Experiment Name: Zm_Hybrid_Pollen_P Parameter: Plant Line Value: 35A19
  misc_feature: MA Experiment 20000534 PARAMETER Experiment Name: Zm_Hybrid_Pollen_P Parameter: Tissue Value: Pollen vs. Aerial
  misc_feature: MA Experiment ID: 20000535 Result: Up-regulated in Transcription
  misc_feature: MA Experiment 20000535 PARAMETER Experiment Name: Zm_Hybrid_Seed_Dev_P Parameter: DAP Value: 30 vs. 12
  misc_feature: MA Experiment 20000535 PARAMETER Experiment Name: Zm_Hybrid_Seed_Dev_P Parameter: Organism Value: Zea mays
  misc_feature: MA Experiment 20000535 PARAMETER Experiment Name: Zm_Hybrid_Seed_Dev_P Parameter: Plant Line Value: 35A19
  misc_feature: MA Experiment 20000535 PARAMETER Experiment Name: Zm_Hybrid_Seed_Dev_P Parameter: Tissue Value: Embryo vs. Unfert Floret
agttccattcaagcgcactgctggactccaactcgactgctctgcgtagcggagtaggctgatcagaggcgagatatgaggagcggccggcggatggcggcagctctggtggcgctggcgtgggcgctcgcggctgtggctgtggcggcggcgcagaagtacaatgccatcttcaacttcggcgactccatcaccgacacggggaacctctgcaccagcgggaggccgtcgcagatcaccttcacgcagccgccctacggcgagacctacttcggcacgccgacgtgccgctgctgcgacggccgcgtgatcccggacttcctctgctccaagttcgggctgccgttcctgccgccgtccaagtcgacgacggccgacttcaaggagggcgccaacatggccatcaccggcgcgactgccatggacgcgcccttcttccgctcgctggggctctccgacaagatctggaacaacgggcccatcagcttccagctggagtggttccagcaggtcgcgtccgccgtgtgcggcggggggcaggcgcagcaggccgactgcaagagctacctggccaactccctgttcgtgttcggcgagttcggcggcaacgactacaacgccatgctgttcggcaactacagcgcggaccaggccagcacgtacacgccgcagggtcgtggccgccgtcgccagcggcgtcgagaagctggtggccatgggcgccaccgacatcgtggtgcccggcgtcctccccatcggctgcttccccatctacctcaccttctacggcacctccagcagcgccgactacgacagcctcggctgcctcaggaagttcaacgacctgtccaccaaccacaacaaccagctgcaggcccagatctccggcctccaggccaagtacaagtcggcgcgcatcatgtacgccgacttctactccgccgtctacgacatggtcaagaatccaggcagctacgggttcagcacggccgttccagacgtgctgcgggtccggaggcggcaagtacaactaccagaacatcgcgcggtgcggcatgccgggcgcctccgcgtgctccaacccggcggcgcacctcagctgggacggcatccacctcaccgaggccgcgtacaagcagatcaccgacggctggctcaacgggccctactgccacccggccattctccacagctaaagcgacagggggggccgattaattattaattattattatttgttgtttacgttgccgggaaagaaagaaagaaaagtgtctcagcaactgcatgcatgtgttcctggtccctcactgctgtgacttacagagtattatatatatattagtactatgtatactggtcctt

SEQ ID NO: 11735 - protein, 380 aa, Zea mays subsp. mays
  peptide (1)..(380): Ceres Seq. ID no. 12367527
  misc_feature (32)..(199): Pfam Name: GDSL-like Lipase/Acylhydrolase Pfam Description: GDSL-like Lipase/Acylhydrolase
  misc_feature (8)..(199): Homolog of NCBI NO: 34903956 NR Description: OSJNBa0038J17.23 [Oryza sativa (japonica >gi|7523511|dbj|BAA94239.1| unnamed protein product [Oryza sativa
  misc_feature (1)..(198): Homolog of NCBI NO: 34903958 NR Description: OSJNBa0038J17.24 [Oryza sativa (japonica >gi|7523510|dbj|BAA94238.1| unnamed protein product [Oryza sativa
  misc_feature (26)..(202): Homolog of NCBI NO: 34903978 NR Description: unnamed protein product [Oryza sativa (japonica group)] >gi|7523500|dbj|BAA94228.1| unnamed protein product
  misc_feature (7)..(198): Homolog of NCBI NO: 34904124 NR Description: unnamed protein product [Oryza sativa (japonica group)] >gi|7573617|dbj|BAA94526.1| unnamed protein product
  misc_feature (9)..(198): Homolog of NCBI NO: 34911800 NR Description: lipase-like protein [Oryza sativa (japonica
  misc_feature (6)..(198): Homolog of NCBI NO: 37533984 NR Description: putative lipase [Oryza sativa (japonica
  misc_feature (7)..(195): Homolog of NCBI NO: 37533980 NR Description: putative lipase [Oryza sativa (japonica >gi|15451640|gb|AAK98764.1| Putative lipase [Oryza sativa]
  misc_feature (1)..(203): Homolog of NCBI NO: 34911824 NR Description: lipase-like protein [Oryza sativa (japonica
  misc_feature (1)..(151): Homolog of NCBI NO: 34911804 NR Description: lipase-like protein [Oryza sativa (japonica
  misc_feature (157)..(198): Homolog of NCBI NO: 34911804 NR Description: lipase-like protein [Oryza sativa (japonica
MRSGRRMAAALVALAWALAAVAVAAAQKYNAIFNFGDSITDTGNLCTSGRPSQITFTQPPYGETYFGTPTCRCCDGRVIPDFLCSKFGLPFLPPSKSTTADFKEGANMAITGATAMDAPFFRSLGLSDKIWNNGPISFQLEWFQQVASAVCGGGQAQQADCKSYLANSLFVFGEFGGNDYNAMLFGNYSADQASTYTPQGRGRRRQRRREAGGHGRHRHRGARRPPHRLLPHLPHLLRHLQQRRLRQPRLPQEVQRPVHQPQQPAAGPDLRPPGQVQVGAHHVRRLLLRRLRHGQESRQLRVQHGRSRRAAGPEAASTTTRTSRGAACRAPPRAPTRRRTSAGTASTSPRPRTSRSPTAGSTGPTATRPFSTAKATGGAD

SEQ ID NO: 11736 - protein, 374 aa, Zea mays subsp. mays
  peptide (1)..(374): Ceres Seq. ID no. 12367528
  misc_feature (26)..(193): Pfam Name: GDSL-like Lipase/Acylhydrolase Pfam Description: GDSL-like Lipase/Acylhydrolase
  misc_feature (2)..(193): Homolog of NCBI NO: 34903956 NR Description: OSJNBa0038J17.23 [Oryza sativa (japonica >gi|7523511|dbj|BAA94239.1| unnamed protein product [Oryza sativa
  misc_feature (1)..(192): Homolog of NCBI NO: 34903958 NR Description: OSJNBa0038J17.24 [Oryza sativa (japonica >gi|7523510|dbj|BAA94238.1| unnamed protein product [Oryza sativa
  misc_feature (20)..(196): Homolog of NCBI NO: 34903978 NR Description: unnamed protein product [Oryza sativa (japonica group)] >gi|7523500|dbj|BAA94228.1| unnamed protein product
  misc_feature (1)..(192): Homolog of NCBI NO: 34904124 NR Description: unnamed protein product [Oryza sativa (japonica group)] >gi|7573617|dbj|BAA94526.1| unnamed protein product
  misc_feature (3)..(192): Homolog of NCBI NO: 34911800 NR Description: lipase-like protein [Oryza sativa (japonica
  misc_feature (1)..(192): Homolog of NCBI NO: 37533984 NR Description: putative lipase [Oryza sativa (japonica
  misc_feature (1)..(189): Homolog of NCBI NO: 37533980 NR Description: putative lipase [Oryza sativa (japonica >gi|15451640|gb|AAK98764.1| Putative lipase [Oryza sativa]
  misc_feature (1)..(197): Homolog of NCBI NO: 34911824 NR Description: lipase-like protein [Oryza sativa (japonica
  misc_feature (1)..(145): Homolog of NCBI NO: 34911804 NR Description: lipase-like protein [Oryza sativa (japonica
  misc_feature (151)..(192): Homolog of NCBI NO: 34911804 NR Description: lipase-like protein [Oryza sativa (japonica
MAAALVALAWALAAVAVAAAQKYNAIFNFGDSITDTGNLCTSGRPSQITFTQPPYGETYFGTPTCRCCDGRVIPDFLCSKFGLPFLPPSKSTTADFKEGANMAITGATAMDAPFFRSLGLSDKIWNNGPISFQLEWFQQVASAVCGGGQAQQADCKSYLANSLFVFGEFGGNDYNAMLFGNYSADQASTYTPQGRGRRRQRRREAGGHGRHRHRGARRPPHRLLPHLPHLLRHLQQRRLRQPRLPQEVQRPVHQPQQPAAGPDLRPPGQVQVGAHHVRRLLLRRLRHGQESRQLRVQHGRSRRAAGPEAASTTTRTSRGAACRAPPRAPTRRRTSAGTASTSPRPRTSRSPTAGSTGPTATRPFSTAKATGGAD

SEQ ID NO: 11737 - protein, 273 aa, Zea mays subsp. mays
  peptide (1)..(273): Ceres Seq. ID no. 12367529
  misc_feature (1)..(92): Pfam Name: GDSL-like Lipase/Acylhydrolase Pfam Description: GDSL-like Lipase/Acylhydrolase
  misc_feature (1)..(92): Homolog of NCBI NO: 34903956 NR Description: OSJNBa0038J17.23 [Oryza sativa (japonica >gi|7523511|dbj|BAA94239.1| unnamed protein product [Oryza sativa
  misc_feature (1)..(91): Homolog of NCBI NO: 34903958 NR Description: OSJNBa0038J17.24 [Oryza sativa (japonica >gi|7523510|dbj|BAA94238.1| unnamed protein product [Oryza sativa
  misc_feature (1)..(95): Homolog of NCBI NO: 34903978 NR Description: unnamed protein product [Oryza sativa (japonica group)] >gi|7523500|dbj|BAA94228.1| unnamed protein product
  misc_feature (1)..(91): Homolog of NCBI NO: 34904124 NR Description: unnamed protein product [Oryza sativa (japonica group)] >gi|7573617|dbj|BAA94526.1| unnamed protein product
  misc_feature (1)..(91): Homolog of NCBI NO: 34911800 NR Description: lipase-like protein [Oryza sativa (japonica
  misc_feature (1)..(91): Homolog of NCBI NO: 37533984 NR Description: putative lipase [Oryza sativa (japonica
  misc_feature (1)..(88): Homolog of NCBI NO: 37533980 NR Description: putative lipase [Oryza sativa (japonica >gi|15451640|gb|AAK98764.1| Putative lipase [Oryza sativa]
  misc_feature (1)..(96): Homolog of NCBI NO: 34911824 NR Description: lipase-like protein [Oryza sativa (japonica
  misc_feature (1)..(44): Homolog of NCBI NO: 34911804 NR Description: lipase-like protein [Oryza sativa (japonica
  misc_feature (50)..(91): Homolog of NCBI NO: 34911804 NR Description: lipase-like protein [Oryza sativa (japonica
MAITGATAMDAPFFRSLGLSDKIWNNGPISFQLEWFQQVASAVCGGGQAQQADCKSYLANSLFVFGEFGGNDYNAMLFGNYSADQASTYTPQGRGRRRQRRREAGGHGRHRHRGARRPPHRLLPHLPHLLRHLQQRRLRQPRLPQEVQRPVHQPQQPAAGPDLRPPGQVQVGAHHVRRLLLRRLRHGQESRQLRVQHGRSRRAAGPEAASTTTRTSRGAACRAPPRAPTRRRTSAGTASTSPRPRTSRSPTAGSTGPTATRPFSTAKATGGAD

SEQ ID NO: 11738 - DNA, 1061 bp, Zea mays subsp. mays
  misc_feature (1)..(1061): Ceres Seq. ID no. 12367225
  misc_feature: MA Experiment ID: 108522 Result: Down-regulated in Transcription
  misc_feature: MA Experiment 108522 PARAMETER Experiment Name: Zm_42deg_Heat_P Parameter: Age (day) Value: 8
  misc_feature: MA Experiment 108522 PARAMETER Experiment Name: Zm_42deg_Heat_P Parameter: Organism Value: Zea mays
  misc_feature: MA Experiment 108522 PARAMETER Experiment Name: Zm_42deg_Heat_P Parameter: Plant Line Value: 35A19
  misc_feature: MA Experiment 108522 PARAMETER Experiment Name: Zm_42deg_Heat_P Parameter: Temperature (deg C) Value: 42 vs. 22
  misc_feature: MA Experiment 108522 PARAMETER Experiment Name: Zm_42deg_Heat_P Parameter: Timepoint (hr) Value: 1
  misc_feature: MA Experiment 108522 PARAMETER Experiment Name: Zm_42deg_Heat_P Parameter: Tissue Value: Aerial
  misc_feature: MA Experiment ID: 108523 Result: Down-regulated in Transcription
  misc_feature: MA Experiment 108523 PARAMETER Experiment Name: Zm_42deg_Heat_P Parameter: Age (day) Value: 8
  misc_feature: MA Experiment 108523 PARAMETER Experiment Name: Zm_42deg_Heat_P Parameter: Organism Value: Zea mays
  misc_feature: MA Experiment 108523 PARAMETER Experiment Name: Zm_42deg_Heat_P Parameter: Plant Line Value: 35A19
  misc_feature: MA Experiment 108523 PARAMETER Experiment Name: Zm_42deg_Heat_P Parameter: Temperature (deg C) Value: 42 vs. 22
  misc_feature: MA Experiment 108523 PARAMETER Experiment Name: Zm_42deg_Heat_P Parameter: Timepoint (hr) Value: 6
  misc_feature: MA Experiment 108523 PARAMETER Experiment Name: Zm_42deg_Heat_P Parameter: Tissue Value: Aerial
  misc_feature: MA Experiment ID: 108536 Result: Down-regulated in Transcription
  misc_feature: MA Experiment 108536 PARAMETER Experiment Name: Zm_Meristem_P Parameter: Age (day) Value: 8
  misc_feature: MA Experiment 108536 PARAMETER Experiment Name: Zm_Meristem_P Parameter: Organism Value: Zea mays
  misc_feature: MA Experiment 108536 PARAMETER Experiment Name: Zm_Meristem_P Parameter: Plant Line Value: 35A19
  misc_feature: MA Experiment 108536 PARAMETER Experiment Name: Zm_Meristem_P Parameter: Tissue Value: Shoot Meristem vs. Above Shoot Meristem
  misc_feature: MA Experiment ID: 108556 Result: Down-regulated in Transcription
  misc_feature: MA Experiment 108556 PARAMETER Experiment Name: Zm_Drought_P Parameter: Age (day) Value: 9
  misc_feature: MA Experiment 108556 PARAMETER Experiment Name: Zm_Drought_P Parameter: Organism Value: Zea mays
  misc_feature: MA Experiment 108556 PARAMETER Experiment Name: Zm_Drought_P Parameter: Plant Line Value: 35A19
  misc_feature: MA Experiment 108556 PARAMETER Experiment Name: Zm_Drought_P Parameter: Timepoint (hr) Value: 24
  misc_feature: MA Experiment 108556 PARAMETER Experiment Name: Zm_Drought_P Parameter: Tissue Value: Aerial
  misc_feature: MA Experiment 108556 PARAMETER Experiment Name: Zm_Drought_P Parameter: Treatment Value: Drought vs. No Drought
  misc_feature: MA Experiment ID: 108559 Result: Down-regulated in Transcription
  misc_feature: MA Experiment 108559 PARAMETER Experiment Name: Zm_5mM_NO_P Parameter: Age (day) Value: 8
  misc_feature: MA Experiment 108559 PARAMETER Experiment Name: Zm_5mM_NO_P Parameter: Organism Value: Zea mays
  misc_feature: MA Experiment 108559 PARAMETER Experiment Name: Zm_5mM_NO_P Parameter: Plant Line Value: 35A19
  misc_feature: MA Experiment 108559 PARAMETER Experiment Name: Zm_5mM_NO_P Parameter: Timepoint (hr) Value: 12
  misc_feature: MA Experiment 108559 PARAMETER Experiment Name: Zm_5mM_NO_P Parameter: Tissue Value: Aerial
  misc_feature: MA Experiment 108559 PARAMETER Experiment Name: Zm_5mM_NO_P Parameter: Treatment Value: 5mM NO vs. No Treatment
  misc_feature: MA Experiment ID: 20000478 Result: Down-regulated in Transcription
  misc_feature: MA Experiment 20000478 PARAMETER Experiment Name: Zm_5mM_SA_P Parameter: Age (day) Value: 11
  misc_feature: MA Experiment 20000478 PARAMETER Experiment Name: Zm_5mM_SA_P Parameter: Organism Value: Zea mays
  misc_feature: MA Experiment 20000478 PARAMETER Experiment Name: Zm_5mM_SA_P Parameter: Plant Line Value: 35A19
  misc_feature: MA Experiment 20000478 PARAMETER Experiment Name: Zm_5mM_SA_P Parameter: Timepoint (hr) Value: 72
  misc_feature: MA Experiment 20000478 PARAMETER Experiment Name: Zm_5mM_SA_P Parameter: Tissue Value: Aerial
  misc_feature: MA Experiment 20000478 PARAMETER Experiment Name: Zm_5mM_SA_P Parameter: Treatment Value: 5mM SA vs. No Treatment
  misc_feature: MA Experiment ID: 20000479 Result: Down-regulated in Transcription
  misc_feature: MA Experiment 20000479 PARAMETER Experiment Name: Zm_Drought_P Parameter: Age (day) Value: 10
  misc_feature: MA Experiment 20000479 PARAMETER Experiment Name: Zm_Drought_P Parameter: Organism Value: Zea mays
  misc_feature: MA Experiment 20000479 PARAMETER Experiment Name: Zm_Drought_P Parameter: Plant Line Value: 35A19
  misc_feature: MA Experiment 20000479 PARAMETER Experiment Name: Zm_Drought_P Parameter: Timepoint (hr) Value: 48
  misc_feature: MA Experiment 20000479 PARAMETER Experiment Name: Zm_Drought_P Parameter: Tissue Value: Aerial
  misc_feature: MA Experiment 20000479 PARAMETER Experiment Name: Zm_Drought_P Parameter: Treatment Value: Drought vs. No Drought
  misc_feature: MA Experiment ID: 20000480 Result: Down-regulated in Transcription
  misc_feature: MA Experiment 20000480 PARAMETER Experiment Name: Zm_Drought_P Parameter: Age (day) Value: 11
  misc_feature: MA Experiment 20000480 PARAMETER Experiment Name: Zm_Drought_P Parameter: Organism Value: Zea mays
  misc_feature: MA Experiment 20000480 PARAMETER Experiment Name: Zm_Drought_P Parameter: Plant Line Value: 35A19
  misc_feature: MA Experiment 20000480 PARAMETER Experiment Name: Zm_Drought_P Parameter: Timepoint (hr) Value: 72
  misc_feature: MA Experiment 20000480 PARAMETER Experiment Name: Zm_Drought_P Parameter: Tissue Value: Aerial
  misc_feature: MA Experiment 20000480 PARAMETER Experiment Name: Zm_Drought_P Parameter: Treatment Value: Drought vs. No Drought
  misc_feature: MA Experiment ID: 20000535 Result: Down-regulated in Transcription
  misc_feature: MA Experiment 20000535 PARAMETER Experiment Name: Zm_Hybrid_Seed_Dev_P Parameter: DAP Value: 30 vs. 12
  misc_feature: MA Experiment 20000535 PARAMETER Experiment Name: Zm_Hybrid_Seed_Dev_P Parameter: Organism Value: Zea mays
  misc_feature: MA Experiment 20000535 PARAMETER Experiment Name: Zm_Hybrid_Seed_Dev_P Parameter: Plant Line Value: 35A19
  misc_feature: MA Experiment 20000535 PARAMETER Experiment Name: Zm_Hybrid_Seed_Dev_P Parameter: Tissue Value: Embryo vs. Unfert Floret
acgaatcccgtcttcttcctttcttggccttctccacctcatcgccgagacgagatctctcccacacgaggaagggagagatgggcgggcgggtggatcacgagtactcctacctgttcaagatggtcctcatcggagacagcggcgtcggcaagtccaatatcctctctcgcttcacgcgcaaccacttctccctcgactccaagtccaccatcggcgtcgagttcgccaccaagtccctgcagatggacggcaaaacaataaaggctcagatctgggacacagctgggcaggaaaggtaccgtgcaattacaagtgcctactaccgtggagccgtgggagccctccttgtgtacgacatcacaaagaggcagagcttcgacaatgttcacaggtggcttcgtgaactccgcgaccatgctgactccagtattgtgatcatgatggtcggtaacaaatctgacctaatccacctgagagctatctctgaggatgaaggcaaagcgttggctgagaaggaggggttgttcttcctcgagacatcagctatggaggctataaacgtggagcaagccttccagactatcatgacggaggtctatggcattgtcaacaggaaagcgctggctgccaaagaagcagcagctgcaactgcttcgttgccctcccagggtaaaattatcagcattgacagcactgcaggaaacacaaagagggcatgctgctctacctaaaaatgttcaaacaccacattatacagaaccttggagacaattgttggtagaaaatggagcatagtgatcacaaatgatgtcgtggcaatatctactcttattctattctattctattcttttcttttctttattgtgtggacaaaatgggggtacatgcagtttagtttgttcagtgtgtgttagtcaaaagttagatattttcgttaggatccataccatttatcttctcaagttaaatgatactgcagtataactcagaatcatatagtcccaagttgctacagaattcaactgcgaatttgtgatttcatcatgcttacattct

SEQ ID NO: 11739 - protein, 243 aa, Zea mays subsp. mays
  peptide (1)..(243): Ceres Seq. ID no. 12367226
  misc_feature (40)..(201): Pfam Name: Ras family Pfam Description: Ras family
  misc_feature (27)..(242): Homolog of NCBI NO: 3024552 NR Description: RAS-RELATED PROTEIN RGP2 (GTP-BINDING REGULATORY
  misc_feature (27)..(243): Homolog of NCBI NO: 3024501 NR Description: RAS-RELATED PROTEIN RAB11C
  misc_feature (27)..(243): Homolog of NCBI NO: 3024528 NR Description: RAS-RELATED PROTEIN RAB2BV
  misc_feature (27)..(243): Homolog of NCBI NO: 15232652 NR Description: GTP-binding protein, putative; protein id: supported by cDNA: 35596., supported by cDNA: gi_20465470
  misc_feature (27)..(243): Homolog of NCBI NO: 3024506 NR Description: RAS-RELATED PROTEIN RAB11A
  misc_feature (27)..(243): Homolog of NCBI NO: 15237828 NR Description: Ras-related GTP-binding protein, putative; id: At5g59150.1, supported by cDNA: gi_13877728 [Arabidopsis
  misc_feature (27)..(243): Homolog of NCBI NO: 15222396 NR Description: GTP-binding protein, putative; protein id:
  misc_feature (27)..(243): Homolog of NCBI NO: 34897394 NR Description: Ras-related GTP-binding protein [Oryza sativa
  misc_feature (84)..(243): Homolog of NCBI NO: 25294121 NR Description: protein F22G5.24 [imported] - Arabidopsis >gi|8778562|gb|AAF79570.1|AC022464_28 F22G5.24 [Arabidopsis
  misc_feature (27)..(82): Homolog of NCBI NO: 25294121 NR Description: protein F22G5.24 [imported] - Arabidopsis >gi|8778562|gb|AAF79570.1|AC022464_28 F22G5.24 [Arabidopsis
ESRLLPFLAFSTSSPRRDLSHTRKGEMGGRVDHEYSYLFKMVLIGDSGVGKSNILSRFTRNHFSLDSKSTIGVEFATKSLQMDGKTIKAQIWDTAGQERYRAITSAYYRGAVGALLVYDITKRQSFDNVHRWLRELRDHADSSIVIMMVGNKSDLIHLRAISEDEGKALAEKEGLFFLETSAMEAINVEQAFQTIMTEVYGIVNRKALAAKEAAAATASLPSQGKIISIDSTAGNTKRACCST

SEQ ID NO: 11740 - protein, 217 aa, Zea mays subsp. mays
  peptide (1)..(217): Ceres Seq. ID no. 12367227
  misc_feature (14)..(175): Pfam Name: Ras family Pfam Description: Ras family
  misc_feature (1)..(216): Homolog of NCBI NO: 3024552 NR Description: RAS-RELATED PROTEIN RGP2 (GTP-BINDING REGULATORY
  misc_feature (1)..(217): Homolog of NCBI NO: 3024501 NR Description: RAS-RELATED PROTEIN RAB11C
  misc_feature (1)..(217): Homolog of NCBI NO: 3024528 NR Description: RAS-RELATED PROTEIN RAB2BV
  misc_feature (1)..(217): Homolog of NCBI NO: 15232652 NR Description: GTP-binding protein, putative; protein id: supported by cDNA: 35596., supported by cDNA: gi_20465470
  misc_feature (1)..(217): Homolog of NCBI NO: 3024506 NR Description: RAS-RELATED PROTEIN RAB11A
  misc_feature (1)..(217): Homolog of NCBI NO: 15237828 NR Description: Ras-related GTP-binding protein, putative; id: At5g59150.1, supported by cDNA: gi_13877728 [Arabidopsis
  misc_feature (1)..(217): Homolog of NCBI NO: 15222396 NR Description: GTP-binding protein, putative; protein id:
  misc_feature (1)..(217): Homolog of NCBI NO: 34897394 NR Description: Ras-related GTP-binding protein [Oryza sativa
  misc_feature (58)..(217): Homolog of NCBI NO: 25294121 NR Description: protein F22G5.24 [imported] - Arabidopsis >gi|8778562|gb|AAF79570.1|AC022464_28 F22G5.24 [Arabidopsis
  misc_feature (1)..(56): Homolog of NCBI NO: 25294121 NR Description: protein F22G5.24 [imported] - Arabidopsis >gi|8778562|gb|AAF79570.1|AC022464_28 F22G5.24 [Arabidopsis
MGGRVDHEYSYLFKMVLIGDSGVGKSNILSRFTRNHFSLDSKSTIGVEFATKSLQMDGKTIKAQIWDTAGQERYRAITSAYYRGAVGALLVYDITKRQSFDNVHRWLRELRDHADSSIVIMMVGNKSDLIHLRAISEDEGKALAEKEGLFFLETSAMEAINVEQAFQTIMTEVYGIVNRKALAAKEAAAATASLPSQGKIISIDSTAGNTKRACCST

SEQ ID NO: 11741 - protein, 203 aa, Zea mays subsp. mays
  peptide (1)..(203): Ceres Seq. ID no. 12367228
  misc_feature (1)..(161): Pfam Name: Ras family Pfam Description: Ras family
  misc_feature (1)..(203): Homolog of NCBI NO: 15232652 NR Description: GTP-binding protein, putative; protein id: supported by cDNA: 35596., supported by cDNA: gi_20465470
  misc_feature (1)..(203): Homolog of NCBI NO: 3024506 NR Description: RAS-RELATED PROTEIN RAB11A
  misc_feature (1)..(203): Homolog of NCBI NO: 15237828 NR Description: Ras-related GTP-binding protein, putative; id: At5g59150.1, supported by cDNA: gi_13877728 [Arabidopsis
  misc_feature (1)..(203): Homolog of NCBI NO: 15222396 NR Description: GTP-binding protein, putative; protein id:
  misc_feature (1)..(203): Homolog of NCBI NO: 3024501 NR Description: RAS-RELATED PROTEIN RAB11C
  misc_feature (1)..(203): Homolog of NCBI NO: 3024528 NR Description: RAS-RELATED PROTEIN RAB2BV
  misc_feature (1)..(202): Homolog of NCBI NO: 3024552 NR Description: RAS-RELATED PROTEIN RGP2 (GTP-BINDING REGULATORY
  misc_feature (1)..(203): Homolog of NCBI NO: 34897394 NR Description: Ras-related GTP-binding protein [Oryza sativa
  misc_feature (44)..(203): Homolog of NCBI NO: 25294121 NR Description: protein F22G5.24 [imported] - Arabidopsis >gi|8778562|gb|AAF79570.1|AC022464_28 F22G5.24 [Arabidopsis
  misc_feature (1)..(42): Homolog of NCBI NO: 25294121 NR Description: protein F22G5.24 [imported] - Arabidopsis >gi|8778562|gb|AAF79570.1|AC022464_28 F22G5.24 [Arabidopsis
MVLIGDSGVGKSNILSRFTRNHFSLDSKSTIGVEFATKSLQMDGKTIKAQIWDTAGQERYRAITSAYYRGAVGALLVYDITKRQSFDNVHRWLRELRDHADSSIVIMMVGNKSDLIHLRAISEDEGKALAEKEGLFFLETSAMEAINVEQAFQTIMTEVYGIVNRKALAAKEAAAATASLPSQGKIISIDSTAGNTKRACCST

SEQ ID NO: 11742 - DNA, 904 bp, Zea mays subsp. mays
  misc_feature (1)..(904): Ceres Seq. ID no. 12376350
  misc_feature: MA Experiment ID: 108523 Result: Up-regulated in Transcription
  misc_feature: MA Experiment 108523 PARAMETER Experiment Name: Zm_42deg_Heat_P Parameter: Age (day) Value: 8
  misc_feature: MA Experiment 108523 PARAMETER Experiment Name: Zm_42deg_Heat_P Parameter: Organism Value: Zea mays
  misc_feature: MA Experiment 108523 PARAMETER Experiment Name: Zm_42deg_Heat_P Parameter: Plant Line Value: 35A19
  misc_feature: MA Experiment 108523 PARAMETER Experiment Name: Zm_42deg_Heat_P Parameter: Temperature (deg C) Value: 42 vs. 22
  misc_feature: MA Experiment 108523 PARAMETER Experiment Name: Zm_42deg_Heat_P Parameter: Timepoint (hr) Value: 6
  misc_feature: MA Experiment 108523 PARAMETER Experiment Name: Zm_42deg_Heat_P Parameter: Tissue Value: Aerial
atacgaattttcgatttccatccgcaattttctgtgccttactaatagcactcggtagtagtagtagtgatccgaaagttgacaccattccccttgtgctttcttgccagtaacccatccatcggggatcaccaggggagcaagatgtcgactgccgccgccccaagattgcccgctcccagatccggggcaagctatcactatcagacgaccgcggctccggtggccaacaccctctccttcgccggccacgcgaggcaggcggcccgcgcgtccgggccacggctgtccagcaggttcgtggcgtccgcggcggccgtgctgcacaaggtgaagctggtcggcccggacgggacggagcacgagttcgaggcccccgacgacacctacatcctcgaggcggccgagaccgccggggtggagctgcccttctcctgccgcgccgggtcctgctccacctgcgccgggaggatgtcggccggcgaggtcgaccagtcggaggggtccttcctcgacgacggccagatggccgaggggtacctcctcacctgcatctcctaccccaaggcagactgcgtcatccacacccacaaggaggaggacctgtactagagattgggttgctttatgcatcagtggttgttccaaaggtggtggtgactggtgcgttcgttgctattccgtgccaccagcggaaggggggtttcgttgttgagatgggctagttcttgtcatcaatttcggtcattcgatgagatcatgtcatatgagttgtggcaataatgctggcaatatggttttgcaattcaaactgcaaatgtgaccagcaatgtcaaaaactgcacactgtgtctgtgtgcgaacttgtgaaattgacattgagttcaattagctagttggctcg

SEQ ID NO: 11743 - protein, 155 aa, Zea mays subsp. mays
  peptide (1)..(155): Ceres Seq. ID no. 12376351
  misc_feature (66)..(142): Pfam Name: 2Fe-2S iron-sulfur cluster binding domain Pfam Description: 2Fe-2S iron-sulfur cluster binding domain
  misc_feature (1)..(155): Homolog of NCBI NO: 3023750 NR Description: Ferredoxin VI, chloroplast precursor (Fd VI)
  misc_feature (1)..(155): Homolog of NCBI NO: 7430754 NR Description: ferredoxin [2Fe-2S], root - rice
  misc_feature (1)..(155): Homolog of NCBI NO: 19569591 NR Description: ferredoxin precursor [Triticum aestivum]
  misc_feature (23)..(155): Homolog of NCBI NO: 119958 NR Description: Ferredoxin III, chloroplast precursor (Fd III)
  misc_feature (21)..(155): Homolog of NCBI NO: 40714664 NR Description: putative ferredoxin [Oryza sativa (japonica
  misc_feature (60)..(155): Homolog of NCBI NO: 6688560 NR Description: putative ferredoxin [Lycopersicon esculentum]
  misc_feature (28)..(155): Homolog of NCBI NO: 13182955 NR Description: ferredoxin [Impatiens balsamina]
  misc_feature (74)..(155): Homolog of NCBI NO: 2073385 NR Description: root ferredoxin [Oryza sativa]
  misc_feature (21)..(155): Homolog of NCBI NO: 15225888 NR Description: putative ferredoxin; protein id: At2g27510.1, by cDNA: 26333. [Arabidopsis thaliana] >gi|25282678|pir||G84673
  misc_feature (41)..(154): Homolog of NCBI NO: 2129915 NR Description: ferredoxin [2Fe-2S] fd1 precursor,
MSTAAAPRLPAPRSGASYHYQTTAAPVANTLSFAGHARQAARASGPRLSSRFVASAAAVLHKVKLVGPDGTEHEFEAPDDTYILEAAETAGVELPFSCRAGSCSTCAGRMSAGEVDQSEGSFLDDGQMAEGYLLTCISYPKADCVIHTHKEEDLY

SEQ ID NO: 11744 - DNA, 789 bp, Zea mays subsp. mays; identical to SEQ ID NO: 1699
  misc_feature (1)..(789): Ceres Seq. ID no. 12355957
  misc_feature: MA Experiment ID: 108528 Result: Down-regulated in Transcription
  misc_feature: MA Experiment 108528 PARAMETER Experiment Name: Zm_Imbibed_Seeds_P Parameter: Age (day) Value: 5 vs. 2
  misc_feature: MA Experiment 108528 PARAMETER Experiment Name: Zm_Imbibed_Seeds_P Parameter: Organism Value: Zea mays
  misc_feature: MA Experiment 108528 PARAMETER Experiment Name: Zm_Imbibed_Seeds_P Parameter: Plant Line Value: 35A19
  misc_feature: MA Experiment 108528 PARAMETER Experiment Name: Zm_Imbibed_Seeds_P Parameter: Tissue Value: Aerial vs. Embryo
  misc_feature: MA Experiment ID: 108530 Result: Down-regulated in Transcription
  misc_feature: MA Experiment 108530 PARAMETER Experiment Name: Zm_Imbibed_Seeds_P Parameter: Age (day) Value: 6 vs. 2
  misc_feature: MA Experiment 108530 PARAMETER Experiment Name: Zm_Imbibed_Seeds_P Parameter: Organism Value: Zea mays
  misc_feature: MA Experiment 108530 PARAMETER Experiment Name: Zm_Imbibed_Seeds_P Parameter: Plant Line Value: 35A19
  misc_feature: MA Experiment 108530 PARAMETER Experiment Name: Zm_Imbibed_Seeds_P Parameter: Tissue Value: Aerial vs. Embryo
  misc_feature: MA Experiment ID: 108535 Result: Up-regulated in Transcription
  misc_feature: MA Experiment 108535 PARAMETER Experiment Name: Zm_Meristem_P Parameter: Age (day) Value: 8
  misc_feature: MA Experiment 108535 PARAMETER Experiment Name: Zm_Meristem_P Parameter: Organism Value: Zea mays
  misc_feature: MA Experiment 108535 PARAMETER Experiment Name: Zm_Meristem_P Parameter: Plant Line Value: 35A19
  misc_feature: MA Experiment 108535 PARAMETER Experiment Name: Zm_Meristem_P Parameter: Tissue Value: Root Meristem vs. Above Root Meristem
  misc_feature: MA Experiment ID: 20000488 Result: Up-regulated in Transcription
  misc_feature: MA Experiment 20000488 PARAMETER Experiment Name: Zm_50mM_NH4NO3_L_to_H_P Parameter: Organism Value: Zea mays
  misc_feature: MA Experiment 20000488 PARAMETER Experiment Name: Zm_50mM_NH4NO3_L_to_H_P Parameter: Timepoint (hr) Value: 8
  misc_feature: MA Experiment 20000488 PARAMETER Experiment Name: Zm_50mM_NH4NO3_L_to_H_P Parameter: Tissue Value: Leaves
  misc_feature: MA Experiment 20000488 PARAMETER Experiment Name: Zm_50mM_NH4NO3_L_to_H_P Parameter: Treatment Value: 50mM NH4NO3 vs. 100mM Mannitol
  misc_feature: MA Experiment ID: 20001606 Result: Up-regulated in Transcription
  misc_feature: MA Experiment 20001606 PARAMETER Experiment Name: Zm_50ppm_KNO3_L-to-H_P Parameter: Age (day) Value: 19
  misc_feature: MA Experiment 20001606 PARAMETER Experiment Name: Zm_50ppm_KNO3_L-to-H_P Parameter: Organism Value: Zea mays
  misc_feature: MA Experiment 20001606 PARAMETER Experiment Name: Zm_50ppm_KNO3_L-to-H_P Parameter: Plant Line Value: 35A19
  misc_feature: MA Experiment 20001606 PARAMETER Experiment Name: Zm_50ppm_KNO3_L-to-H_P Parameter: Timepoint (hr) Value: 8
  misc_feature: MA Experiment 20001606 PARAMETER Experiment Name: Zm_50ppm_KNO3_L-to-H_P Parameter: Tissue Value: Shoots
  misc_feature: MA Experiment 20001606 PARAMETER Experiment Name: Zm_50ppm_KNO3_L-to-H_P Parameter: Treatment Value: 50ppm KNO3 vs. 50ppm KCl
  misc_feature: MA Experiment ID: 20001612 Result: Up-regulated in Transcription
  misc_feature: MA Experiment 20001612 PARAMETER Experiment Name: Zm_50ppm_KNO3_L-to-H_P Parameter: Age (day) Value: 19
  misc_feature: MA Experiment 20001612 PARAMETER Experiment Name: Zm_50ppm_KNO3_L-to-H_P Parameter: Organism Value: Zea mays
  misc_feature: MA Experiment 20001612 PARAMETER Experiment Name: Zm_50ppm_KNO3_L-to-H_P Parameter: Plant Line Value: 35A19
  misc_feature: MA Experiment 20001612 PARAMETER Experiment Name: Zm_50ppm_KNO3_L-to-H_P Parameter: Timepoint (hr) Value: 8
  misc_feature: MA Experiment 20001612 PARAMETER Experiment Name: Zm_50ppm_KNO3_L-to-H_P Parameter: Tissue Value: Roots
  misc_feature: MA Experiment 20001612 PARAMETER Experiment Name: Zm_50ppm_KNO3_L-to-H_P Parameter: Treatment Value: 50ppm KNO3 vs. 50ppm KCl

SEQ ID NO: 11745 - protein, 161 aa, Zea mays subsp. mays; identical to SEQ ID NO: 1700
  peptide (1)..(161): Ceres Seq. ID no. 12355958
  misc_feature (3)..(73): Pfam Name: Ribosomal protein L24e Pfam Description: Ribosomal protein L24e
  misc_feature (3)..(73): Pfam Name: Ribosomal protein L24e Pfam Description: Ribosomal protein L24e
  misc_feature (3)..(73): Pfam Name: Ribosomal protein L24e Pfam Description: Ribosomal protein L24e
  misc_feature (1)..(161): Homolog of NCBI NO: 1710521 NR Description: 60S RIBOSOMAL PROTEIN L24 >gi|7440778|pir||T06178
  misc_feature (4)..(161): Homolog of NCBI NO: 34900364 NR Description: putative 60S ribosomal protein L24 [Oryza sativa
  misc_feature (1)..(160): Homolog of NCBI NO: 6094040 NR Description: 60S ribosomal protein L24
  misc_feature (1)..(156): Homolog of NCBI NO: 10180025 NR Description: 60S ribosomal protein L24 [Prunus avium]
  misc_feature (1)..(161): Homolog of NCBI NO: 18404176 NR Description: 60S ribosomal protein L24; protein id: supported by cDNA: 14564., supported by cDNA: gi_16604375, by cDNA: gi_18252830 [Arabidopsis thaliana]
  misc_feature (4)..(161): Homolog of NCBI NO: 34900364 NR Description: putative 60S ribosomal protein L24 [Oryza sativa
  misc_feature (1)..(156): Homolog of NCBI NO: 10180025 NR Description: 60S ribosomal protein L24 [Prunus avium]
  misc_feature (1)..(160): Homolog of NCBI NO: 6094040 NR Description: 60S ribosomal protein L24
  misc_feature (4)..(161): Homolog of NCBI NO: 34900364 NR Description: putative 60S ribosomal protein L24 [Oryza sativa
  misc_feature (1)..(161): Homolog of NCBI NO: 1710521 NR Description: 60S RIBOSOMAL PROTEIN L24 >gi|7440778|pir||T06178
  misc_feature (10)..(154): Homolog of NCBI NO: 40741063 NR Description: conserved hypothetical protein [Aspergillus
  misc_feature (3)..(150): Homolog of NCBI NO: 19115030 NR Description: 60S ribosomal protein L24 [Schizosaccharomyces
  misc_feature (3)..(150): Homolog of NCBI NO: 19075214 NR Description: 60s ribosomal protein L24 [Schizosaccharomyces
  misc_feature (5)..(161): Homolog of NCBI NO: 25295112 NR Description: 60S ribosomal protein L24 [imported] -
  misc_feature (1)..(161): Homolog of NCBI NO: 15231730 NR Description: 60S ribosomal protein - like; protein id: supported by cDNA: gi_16648705, supported by cDNA: gi_20260561 thaliana] >gi|26454659|sp|P38666|RL24_ARATH 60S ribosomal protein
  misc_feature (1)..(161): Homolog of NCBI NO: 18404176 NR Description: 60S ribosomal protein L24; protein id: supported by cDNA: 14564., supported by cDNA: gi_16604375, by cDNA: gi_18252830 [Arabidopsis thaliana]
  misc_feature (10)..(154): Homolog of NCBI NO: 40741063 NR Description: conserved hypothetical protein [Aspergillus
  misc_feature (3)..(150): Homolog of NCBI NO: 19115030 NR Description: 60S ribosomal protein L24 [Schizosaccharomyces
  misc_feature (3)..(150): Homolog of NCBI NO: 19075214 NR Description: 60s ribosomal protein L24 [Schizosaccharomyces
  misc_feature (5)..(161): Homolog of NCBI NO: 25295112 NR Description: 60S ribosomal protein L24 [imported] -
  misc_feature (1)..(161): Homolog of NCBI NO: 15231730 NR Description: 60S ribosomal protein - like; protein id: supported by cDNA: gi_16648705, supported by cDNA: gi_20260561 thaliana] >gi|26454659|sp|P38666|RL24_ARATH 60S ribosomal protein
  misc_feature (1)..(161): Homolog of NCBI NO: 18404176 NR Description: 60S ribosomal protein L24; protein id: supported by cDNA: 14564., supported by cDNA: gi_16604375, by cDNA: gi_18252830 [Arabidopsis thaliana]
  misc_feature (1)..(156): Homolog of NCBI NO: 10180025 NR Description: 60S ribosomal protein L24 [Prunus avium]
  misc_feature (1)..(160): Homolog of NCBI NO: 6094040 NR Description: 60S ribosomal protein L24
  misc_feature (1)..(161): Homolog of NCBI NO: 1710521 NR Description: 60S RIBOSOMAL PROTEIN L24 >gi|7440778|pir||T06178
  misc_feature (1)..(161): Homolog of NCBI NO: 15231730 NR Description: 60S ribosomal protein - like; protein id: supported by cDNA: gi_16648705, supported by cDNA: gi_20260561 thaliana] >gi|26454659|sp|P38666|RL24_ARATH 60S ribosomal protein
  misc_feature (5)..(161): Homolog of NCBI NO: 25295112 NR Description: 60S ribosomal protein L24 [imported] -
  misc_feature (3)..(150): Homolog of NCBI NO: 19075214 NR Description: 60s ribosomal protein L24 [Schizosaccharomyces
  misc_feature (3)..(150): Homolog of NCBI NO: 19115030 NR Description: 60S ribosomal protein L24 [Schizosaccharomyces
  misc_feature (10)..(154): Homolog of NCBI NO: 40741063 NR Description: conserved hypothetical protein [Aspergillus

SEQ ID NO: 11746 - protein, 106 aa, Zea mays subsp. mays; identical to SEQ ID NO: 1701
  peptide (1)..(106): Ceres Seq. ID no. 12355959
  misc_feature (1)..(99): Homolog of NCBI NO: 40741063 NR Description: conserved hypothetical protein [Aspergillus
  misc_feature (1)..(106): Homolog of NCBI NO: 1710521 NR Description: 60S RIBOSOMAL PROTEIN L24 >gi|7440778|pir||T06178
  misc_feature (1)..(106): Homolog of NCBI NO: 34900364 NR Description: putative 60S ribosomal protein L24 [Oryza sativa
  misc_feature (1)..(105): Homolog of NCBI NO: 6094040 NR Description: 60S ribosomal protein L24
  misc_feature (1)..(101): Homolog of NCBI NO: 10180025 NR Description: 60S ribosomal protein L24 [Prunus avium]
  misc_feature (1)..(106): Homolog of NCBI NO: 18404176 NR Description: 60S ribosomal protein L24; protein id: supported by cDNA: 14564., supported by cDNA: gi_16604375, by cDNA: gi_18252830 [Arabidopsis thaliana]
  misc_feature (1)..(106): Homolog of NCBI NO: 15231730 NR Description: 60S ribosomal protein - like; protein id: supported by cDNA: gi_16648705, supported by cDNA: gi_20260561 thaliana] >gi|26454659|sp|P38666|RL24_ARATH 60S ribosomal protein
  misc_feature (1)..(106): Homolog of NCBI NO: 25295112 NR Description: 60S ribosomal protein L24 [imported] -
  misc_feature (1)..(95): Homolog of NCBI NO: 19075214 NR Description: 60s ribosomal protein L24 [Schizosaccharomyces
  misc_feature (1)..(95): Homolog of NCBI NO: 19115030 NR Description: 60S ribosomal protein L24 [Schizosaccharomyces
  misc_feature (1)..(106): Homolog of NCBI NO: 1710521 NR Description: 60S RIBOSOMAL PROTEIN L24 >gi|7440778|pir||T06178
  misc_feature (1)..(106): Homolog of NCBI NO: 34900364 NR Description: putative 60S ribosomal protein L24 [Oryza sativa
  misc_feature (1)..(105): Homolog of NCBI NO: 6094040 NR Description: 60S ribosomal protein L24
  misc_feature (1)..(101): Homolog of NCBI NO: 10180025 NR Description: 60S ribosomal protein L24 [Prunus avium]
  misc_feature (1)..(106): Homolog of NCBI NO: 18404176 NR Description: 60S ribosomal protein L24; protein id: supported by cDNA: 14564., supported by cDNA: gi_16604375, by cDNA: gi_18252830 [Arabidopsis thaliana]
  misc_feature (1)..(106): Homolog of NCBI NO: 15231730 NR Description: 60S ribosomal protein - like; protein id: supported by cDNA: gi_16648705, supported by cDNA: gi_20260561 thaliana] >gi|26454659|sp|P38666|RL24_ARATH 60S ribosomal protein
  misc_feature (1)..(106): Homolog of NCBI NO: 25295112 NR Description: 60S ribosomal protein L24 [imported] -
  misc_feature (1)..(95): Homolog of NCBI NO: 19075214 NR Description: 60s ribosomal protein L24 [Schizosaccharomyces
  misc_feature (1)..(95): Homolog of NCBI NO: 19115030 NR Description: 60S ribosomal protein L24 [Schizosaccharomyces
  misc_feature (1)..(99): Homolog of NCBI NO: 40741063 NR Description: conserved hypothetical protein [Aspergillus
  misc_feature (1)..(106): Homolog of NCBI NO: 1710521 NR Description: 60S RIBOSOMAL PROTEIN L24 >gi|7440778|pir||T06178
  misc_feature (1)..(106): Homolog of NCBI NO: 34900364 NR Description: putative 60S ribosomal protein L24 [Oryza sativa
  misc_feature (1)..(105): Homolog of NCBI NO: 6094040 NR Description: 60S ribosomal protein L24
  misc_feature (1)..(101): Homolog of NCBI NO: 10180025 NR Description: 60S ribosomal protein L24 [Prunus avium]
  misc_feature (1)..(106): Homolog of NCBI NO: 18404176 NR Description: 60S ribosomal protein L24; protein id: supported by cDNA: 14564., supported by cDNA: gi_16604375, by cDNA: gi_18252830 [Arabidopsis thaliana]
  misc_feature (1)..(106): Homolog of NCBI NO: 15231730 NR Description: 60S ribosomal protein - like; protein id: supported by cDNA: gi_16648705, supported by cDNA: gi_20260561 thaliana] >gi|26454659|sp|P38666|RL24_ARATH 60S ribosomal protein
  misc_feature (1)..(106): Homolog of NCBI NO: 25295112 NR Description: 60S ribosomal protein L24 [imported] -
  misc_feature (1)..(95): Homolog of NCBI NO: 19075214 NR Description: 60s ribosomal protein L24 [Schizosaccharomyces
  misc_feature (1)..(95): Homolog of NCBI NO: 19115030 NR Description: 60S ribosomal protein L24 [Schizosaccharomyces
  misc_feature (1)..(99): Homolog of NCBI NO: 40741063 NR Description: conserved hypothetical protein [Aspergillus

SEQ ID NO: 11747 - DNA, 991 bp, Zea mays subsp. mays
  misc_feature (1)..(991): Ceres Seq. ID no. 12351117
  misc_feature: MA Experiment ID: 108529 Result: Up-regulated in Transcription
  misc_feature: MA Experiment 108529 PARAMETER Experiment Name: Zm_Imbibed_Seeds_P Parameter: Age (day) Value: 5 vs. 2
  misc_feature: MA Experiment 108529 PARAMETER Experiment Name: Zm_Imbibed_Seeds_P Parameter: Organism Value: Zea mays
  misc_feature: MA Experiment 108529 PARAMETER Experiment Name: Zm_Imbibed_Seeds_P Parameter: Plant Line Value: 35A19
  misc_feature: MA Experiment 108529 PARAMETER Experiment Name: Zm_Imbibed_Seeds_P Parameter: Tissue Value: Roots vs. Embryo
  misc_feature: MA Experiment ID: 108532 Result: Up-regulated in Transcription
  misc_feature: MA Experiment 108532 PARAMETER Experiment Name: Zm_20uM_KNO3_H-to-L_P Parameter: Age (day) Value: 11
  misc_feature: MA Experiment 108532 PARAMETER Experiment Name: Zm_20uM_KNO3_H-to-L_P Parameter: Organism Value: Zea mays
  misc_feature: MA Experiment 108532 PARAMETER Experiment Name: Zm_20uM_KNO3_H-to-L_P Parameter: Plant Line Value: 35A19
  misc_feature: MA Experiment 108532 PARAMETER Experiment Name: Zm_20uM_KNO3_H-to-L_P Parameter: Timepoint (hr) Value: 16
  misc_feature: MA Experiment 108532 PARAMETER Experiment Name: Zm_20uM_KNO3_H-to-L_P Parameter: Tissue Value: Roots
  misc_feature: MA Experiment 108532 PARAMETER Experiment Name: Zm_20uM_KNO3_H-to-L_P Parameter: Treatment Value: 20uM KNO3 vs. 60mM KNO3
  misc_feature: MA Experiment ID: 108534 Result: Up-regulated in Transcription
  misc_feature: MA Experiment 108534 PARAMETER Experiment Name: Zm_4deg_Cold_P Parameter: Age (hr) Value: 8
  misc_feature: MA Experiment 108534 PARAMETER Experiment Name: Zm_4deg_Cold_P Parameter: Organism Value: Zea mays
  misc_feature: MA Experiment 108534 PARAMETER Experiment Name: Zm_4deg_Cold_P Parameter: Plant Line Value: 35A19
  misc_feature: MA Experiment 108534 PARAMETER Experiment Name: Zm_4deg_Cold_P Parameter: Temperature (deg C) Value: 4 vs. 22
  misc_feature: MA Experiment 108534 PARAMETER Experiment Name: Zm_4deg_Cold_P Parameter: Timepoint (hr) Value: 6
  misc_feature: MA Experiment 108534 PARAMETER Experiment Name: Zm_4deg_Cold_P Parameter: Tissue Value: Aerial
  misc_feature: MA Experiment ID: 108535 Result: Down-regulated in Transcription
  misc_feature: MA Experiment 108535 PARAMETER Experiment Name: Zm_Meristem_P Parameter: Age (day) Value: 8
  misc_feature: MA Experiment 108535 PARAMETER Experiment Name: Zm_Meristem_P Parameter: Organism Value: Zea mays
  misc_feature: MA Experiment 108535 PARAMETER Experiment Name: Zm_Meristem_P Parameter: Plant Line Value: 35A19
  misc_feature: MA Experiment 108535 PARAMETER Experiment Name: Zm_Meristem_P Parameter: Tissue Value: Root Meristem vs. Above Root Meristem
  misc_feature: MA Experiment ID: 108545 Result: Down-regulated in Transcription
  misc_feature: MA Experiment 108545 PARAMETER Experiment Name: Zm_Imbibed_Seeds_P Parameter: Age (day) Value: 3 vs. 2
  misc_feature: MA Experiment 108545 PARAMETER Experiment Name: Zm_Imbibed_Seeds_P Parameter: Organism Value: Zea mays
  misc_feature: MA Experiment 108545 PARAMETER Experiment Name: Zm_Imbibed_Seeds_P Parameter: Plant Line Value: 35A19
  misc_feature: MA Experiment 108545 PARAMETER Experiment Name: Zm_Imbibed_Seeds_P Parameter: Tissue Value: Aerial vs. Embryo
  misc_feature: MA Experiment ID: 108546 Result: Up-regulated in Transcription
  misc_feature: MA Experiment 108546 PARAMETER Experiment Name: Zm_Imbibed_Seeds_P Parameter: Age (day) Value: 3 vs. 2
  misc_feature: MA Experiment 108546 PARAMETER Experiment Name: Zm_Imbibed_Seeds_P Parameter: Organism Value: Zea mays
  misc_feature: MA Experiment 108546 PARAMETER Experiment Name: Zm_Imbibed_Seeds_P Parameter: Plant Line Value: 35A19
  misc_feature: MA Experiment 108546 PARAMETER Experiment Name: Zm_Imbibed_Seeds_P Parameter: Tissue Value: Roots vs. Embryo
  misc_feature: MA Experiment ID: 108689 Result: Down-regulated in Transcription
  misc_feature: MA Experiment 108689 PARAMETER Experiment Name: Zm_Drought_Roots_P Parameter: Age (day) Value: 9
  misc_feature: MA Experiment 108689 PARAMETER Experiment Name: Zm_Drought_Roots_P Parameter: Organism Value: Zea mays
  misc_feature: MA Experiment 108689 PARAMETER Experiment Name: Zm_Drought_Roots_P Parameter: Plant Line Value: 35A19
  misc_feature: MA Experiment 108689 PARAMETER Experiment Name: Zm_Drought_Roots_P Parameter: Timepoint (hr) Value: 24
  misc_feature: MA Experiment 108689 PARAMETER Experiment Name: Zm_Drought_Roots_P Parameter: Tissue Value: Roots
  misc_feature: MA Experiment 108689 PARAMETER Experiment Name: Zm_Drought_Roots_P Parameter: Treatment Value: Drought vs. No Drought
  misc_feature: MA Experiment ID: 20000535 Result: Down-regulated in Transcription
  misc_feature: MA Experiment 20000535 PARAMETER Experiment Name: Zm_Hybrid_Seed_Dev_P Parameter: DAP Value: 30 vs. 12
  misc_feature: MA Experiment 20000535 PARAMETER Experiment Name: Zm_Hybrid_Seed_Dev_P Parameter: Organism Value: Zea mays
  misc_feature: MA Experiment 20000535 PARAMETER Experiment Name: Zm_Hybrid_Seed_Dev_P Parameter: Plant Line Value: 35A19
  misc_feature: MA Experiment 20000535 PARAMETER Experiment Name: Zm_Hybrid_Seed_Dev_P Parameter: Tissue Value: Embryo vs. Unfert Floret
agctagcaaatgaaccagccacaataatcctgatcctcgatcttgcgttgtcgtcgtcaaagagacgactcgatcatcatctcatctcagagcacgcaagcaacaatggttactagcatccgcgtcatagttggaatcataggatctgtagtctgtgtgctcctctacgcggttccagtgctgacgtttaagagagtggtgaaggaggccagcgttggggagttctcgtgcgtgccatacatcctcgcccttttcagcgccttcacctggggctggtacggcttccccatcgtcagtgacgggtgggagaacctgtcgctcttcggcacgtgcgccgtcggagtgctcttcgaagcttcgttcgtcgtcatatacgtatggtttgcgccgagagacaaaaagaaatctgtcgtcctaatggtgtctctggttgtggcaacgctctgcgtcatcgtatccttgtcaagcttcgtgttccacacgcaccatacgcgcaagctatttgttggtagcattggtatagtcacctccatatccatgtacagcgctccgcttgtagccgtgaagcaagtcatcctgaccaagagcgtggagttcatgcctttctacctgtcgttgttctccttgctgaccagttttacatggatgctgtacggcatcctaggaagggatccctatcttacggcaccaaacggcgccgggtgtttaactggacttcttcagatcgctgtgtactgcatttacagcagaagcaatcggccgccgaaagcagtcaatggtgcgacaacaactagccgtgaagatgcaaatgattgcaaggtttgacttcgagagccttaagaaactgcctctctccgacgctagtaggaggttgatactaaagtggcgctattcgcgtgtgcagttattattattatctaattgtaaactgctccagtgttctttctttttgttatctaatcaatgggcatagcacctgcaaccagtaatt

SEQ ID NO: 11748 - protein, 239 aa, Zea mays subsp. mays
  peptide (1)..(239): Ceres Seq. ID no. 12351118
  misc_feature (132)..(218): Pfam Name: MtN3/saliva family Pfam Description: MtN3/saliva family
  misc_feature (1)..(218): Homolog of NCBI NO: 34904086 NR Description: unnamed protein product [Oryza sativa (japonica group)] >gi|8096648|dbj|BAA96219.1| unnamed protein product
  misc_feature (1)..(236): Homolog of NCBI NO: 34146818 NR Description: At5g53190 [Arabidopsis thaliana]
  misc_feature (1)..(236): Homolog of NCBI NO: 15238678 NR Description: MtN3 protein-like; protein id: At5g53190.1
  misc_feature (8)..(224): Homolog of NCBI NO: 18394992 NR Description: expressed protein; protein id: At1g21460.1, by cDNA: 6411. [Arabidopsis thaliana] >gi|21594011|gb|AAM65929.1| [Arabidopsis thaliana] >gi|28393568|gb|AAO42204.1| unknown
  misc_feature (6)..(236): Homolog of NCBI NO: 34907420 NR Description: P0018C10.36 [Oryza sativa (japonica
  misc_feature (5)..(218): Homolog of NCBI NO: 18413388 NR Description: putative protein; protein id: At4g10850.1, by cDNA: 33161. [Arabidopsis thaliana] contains similarity to Medicago truncatula MtN3 (GB:Y08726)
  misc_feature (8)..(217): Homolog of NCBI NO: 18400517 NR Description: expressed protein; protein id: At3g14770.1, by cDNA: gi_15809922, supported by cDNA: gi_17978878 [Arabidopsis
  misc_feature (5)..(218): Homolog of NCBI NO: 15219732 NR Description: hypothetical protein; protein id: At1g66770.1 thaliana] >gi|12597757|gb|AAG60070.1|AC013288_4 hypothetical
  misc_feature (9)..(219): Homolog of NCBI NO: 30684193 NR Description: nodulin MtN3 family protein [Arabidopsis thaliana]
  misc_feature (9)..(233): Homolog of NCBI NO: 27754697 NR Description: putative cytochrome c oxidoreductase [Arabidopsis
MVTSIRVIVGIIGSVVCVLLYAVPVLTFKRVVKEASVGEFSCVPYILALFSAFTWGWYGFPIVSDGWENLSLFGTCAVGVLFEASFVVIYVWFAPRDKKKSVVLMVSLVVATLCVIVSLSSFVFHTHHTRKLFVGSIGIVTSISMYSAPLVAVKQVILTKSVEFMPFYLSLFSLLTSFTWMLYGILGRDPYLTAPNGAGCLTGLLQIAVYCIYSRSNRPPKAVNGATTTSREDANDCKV

SEQ ID NO: 11749 - protein, 135 aa, Zea mays subsp. mays
  peptide (1)..(135): Ceres Seq. ID no. 12351119
  misc_feature (28)..(114): Pfam Name: MtN3/saliva family Pfam Description: MtN3/saliva family
  misc_feature (1)..(114): Homolog of NCBI NO: 34904086 NR Description: unnamed protein product [Oryza sativa (japonica group)] >gi|8096648|dbj|BAA96219.1| unnamed protein product
  misc_feature (1)..(132): Homolog of NCBI NO: 34146818 NR Description: At5g53190 [Arabidopsis thaliana]
  misc_feature (1)..(132): Homolog of NCBI NO: 15238678 NR Description: MtN3 protein-like; protein id: At5g53190.1
  misc_feature (1)..(120): Homolog of NCBI NO: 18394992 NR Description: expressed protein; protein id: At1g21460.1, by cDNA: 6411. [Arabidopsis thaliana] >gi|21594011|gb|AAM65929.1| [Arabidopsis thaliana] >gi|28393568|gb|AAO42204.1| unknown
  misc_feature (1)..(132): Homolog of NCBI NO: 34907420 NR Description: P0018C10.36 [Oryza sativa (japonica
  misc_feature (1)..(114): Homolog of NCBI NO: 18413388 NR Description: putative protein; protein id: At4g10850.1, by cDNA: 33161. [Arabidopsis thaliana] contains similarity to Medicago truncatula MtN3 (GB:Y08726)
  misc_feature (1)..(113): Homolog of NCBI NO: 18400517 NR Description: expressed protein; protein id: At3g14770.1, by cDNA: gi_15809922, supported by cDNA: gi_17978878 [Arabidopsis
  misc_feature (1)..(114): Homolog of NCBI NO: 15219732 NR Description: hypothetical protein; protein id: At1g66770.1 thaliana] >gi|12597757|gb|AAG60070.1|AC013288_4 hypothetical
  misc_feature (1)..(115): Homolog of NCBI NO: 30684193 NR Description: nodulin MtN3 family protein [Arabidopsis thaliana]
  misc_feature (1)..(129): Homolog of NCBI NO: 27754697 NR Description: putative cytochrome c oxidoreductase [Arabidopsis
MVSLVVATLCVIVSLSSFVFHTHHTRKLFVGSIGIVTSISMYSAPLVAVKQVILTKSVEFMPFYLSLFSLLTSFTWMLYGILGRDPYLTAPNGAGCLTGLLQIAVYCIYSRSNRPPKAVNGATTTSREDANDCKV

SEQ ID NO: 11750 - DNA, 1246 bp, Zea mays subsp. mays
  misc_feature (1)..(1246): Ceres Seq. ID no. 12366640
  misc_feature: MA Experiment ID: 108523 Result: Down-regulated in Transcription
  misc_feature: MA Experiment 108523 PARAMETER Experiment Name: Zm_42deg_Heat_P Parameter: Age (day) Value: 8
  misc_feature: MA Experiment 108523 PARAMETER Experiment Name: Zm_42deg_Heat_P Parameter: Organism Value: Zea mays
  misc_feature: MA Experiment 108523 PARAMETER Experiment Name: Zm_42deg_Heat_P Parameter: Plant Line Value: 35A19
  misc_feature: MA Experiment 108523 PARAMETER Experiment Name: Zm_42deg_Heat_P Parameter: Temperature (deg C) Value: 42 vs. 22
  misc_feature: MA Experiment 108523 PARAMETER Experiment Name: Zm_42deg_Heat_P Parameter: Timepoint (hr) Value: 6
  misc_feature: MA Experiment 108523 PARAMETER Experiment Name: Zm_42deg_Heat_P Parameter: Tissue Value: Aerial
  misc_feature: MA Experiment ID: 108528 Result: Up-regulated in Transcription
  misc_feature: MA Experiment 108528 PARAMETER Experiment Name: Zm_Imbibed_Seeds_P Parameter: Age (day) Value: 5 vs. 2
  misc_feature: MA Experiment 108528 PARAMETER Experiment Name: Zm_Imbibed_Seeds_P Parameter: Organism Value: Zea mays
  misc_feature: MA Experiment 108528 PARAMETER Experiment Name: Zm_Imbibed_Seeds_P Parameter: Plant Line Value: 35A19
  misc_feature: MA Experiment 108528 PARAMETER Experiment Name: Zm_Imbibed_Seeds_P Parameter: Tissue Value: Aerial vs. Embryo
  misc_feature: MA Experiment ID: 108530 Result: Up-regulated in Transcription
  misc_feature: MA Experiment 108530 PARAMETER Experiment Name: Zm_Imbibed_Seeds_P Parameter: Age (day) Value: 6 vs. 2
  misc_feature: MA Experiment 108530 PARAMETER Experiment Name: Zm_Imbibed_Seeds_P Parameter: Organism Value: Zea mays
  misc_feature: MA Experiment 108530 PARAMETER Experiment Name: Zm_Imbibed_Seeds_P Parameter: Plant Line Value: 35A19
  misc_feature: MA Experiment 108530 PARAMETER Experiment Name: Zm_Imbibed_Seeds_P Parameter: Tissue Value: Aerial vs. Embryo
  misc_feature: MA Experiment ID: 108543 Result: Down-regulated in Transcription
  misc_feature: MA Experiment ID: 108556 Result: Down-regulated in Transcription
  misc_feature: MA Experiment 108556 PARAMETER Experiment Name: Zm_Drought_P Parameter: Age (day) Value: 9
  misc_feature: MA Experiment 108556 PARAMETER Experiment Name: Zm_Drought_P Parameter: Organism Value: Zea mays
  misc_feature: MA Experiment 108556 PARAMETER Experiment Name: Zm_Drought_P Parameter: Plant Line Value: 35A19
  misc_feature: MA Experiment 108556 PARAMETER Experiment Name: Zm_Drought_P Parameter: Timepoint (hr) Value: 24
  misc_feature: MA Experiment 108556 PARAMETER Experiment Name: Zm_Drought_P Parameter: Tissue Value: Aerial
  misc_feature: MA Experiment 108556 PARAMETER Experiment Name: Zm_Drought_P Parameter: Treatment Value: Drought vs. No Drought
  misc_feature: MA Experiment ID: 108559 Result: Down-regulated in Transcription
  misc_feature: MA Experiment 108559 PARAMETER Experiment Name: Zm_5mM_NO_P Parameter: Age (day) Value: 8
  misc_feature: MA Experiment 108559 PARAMETER Experiment Name: Zm_5mM_NO_P Parameter: Organism Value: Zea mays
  misc_feature: MA Experiment 108559 PARAMETER Experiment Name: Zm_5mM_NO_P Parameter: Plant Line Value: 35A19
  misc_feature: MA Experiment 108559 PARAMETER Experiment Name: Zm_5mM_NO_P Parameter: Timepoint (hr) Value: 12
  misc_feature: MA Experiment 108559 PARAMETER Experiment Name: Zm_5mM_NO_P Parameter: Tissue Value: Aerial
  misc_feature: MA Experiment 108559 PARAMETER Experiment Name: Zm_5mM_NO_P Parameter: Treatment Value: 5mM NO vs. No Treatment
  misc_feature: MA Experiment ID: 108597 Result: Down-regulated in Transcription
  misc_feature: MA Experiment 108597 PARAMETER Experiment Name: Zm_100uM_ABA_P Parameter: Age (day) Value: 9
  misc_feature: MA Experiment 108597 PARAMETER Experiment Name: Zm_100uM_ABA_P Parameter: Organism Value: Zea mays
  misc_feature: MA Experiment 108597 PARAMETER Experiment Name: Zm_100uM_ABA_P Parameter: Plant Line Value: 35A19
  misc_feature: MA Experiment 108597 PARAMETER Experiment Name: Zm_100uM_ABA_P Parameter: Timepoint (hr) Value: 24
  misc_feature: MA Experiment 108597 PARAMETER Experiment Name: Zm_100uM_ABA_P Parameter: Tissue Value: Aerial
  misc_feature: MA Experiment 108597 PARAMETER Experiment Name: Zm_100uM_ABA_P Parameter: Treatment Value: 100uM ABA vs. No Treatment
  misc_feature: MA Experiment ID: 108689 Result: Down-regulated in Transcription
  misc_feature: MA Experiment 108689 PARAMETER Experiment Name: Zm_Drought_Roots_P Parameter: Age (day) Value: 9
  misc_feature: MA Experiment 108689 PARAMETER Experiment Name: Zm_Drought_Roots_P Parameter: Organism Value: Zea mays
  misc_feature: MA Experiment 108689 PARAMETER Experiment Name: Zm_Drought_Roots_P Parameter: Plant Line Value: 35A19
  misc_feature: MA Experiment 108689 PARAMETER Experiment Name: Zm_Drought_Roots_P Parameter: Timepoint (hr) Value: 24
  misc_feature: MA Experiment 108689 PARAMETER Experiment Name: Zm_Drought_Roots_P Parameter: Tissue Value: Roots
  misc_feature: MA Experiment 108689 PARAMETER Experiment Name: Zm_Drought_Roots_P Parameter: Treatment Value: Drought vs. No Drought
  misc_feature: MA Experiment ID: 20000479 Result: Down-regulated in Transcription
  misc_feature: MA Experiment 20000479 PARAMETER Experiment Name: Zm_Drought_P Parameter: Age (day) Value: 10
  misc_feature: MA Experiment 20000479 PARAMETER Experiment Name: Zm_Drought_P Parameter: Organism Value: Zea mays
  misc_feature: MA Experiment 20000479 PARAMETER Experiment Name: Zm_Drought_P Parameter: Plant Line Value: 35A19
  misc_feature: MA Experiment 20000479 PARAMETER Experiment Name: Zm_Drought_P Parameter: Timepoint (hr) Value: 48
  misc_feature: MA Experiment 20000479 PARAMETER Experiment Name: Zm_Drought_P Parameter: Tissue Value: Aerial
  misc_feature: MA Experiment 20000479 PARAMETER Experiment Name: Zm_Drought_P Parameter: Treatment Value: Drought vs. No Drought
  misc_feature: MA Experiment ID: 20000480 Result: Down-regulated in Transcription
  misc_feature: MA Experiment 20000480 PARAMETER Experiment Name: Zm_Drought_P Parameter: Age (day) Value: 11
  misc_feature: MA Experiment 20000480 PARAMETER Experiment Name: Zm_Drought_P Parameter: Organism Value: Zea mays
  misc_feature: MA Experiment 20000480 PARAMETER Experiment Name: Zm_Drought_P Parameter: Plant Line Value: 35A19
  misc_feature: MA Experiment 20000480 PARAMETER Experiment Name: Zm_Drought_P Parameter: Timepoint (hr) Value: 72
  misc_feature: MA Experiment 20000480 PARAMETER Experiment Name: Zm_Drought_P Parameter: Tissue Value: Aerial
  misc_feature: MA Experiment 20000480 PARAMETER Experiment Name: Zm_Drought_P Parameter: Treatment Value: Drought vs. No Drought
gcacgagaccattacctagaacatcctaatcgaaaatcgacacacagatcgaacttctcctgtcgtctgcctaccagtagctagctctaatacatagcagccctcgctcgcaaggtactgcactacgatggccgccacctcctcctcctcctcctccacggtagttgcacttgcggcgcttctcttcttgctccttgtaacgtgtggctcgtgcgcgagaccggcgagctttaacgcctccgactttaccgccgaccccaactgggaggctgcccgggccacctggtacggtgcgcccaccggcgccggccctgatgacgacggtggtgcctgtggattcaagaacgtgaacctgccgccgttctcggcgatgacatcgtgcggcaacgagcccctcttcaaggacggcaagggctgcggctcctgctaccagatacgatgccaaaaccacccagcctgctccggcaatccggagacggtgatcatcaccgacatgaactactaccccgtggccaagtaccacttcgacctcagcggcacggcgttcggcgccatggccaagcccggccgcaccgacgagctccgccacgccggcatcatcgacatccagttcaagagggtgccctgcaactaccccgggcagaaggtgacgttccacatcgaggaggggtccaacccggtgtacctggcggtgctcgtcgagttcgaggacggcgacggcgacgtggtgcaggtggacctcatggaggccaactccgggtcgtggacgccgatgcgcgagtcgtgggggtccatctggcggctggactccggccaccgcctcgccgcgcccttctccctgcgcatcaccaacgagtccggcaagacgctggtggccaaccaggtcatcccggccaactgggttcccaacacctactaccgttccatcatccagtactagctctcggcggccgccgcgcaccacgatagctctgcgtccttgtgcttgattagtttggtagtgctattgtattgctgcatatgcagcatgggactgatgagcactgtgcgaggtgcctcagtcgattattactggtagatggtggtggcgtgcgcgcggccttcacggcggagttggagactgggaacgaaatggaggaaggccaagttaatttgcagatgctttcccgcccattgtccatgcatgtaatgtaccagggcgattgaaattataaattattaatggtgtgtttgttttgtggagtcg

SEQ ID NO: 11751 - protein, 270 aa, Zea mays subsp. mays
  peptide (1)..(270): Ceres Seq. ID no. 12366641
  misc_feature (174)..(255): Pfam Name: Pollen allergen Pfam Description: Pollen allergen
  misc_feature (1)..(270): Homolog of NCBI NO: 14193773 NR Description: beta-expansin 7 [Zea mays]
  misc_feature (8)..(270): Homolog of NCBI NO: 37536760 NR Description: beta-expansin EXPB3 [Oryza sativa (japonica
  misc_feature (10)..(270): Homolog of NCBI NO: 14330330 NR Description: beta expansin B3 [Festuca pratensis]
  misc_feature (10)..(270): Homolog of NCBI NO: 37536756 NR Description: beta-expansin EXPB6 [Oryza sativa (japonica
  misc_feature (2)..(270): Homolog of NCBI NO: 8118432 NR Description: beta-expansin [Oryza sativa]
  misc_feature (9)..(270): Homolog of NCBI NO: 14330328 NR Description: beta expansin B2 [Festuca pratensis]
  misc_feature (10)..(270): Homolog of NCBI NO: 14193775 NR Description: beta-expansin 8 [Zea mays]
  misc_feature (35)..(270): Homolog of NCBI NO: 8118425 NR Description: beta-expansin [Oryza sativa]
  misc_feature (35)..(270): Homolog of NCBI NO: 37536762 NR Description: beta-expansin EXPB4 [Oryza sativa (japonica
  misc_feature (12)..(270): Homolog of NCBI NO: 11346546 NR Description: beta-expansin [Oryza sativa]
MAATSSSSSSTVVALAALLFLLLVTCGSCARPASFNASDFTADPNWEAARATWYGAPTGAGPDDDGGACGFKNVNLPPFSAMTSCGNEPLFKDGKGCGSCYQIRCQNHPACSGNPETVIITDMNYYPVAKYHFDLSGTAFGAMAKPGRTDELRHAGIIDIQFKRVPCNYPGQKVTFHIEEGSNPVYLAVLVEFEDGDGDVVQVDLMEANSGSWTPMRESWGSIWRLDSGHRLAAPFSLRITNESGKTLVANQVIPANWVPNTYYRSIIQY

SEQ ID NO: 11752 - protein, 189 aa, Zea mays subsp. mays
  peptide (1)..(189): Ceres Seq. ID no. 12366642
  misc_feature (93)..(174): Pfam Name: Pollen allergen Pfam Description: Pollen allergen
  misc_feature (1)..(189): Homolog of NCBI NO: 14193773 NR Description: beta-expansin 7 [Zea mays]
  misc_feature (1)..(189): Homolog of NCBI NO: 37536760 NR Description: beta-expansin EXPB3 [Oryza sativa (japonica
  misc_feature (1)..(189): Homolog of NCBI NO: 14330330 NR Description: beta expansin B3 [Festuca pratensis]
  misc_feature (1)..(189): Homolog of NCBI NO: 37536756 NR Description: beta-expansin EXPB6 [Oryza sativa (japonica
  misc_feature (1)..(189): Homolog of NCBI NO: 8118432 NR Description: beta-expansin [Oryza sativa]
  misc_feature (1)..(189): Homolog of NCBI NO: 14330328 NR Description: beta expansin B2 [Festuca pratensis]
  misc_feature (1)..(189): Homolog of NCBI NO: 14193775 NR Description: beta-expansin 8 [Zea mays]
  misc_feature (1)..(189): Homolog of NCBI NO: 8118425 NR Description: beta-expansin [Oryza sativa]
  misc_feature (1)..(189): Homolog of NCBI NO: 37536762 NR Description: beta-expansin EXPB4 [Oryza sativa (japonica
  misc_feature (1)..(189): Homolog of NCBI NO: 11346546 NR Description: beta-expansin [Oryza sativa]
MTSCGNEPLFKDGKGCGSCYQIRCQNHPACSGNPETVIITDMNYYPVAKYHFDLSGTAFGAMAKPGRTDELRHAGIIDIQFKRVPCNYPGQKVTFHIEEGSNPVYLAVLVEFEDGDGDVVQVDLMEANSGSWTPMRESWGSIWRLDSGHRLAAPFSLRITNESGKTLVANQVIPANWVPNTYYRSIIQY

SEQ ID NO: 11753 - protein, 176 aa, Zea mays subsp. mays
  peptide (1)..(176): Ceres Seq. ID no. 12366643
MPKPPSLLRQSGDGDHHRHELLPRGQVPLRPQRHGVRRHGQARPHRRAPPRRHHRHPVQEGALQLPRAEGDVPHRGGVQPGVPGGARRVRGRRRRRGAGGPHGGQLRVVDADARVVGVHLAAGLRPPPRRALLPAHHQRVRQDAGGQPGHPGQLGSQHLLPFHHPVLALGGRRAPR

SEQ ID NO: 11754 - DNA, 1434 bp, Zea mays subsp. mays
  misc_feature (1)..(1434): Ceres Seq. ID no. 12345709
  misc_feature: MA Experiment ID: 108522 Result: Down-regulated in Transcription
  misc_feature: MA Experiment 108522 PARAMETER Experiment Name: Zm_42deg_Heat_P Parameter: Age (day) Value: 8
  misc_feature: MA Experiment 108522 PARAMETER Experiment Name: Zm_42deg_Heat_P Parameter: Organism Value: Zea mays
  misc_feature: MA Experiment 108522 PARAMETER Experiment Name: Zm_42deg_Heat_P Parameter: Plant Line Value: 35A19
  misc_feature: MA Experiment 108522 PARAMETER Experiment Name: Zm_42deg_Heat_P Parameter: Temperature (deg C) Value: 42 vs. 22
  misc_feature: MA Experiment 108522 PARAMETER Experiment Name: Zm_42deg_Heat_P Parameter: Timepoint (hr) Value: 1
  misc_feature: MA Experiment 108522 PARAMETER Experiment Name: Zm_42deg_Heat_P Parameter: Tissue Value: Aerial
  misc_feature: MA Experiment ID: 108543 Result: Down-regulated in Transcription
  misc_feature: MA Experiment ID: 108544 Result: Down-regulated in Transcription
  misc_feature: MA Experiment ID: 20000478 Result: Down-regulated in Transcription
  misc_feature: MA Experiment 20000478 PARAMETER Experiment Name: Zm_5mM_SA_P Parameter: Age (day) Value: 11
  misc_feature: MA Experiment 20000478 PARAMETER Experiment Name: Zm_5mM_SA_P Parameter: Organism Value: Zea mays
  misc_feature: MA Experiment 20000478 PARAMETER Experiment Name: Zm_5mM_SA_P Parameter: Plant Line Value: 35A19
  misc_feature: MA Experiment 20000478 PARAMETER Experiment Name: Zm_5mM_SA_P Parameter: Timepoint (hr) Value: 72
  misc_feature: MA Experiment 20000478 PARAMETER Experiment Name: Zm_5mM_SA_P Parameter: Tissue Value: Aerial
  misc_feature: MA Experiment 20000478 PARAMETER Experiment Name: Zm_5mM_SA_P Parameter: Treatment Value: 5mM SA vs. No Treatment
  misc_feature: MA Experiment ID: 20000626 Result: Up-regulated in Transcription
  misc_feature: MA Experiment 20000626 PARAMETER Experiment Name: Zm_Herbicide-Treatments_P Parameter: Timepoint (hr) Value: 12
  misc_feature: MA Experiment 20000626 PARAMETER Experiment Name: Zm_Herbicide-Treatments_P Parameter: Tissue Value: Aerial
  misc_feature: MA Experiment 20000626 PARAMETER Experiment Name: Zm_Herbicide-Treatments_P Parameter: Treatment Value: Roundup vs. No Treatment
gatccccgttctcgctacgcccctgtctctccccgccgccaccctgccccggcgccgtagagcacggcgctggcccttgtttccctcccccggccggacctcggaagtatgtctcgggccatcgaatcgacaatgaggcaatctcggcagtttgtgaatctgatcatgaccaatctttacaacggcgccaagtccctgcacttcgtggacctgaagcggcagccactatttaagacaccactgccacctacggcatctacagacggagacagatttgaaacacaagacgctttctctcagacacagccaactgaatccttggtgttggagagacttcgccttccccgtccgagcttccaattcgaaacttccactgcacaagatcgcagctggtacattaactgcttaccgctttccgatcgcgtggtgttctgctcggatcagtgtggacacaactttgtggttgatggtatcgcacgttgtcttgtaaccatgcccagcctccacaaacgtaagatgatgcccctctccatcttcatccccagcactgatgtcgaaggcggtggcagcctcttccttgtggataggtcacccggcatcactgctacaagggtggaatttgagtccttagtgtaccgcaaggcaagcttcagcaacacctactcctggcaggctcaactcctcccaccagcaccgtaccccctttacacctcctactcctggcaggctcaactcctcccaccagcaccgtaccccctttacaccaagattagctcctatgctgtgatcggtggtggttcccacatctgcttatcagtcaagaatgaaggcacctattgcctggacacaaccagacacacatggagcaaagtcggcacgtggacactacccttcgacggcaaggttgagtatgtaccggagctgaagctctggtttggcgcctctgccgatcggcagaagttggctgccactgacctctcttatttgagcagcactgttgactcagccacgggtttccaaccagaggtcctgggctcttggatggagctgaccctgccagagggatgggagcagaaaggaagaactcagcttgtcaacctgggctcaggcaggttctgcgtcgcaaggttcttgaatgagatgtttgatccatacgggagtggatatgttttattgaccggtgtggagatcgttcctcattttgacaatctcactggtaatgacgttagtagtggcagtggagatggcagcaaagggaaacttaaactccaaataattcctcataaatcaagggtgtatatgcccaccaccgccttagcgttgattcaagatgtgttctgaataagtttggggctttgcactcaacaccctgttataatgattatgtattgtgttaattattttatccattgctgttgtggacttggttaatcc

SEQ ID NO: 11755 - protein, 410 aa, Zea mays subsp. mays
  peptide (1)..(410): Ceres Seq. ID no. 12345710
  misc_feature (26)..(366): Homolog of NCBI NO: 37531434 NR Description: hypothetical protein [Oryza sativa (japonica group)] >gi|22655770|gb|AAN04187.1| Hypothetical protein [Oryza
  misc_feature (9)..(397): Homolog of NCBI NO: 34907072 NR Description: OSJNBa0093F16.25 [Oryza sativa (japonica
  misc_feature (60)..(394): Homolog of NCBI NO: 34902348 NR Description: Hypothetical protein [Oryza sativa (japonica group)] >gi|24418029|gb|AAN60479.1| Hypothetical protein [Oryza
  misc_feature (58)..(398): Homolog of NCBI NO: 15451604 NR Description: Hypothetical protein [Oryza sativa]
  misc_feature (9)..(197): Homolog of NCBI NO: 38345446 NR Description: OSJNBa0042L16.1 [Oryza sativa (japonica
  misc_feature (201)..(379): Homolog of NCBI NO: 38345446 NR Description: OSJNBa0042L16.1 [Oryza sativa (japonica
  misc_feature (9)..(410): Homolog of NCBI NO: 34902338 NR Description: Unknown protein [Oryza sativa (japonica
  misc_feature (129)..(397): Homolog of NCBI NO: 38344193 NR Description: OSJNBa0064G10.9 [Oryza sativa (japonica
  misc_feature (9)..(162): Homolog of NCBI NO: 34898928 NR Description: OJ1316_A04.17 [Oryza sativa (japonica >gi|22093704|dbj|BAC06998.1| hypothetical protein [Oryza sativa
  misc_feature (228)..(353): Homolog of NCBI NO: 34898928 NR Description: OJ1316_A04.17 [Oryza sativa (japonica >gi|22093704|dbj|BAC06998.1| hypothetical protein [Oryza sativa
MSRAIESTMRQSRQFVNLIMTNLYNGAKSLHFVDLKRQPLFKTPLPPTASTDGDRFETQDAFSQTQPTESLVLERLRLPRPSFQFETSTAQDRSWYINCLPLSDRVVFCSDQCGHNFVVDGIARCLVTMPSLHKRKMMPLSIFIPSTDVEGGGSLFLVDRSPGITATRVEFESLVYRKASFSNTYSWQAQLLPPAPYPLYTSYSWQAQLLPPAPYPLYTKISSYAVIGGGSHICLSVKNEGTYCLDTTRHTWSKVGTWTLPFDGKVEYVPELKLWFGASADRQKLAATDLSYLSSTVDSATGFQPEVLGSWMELTLPEGWEQKGRTQLVNLGSGRFCVARFLNEMFDPYGSGYVLLTGVEIVPHFDNLTGNDVSSGSGDGSKGKLKLQIIPHKSRVYMPTTALALIQDVF

SEQ ID NO: 11756 - protein, 402 aa, Zea mays subsp. mays
  peptide (1)..(402): Ceres Seq. ID no. 12345711
  misc_feature (18)..(358): Homolog of NCBI NO: 37531434 NR Description: hypothetical protein [Oryza sativa (japonica group)] >gi|22655770|gb|AAN04187.1| Hypothetical protein [Oryza
  misc_feature (1)..(389): Homolog of NCBI NO: 34907072 NR Description: OSJNBa0093F16.25 [Oryza sativa (japonica
  misc_feature (52)..(386): Homolog of NCBI NO: 34902348 NR Description: Hypothetical protein [Oryza sativa (japonica group)] >gi|24418029|gb|AAN60479.1| Hypothetical protein [Oryza
  misc_feature (50)..(390): Homolog of NCBI NO: 15451604 NR Description: Hypothetical protein [Oryza sativa]
  misc_feature (1)..(189): Homolog of NCBI NO: 38345446 NR Description: OSJNBa0042L16.1 [Oryza sativa (japonica
  misc_feature (193)..(371): Homolog of NCBI NO: 38345446 NR Description: OSJNBa0042L16.1 [Oryza sativa (japonica
  misc_feature (1)..(402): Homolog of NCBI NO: 34902338 NR Description: Unknown protein [Oryza sativa (japonica
  misc_feature (121)..(389): Homolog of NCBI NO: 38344193 NR Description: OSJNBa0064G10.9 [Oryza sativa (japonica
  misc_feature (1)..(154): Homolog of NCBI NO: 34898928 NR Description: OJ1316_A04.17 [Oryza sativa (japonica >gi|22093704|dbj|BAC06998.1| hypothetical protein [Oryza sativa
  misc_feature (220)..(345): Homolog of NCBI NO: 34898928 NR Description: OJ1316_A04.17 [Oryza sativa (japonica >gi|22093704|dbj|BAC06998.1| hypothetical protein [Oryza sativa
MRQSRQFVNLIMTNLYNGAKSLHFVDLKRQPLFKTPLPPTASTDGDRFETQDAFSQTQPTESLVLERLRLPRPSFQFETSTAQDRSWYINCLPLSDRVVFCSDQCGHNFVVDGIARCLVTMPSLHKRKMMPLSIFIPSTDVEGGGSLFLVDRSPGITATRVEFESLVYRKASFSNTYSWQAQLLPPAPYPLYTSYSWQAQLLPPAPYPLYTKISSYAVIGGGSHICLSVKNEGTYCLDTTRHTWSKVGTWTLPFDGKVEYVPELKLWFGASADRQKLAATDLSYLSSTVDSATGFQPEVLGSWMELTLPEGWEQKGRTQLVNLGSGRFCVARFLNEMFDPYGSGYVLLTGVEIVPHFDNLTGNDVSSGSGDGSKGKLKLQIIPHKSRVYMPTTALALIQDVF

SEQ ID NO: 11757 - protein, 391 aa, Zea mays subsp. mays
  peptide (1)..(391): Ceres Seq. ID no. 12345712
  misc_feature (7)..(347): Homolog of NCBI NO: 37531434 NR Description: hypothetical protein [Oryza sativa (japonica group)] >gi|22655770|gb|AAN04187.1| Hypothetical protein [Oryza
  misc_feature (1)..(378): Homolog of NCBI NO: 34907072 NR Description: OSJNBa0093F16.25 [Oryza sativa (japonica
  misc_feature (41)..(375): Homolog of NCBI NO: 34902348 NR Description: Hypothetical protein [Oryza sativa (japonica group)] >gi|24418029|gb|AAN60479.1| Hypothetical protein [Oryza
  misc_feature (39)..(379): Homolog of NCBI NO: 15451604 NR Description: Hypothetical protein [Oryza sativa]
  misc_feature (1)..(178): Homolog of NCBI NO: 38345446 NR Description: OSJNBa0042L16.1 [Oryza sativa (japonica
  misc_feature (182)..(360): Homolog of NCBI NO: 38345446 NR Description: OSJNBa0042L16.1 [Oryza sativa (japonica
  misc_feature (1)..(391): Homolog of NCBI NO: 34902338 NR Description: Unknown protein [Oryza sativa (japonica
  misc_feature (110)..(378): Homolog of NCBI NO: 38344193 NR Description: OSJNBa0064G10.9 [Oryza sativa (japonica
  misc_feature (1)..(143): Homolog of NCBI NO: 34898928 NR Description: OJ1316_A04.17 [Oryza sativa (japonica >gi|22093704|dbj|BAC06998.1| hypothetical protein [Oryza sativa
  misc_feature (209)..(334): Homolog of NCBI NO: 34898928 NR Description: OJ1316_A04.17 [Oryza sativa (japonica >gi|22093704|dbj|BAC06998.1| hypothetical protein [Oryza sativa
MTNLYNGAKSLHFVDLKRQPLFKTPLPPTASTDGDRFETQDAFSQTQPTESLVLERLRLPRPSFQFETSTAQDRSWYINCLPLSDRVVFCSDQCGHNFVVDGIARCLVTMPSLHKRKMMPLSIFIPSTDVEGGGSLFLVDRSPGITATRVEFESLVYRKASFSNTYSWQAQLLPPAPYPLYTSYSWQAQLLPPAPYPLYTKISSYAVIGGGSHICLSVKNEGTYCLDTTRHTWSKVGTWTLPFDGKVEYVPELKLWFGASADRQKLAATDLSYLSSTVDSATGFQPEVLGSWMELTLPEGWEQKGRTQLVNLGSGRFCVARFLNEMFDPYGSGYVLLTGVEIVPHFDNLTGNDVSSGSGDGSKGKLKLQIIPHKSRVYMPTTALALIQDVF

SEQ ID NO: 11758 - DNA, 1283 bp, Zea mays subsp. mays
  misc_feature (1)..(1283): Ceres Seq. ID no. 12413628
  misc_feature: MA Experiment ID: 108536 Result: Down-regulated in Transcription
  misc_feature: MA Experiment 108536 PARAMETER Experiment Name: Zm_Meristem_P Parameter: Age (day) Value: 8
  misc_feature: MA Experiment 108536 PARAMETER Experiment Name: Zm_Meristem_P Parameter: Organism Value: Zea mays
  misc_feature: MA Experiment 108536 PARAMETER Experiment Name: Zm_Meristem_P Parameter: Plant Line Value: 35A19
  misc_feature: MA Experiment 108536 PARAMETER Experiment Name: Zm_Meristem_P Parameter: Tissue Value: Shoot Meristem vs. Above Shoot Meristem
aagcactcatccattccatcatcccctttgcaagtatagtctctctgctaagcgaagcgaagcttcaagctagtctcggcggctctagaagacgatgggcaaggacgacgtgatcgagagcggcgctggcggcggcgagttcgctgccaaggactacacggaccctcccccggcgccgctgatcgacgcggcggagctggggtcctggtcgctgtaccgcgccgtgatcgccgagttcatcgccacgctgctgttcctgtacatcacggtggccaccgtgatcgggtacaagcaccagacggacgcgtcggcgtcgggcgccgacgcggcgtgcggcggcgtgggcgtgctgggcatcgcctgggccttcggcggcatgatcttcgtcctcgtctactgcaccgccggcatctcggggggccacatcaaccccgccgtcaccttcggcctcttcctggcgcgcaaggtctccctggtgcgcgcgctgctctacatcgtggcgcagtgcctcggcgccatctgcggcgtcggcctcgtcaaggcgttccagagcgcctacttcgacaggtacggcggcggcgccaactcgctcgcctccggctactcccgcggcaccggcctcggcgccgagatcatcggcaccttcgtgctcgtctacaccgtcttctccgccaccgaccccaagcgcaacgcccgcgactcccacgtcccggttctggctcccctccccatcggcttcgccgtgttcatggtgcacctggccaccatccccgtcaccggcaccggcatcaacccggccaggagcctgggcgccgccgtcatctacaacaaggacaagccctgggacgaccactggatcttctgggtgggccctctcgtgggcgctgccatcgcggccttctaccaccagtacatcctccgggctggcgccatcaaggcccctcggctccttcaggagcaacgcgtgatgagcggggcttggctgtggagcaatggcgggcgacctacgggcggggggccgtgagcgaggagaatgccatcattcatcgatcgacttgggtgccggtggttggttcgggtcgcctttttttttgtttcagcagctgctgcgttgcgcgcgtgcgtgagatttggtttggtttcgttcccctgcaatgtaatcatgtcgtgactctcaagggattattccgctctgctcttatggtctctgttttctatttaatgattgttattaccatgtagcagtaaccatcgtcatcagtgagaaccttgttgcttctgtc

SEQ ID NO: 11759 - protein, 309 aa, Zea mays subsp. mays
  peptide (1)..(309): Ceres Seq. ID no. 12413629
  misc_feature (34)..(271): Pfam Name: Major intrinsic protein Pfam Description: Major intrinsic protein
  misc_feature (1)..(282): Homolog of NCBI NO: 13447801 NR Description: plasma membrane integral protein ZmPIP2-1 [Zea
  misc_feature (1)..(282): Homolog of NCBI NO: 29650727 NR Description: aquaporin [Zea mays]
  misc_feature (1)..(282): Homolog of NCBI NO: 13447803 NR Description: plasma membrane integral protein ZmPIP2-2 [Zea
  misc_feature (1)..(282): Homolog of NCBI NO: 34901270 NR Description: putative plasma membrane intrinsic protein [Oryza
  misc_feature (1)..(282): Homolog of NCBI NO: 7441249 NR Description: probable plasma membrane intrinsic protein - rice
  misc_feature (1)..(281): Homolog of NCBI NO: 13447805 NR Description: plasma membrane integral protein ZmPIP2-3 [Zea
  misc_feature (1)..(281): Homolog of NCBI NO: 13447807 NR Description: plasma membrane integral protein ZmPIP2-4 [Zea
  misc_feature (1)..(281): Homolog of NCBI NO: 4741931 NR Description: plasma membrane intrinsic protein [Zea mays]
  misc_feature (1)..(281): Homolog of NCBI NO: 7441245 NR Description: plasma membrane intrinsic protein BPW1 - barley
  misc_feature (1)..(279): Homolog of NCBI NO: 34901254 NR Description: putative plasma membrane intrinsic protein [Oryza
MGKDDVIESGAGGGEFAAKDYTDPPPAPLIDAAELGSWSLYRAVIAEFIATLLFLYITVATVIGYKHQTDASASGADAACGGVGVLGIAWAFGGMIFVLVYCTAGISGGHINPAVTFGLFLARKVSLVRALLYIVAQCLGAICGVGLVKAFQSAYFDRYGGGANSLASGYSRGTGLGAEIIGTFVLVYTVFSATDPKRNARDSHVPVLAPLPIGFAVFMVHLATIPVTGTGINPARSLGAAVIYNKDKPWDDHWIFWVGPLVGAAIAAFYHQYILRAGAIKAPRLLQEQRVMSGAWLWSNGGRPTGGGP

SEQ ID NO: 11760 - protein, 215 aa, Zea mays subsp. mays
  peptide (1)..(215): Ceres Seq. ID no. 12413630
  misc_feature (1)..(177): Pfam Name: Major intrinsic protein Pfam Description: Major intrinsic protein
  misc_feature (1)..(188): Homolog of NCBI NO: 7441249 NR Description: probable plasma membrane intrinsic protein - rice
  misc_feature (1)..(187): Homolog of NCBI NO: 13447805 NR Description: plasma membrane integral protein ZmPIP2-3 [Zea
  misc_feature (1)..(187): Homolog of NCBI NO: 13447807 NR Description: plasma membrane integral protein ZmPIP2-4 [Zea
  misc_feature (1)..(188): Homolog of NCBI NO: 13447801 NR Description: plasma membrane integral protein ZmPIP2-1 [Zea
  misc_feature (1)..(188): Homolog of NCBI NO: 13447803 NR Description: plasma membrane integral protein ZmPIP2-2 [Zea
  misc_feature (1)..(188): Homolog of NCBI NO: 34901270 NR Description: putative plasma membrane intrinsic protein [Oryza
  misc_feature (1)..(188): Homolog of NCBI NO: 29650727 NR Description: aquaporin [Zea mays]
  misc_feature (1)..(187): Homolog of NCBI NO: 4741931 NR Description: plasma membrane intrinsic protein [Zea mays]
  misc_feature (1)..(187): Homolog of NCBI NO: 7441245 NR Description: plasma membrane intrinsic protein BPW1 - barley
  misc_feature (1)..(185): Homolog of NCBI NO: 34901254 NR Description: putative plasma membrane intrinsic protein [Oryza
MIFVLVYCTAGISGGHINPAVTFGLFLARKVSLVRALLYIVAQCLGAICGVGLVKAFQSAYFDRYGGGANSLASGYSRGTGLGAEIIGTFVLVYTVFSATDPKRNARDSHVPVLAPLPIGFAVFMVHLATIPVTGTGINPARSLGAAVIYNKDKPWDDHWIFWVGPLVGAAIAAFYHQYILRAGAIKAPRLLQEQRVMSGAWLWSNGGRPTGGGP

SEQ ID NO: 11761 - DNA, 1299 bp, Zea mays subsp. mays
  misc_feature (1)..(1299): Ceres Seq. ID no. 12341243
  misc_feature: MA Experiment ID: 108528 Result: Down-regulated in Transcription
  misc_feature: MA Experiment 108528 PARAMETER Experiment Name: Zm_Imbibed_Seeds_P Parameter: Age (day) Value: 5 vs. 2
  misc_feature: MA Experiment 108528 PARAMETER Experiment Name: Zm_Imbibed_Seeds_P Parameter: Organism Value: Zea mays
  misc_feature: MA Experiment 108528 PARAMETER Experiment Name: Zm_Imbibed_Seeds_P Parameter: Plant Line Value: 35A19
  misc_feature: MA Experiment 108528 PARAMETER Experiment Name: Zm_Imbibed_Seeds_P Parameter: Tissue Value: Aerial vs. Embryo
  misc_feature: MA Experiment ID: 108530 Result: Down-regulated in Transcription
  misc_feature: MA Experiment 108530 PARAMETER Experiment Name: Zm_Imbibed_Seeds_P Parameter: Age (day) Value: 6 vs. 2
  misc_feature: MA Experiment 108530 PARAMETER Experiment Name: Zm_Imbibed_Seeds_P Parameter: Organism Value: Zea mays
  misc_feature: MA Experiment 108530 PARAMETER Experiment Name: Zm_Imbibed_Seeds_P Parameter: Plant Line Value: 35A19
  misc_feature: MA Experiment 108530 PARAMETER Experiment Name: Zm_Imbibed_Seeds_P Parameter: Tissue Value: Aerial vs. Embryo
  misc_feature: MA Experiment ID: 108543 Result: Up-regulated in Transcription
  misc_feature: MA Experiment ID: 108545 Result: Down-regulated in Transcription
  misc_feature: MA Experiment 108545 PARAMETER Experiment Name: Zm_Imbibed_Seeds_P Parameter: Age (day) Value: 3 vs. 2
  misc_feature: MA Experiment 108545 PARAMETER Experiment Name: Zm_Imbibed_Seeds_P Parameter: Organism Value: Zea mays
  misc_feature: MA Experiment 108545 PARAMETER Experiment Name: Zm_Imbibed_Seeds_P Parameter: Plant Line Value: 35A19
  misc_feature: MA Experiment 108545 PARAMETER Experiment Name: Zm_Imbibed_Seeds_P Parameter: Tissue Value: Aerial vs. Embryo
  misc_feature: MA Experiment ID: 108547 Result: Down-regulated in Transcription
  misc_feature: MA Experiment 108547 PARAMETER Experiment Name: Zm_Imbibed_Seeds_P Parameter: Age (day) Value: 4 vs. 2
  misc_feature: MA Experiment 108547 PARAMETER Experiment Name: Zm_Imbibed_Seeds_P Parameter: Organism Value: Zea mays
  misc_feature: MA Experiment 108547 PARAMETER Experiment Name: Zm_Imbibed_Seeds_P Parameter: Plant Line Value: 35A19
  misc_feature: MA Experiment 108547 PARAMETER Experiment Name: Zm_Imbibed_Seeds_P Parameter: Tissue Value: Aerial vs. Embryo
  misc_feature: MA Experiment ID: 108689 Result: Up-regulated in Transcription
  misc_feature: MA Experiment 108689 PARAMETER Experiment Name: Zm_Drought_Roots_P Parameter: Age (day) Value: 9
  misc_feature: MA Experiment 108689 PARAMETER Experiment Name: Zm_Drought_Roots_P Parameter: Organism Value: Zea mays
  misc_feature: MA Experiment 108689 PARAMETER Experiment Name: Zm_Drought_Roots_P Parameter: Plant Line Value: 35A19
  misc_feature: MA Experiment 108689 PARAMETER Experiment Name: Zm_Drought_Roots_P Parameter: Timepoint (hr) Value: 24
  misc_feature: MA Experiment 108689 PARAMETER Experiment Name: Zm_Drought_Roots_P Parameter: Tissue Value: Roots
  misc_feature: MA Experiment 108689 PARAMETER Experiment Name: Zm_Drought_Roots_P Parameter: Treatment Value: Drought vs. No Drought
aatacaagccgggaaccagaccccaccagcagcactccatatactgcatgcatagagatagatagatatatatagagcttaattactatagtcgtcgtcgtcgatcgtaactgcaatagctttagtttttgcagtcatcagataaatatagggtccataaatatatccatcagctagctgtaactgcaactgcagtcgcaatagctatagttttcagttgattagctagctactaactacaacaagctaggcaaatcgatcaaactaaggctcggcagcggcagcggcatggacgcgatcagcagcctgttgctgcagcagggatggaggaagggcccctggacggcgctggaggacaggctgctcaccgagtacgtgcagcagcacggcgagggctgctggaactccgtcgccaagctcacagggctgcggcggagcgggaagagctgccggctgcggtgggtgaactacctccggccggacctcaagcggggcaagatcacccccgacgaggagaccgtcatcctccacctgcacgccatgctcggcaacaggtggtcggcgatcgcgcggtgcctgccggggaggacggacaacgagatcaagaactactggcggacgcacttcaagaaggcccggccgtcgcggcgcgcccgggcgcagctgctgcaccagtaccagctgcagcagcaggagcagcgccgccagtacctgcagctcctgcagccgcagcagctgcagcagcagcagctgggggtggtgaaacaacagcagctggagcagcagagcccgccggagcctcatcaccaggccatgatggacagcctgcaaagcacggcggcgtgctactgcagcccggtgccggaggaatgctgcccgctcccggccgacgacgacgcggtgctgtgggatagcctgtggaggctggtggacggggatggatgcggcgacggcgacggcgatggctccagcggaggcgactactagccggctagcacgtacgtgtgcgtgtgtatgccaggctgccagccagccagtgtaaagaaataaagcggaagaggaggttctcttcaggtttcagctgctgcaagccaaggatcctgctagtggtagtagagacatgctaattttcctacgagaatagacgatcatgcttcatgcttttttcccctttatccatgaaccatgagcaagtgacattgtgtatcgaagggccctctgtttatgttattatggcctgattacaaggttggaataccttcatgttccttttggtttcaagaatcaagatcatgtttt

SEQ ID NO: 11762 - protein, 232 aa, Zea mays subsp. mays
  peptide (1)..(232): Ceres Seq. ID no. 12341244
  misc_feature (15)..(62): Pfam Name: Myb-like DNA-binding domain Pfam Description: Myb-like DNA-binding domain
  misc_feature (9)..(159): Homolog of NCBI NO: 32489528 NR Description: OSJNBa0043L24.19 [Oryza sativa (japonica
  misc_feature (8)..(155): Homolog of NCBI NO: 15230095 NR Description: myb family transcription factor; protein id:
  misc_feature (8)..(159): Homolog of NCBI NO: 15236297 NR Description: myb family transcription factor; protein id:
  misc_feature (8)..(115): Homolog of NCBI NO: 1732513 NR Description: snapdragon myb protein 305 homolog [Arabidopsis
  misc_feature (10)..(228): Homolog of NCBI NO: 15230123 NR Description: myb-like transcription factor, putative; protein At3g30210.1, supported by cDNA: gi_15375302 [Arabidopsis
  misc_feature (1)..(135): Homolog of NCBI NO: 15225687 NR Description: putative MYB family transcription factor; protein At2g32460.1, supported by cDNA: gi_18087348 [Arabidopsis >gi|7438357|pir||T02545 probable MYB family transcription factor
  misc_feature (1)..(135): Homolog of NCBI NO: 18087349 NR Description: putative transcription factor MYB101 [Arabidopsis
  misc_feature (10)..(115): Homolog of NCBI NO: 30024600 NR Description: transcription factor MYB102 [Lotus japonicus]
  misc_feature (1)..(169): Homolog of NCBI NO: 10177377 NR Description: contains similarity to MYB-related transcription
  misc_feature (1)..(169): Homolog of NCBI NO: 18423700 NR Description: putative protein; protein id: At5g55020.1, by cDNA: gi_14161418 [Arabidopsis thaliana]
MDAISSLLLQQGWRKGPWTALEDRLLTEYVQQHGEGCWNSVAKLTGLRRSGKSCRLRWVNYLRPDLKRGKITPDEETVILHLHAMLGNRWSAIARCLPGRTDNEIKNYWRTHFKKARPSRRARAQLLHQYQLQQQEQRRQYLQLLQPQQLQQQQLGVVKQQQLEQQSPPEPHHQAMMDSLQSTAACYCSPVPEECCPLPADDDAVLWDSLWRLVDGDGCGDGDGDGSSGGDY

SEQ ID NO: 11763 - protein, 196 aa, Zea mays subsp. mays
  peptide (1)..(196): Ceres Seq. ID no. 12341245
  misc_feature (105)..(163): Homolog of NCBI NO: 18390103 NR Description: putative anthocyanin regulatory C1 [Sorghum
MEEGPLDGAGGQAAHRVRAAARRGLLELRRQAHRAAAEREELPAAVGELPPAGPQAGQDHPRRGDRHPPPARHARQQVVGDRAVPAGEDGQRDQELLADALQEGPAVAARPGAAAAPVPAAAAGAAPPVPAAPAAAAAAAAAAGGGETTAAGAAEPAGASSPGHDGQPAKHGGVLLQPGAGGMLPAPGRRRRGAVG

SEQ ID NO: 11764 - protein, 148 aa, Zea mays subsp. mays
  peptide (1)..(148): Ceres Seq. ID no. 12341246
  misc_feature (1)..(75): Homolog of NCBI NO: 32489528 NR Description: OSJNBa0043L24.19 [Oryza sativa (japonica
  misc_feature (1)..(71): Homolog of NCBI NO: 15230095 NR Description: myb family transcription factor; protein id:
  misc_feature (1)..(75): Homolog of NCBI NO: 15236297 NR Description: myb family transcription factor; protein id:
  misc_feature (1)..(31): Homolog of NCBI NO: 1732513 NR Description: snapdragon myb protein 305 homolog [Arabidopsis
  misc_feature (1)..(144): Homolog of NCBI NO: 15230123 NR Description: myb-like transcription factor, putative; protein At3g30210.1, supported by cDNA: gi_15375302 [Arabidopsis
  misc_feature (1)..(51): Homolog of NCBI NO: 15225687 NR Description: putative MYB family transcription factor; protein At2g32460.1, supported by cDNA: gi_18087348 [Arabidopsis >gi|7438357|pir||T02545 probable MYB family transcription factor
  misc_feature (1)..(51): Homolog of NCBI NO: 18087349 NR Description: putative transcription factor MYB101 [Arabidopsis
  misc_feature (1)..(31): Homolog of NCBI NO: 30024600 NR Description: transcription factor MYB102 [Lotus japonicus]
  misc_feature (1)..(85): Homolog of NCBI NO: 10177377 NR Description: contains similarity to MYB-related transcription
  misc_feature (1)..(85): Homolog of NCBI NO: 18423700 NR Description: putative protein; protein id: At5g55020.1, by cDNA: gi_14161418 [Arabidopsis thaliana]
MLGNRWSAIARCLPGRTDNEIKNYWRTHFKKARPSRRARAQLLHQYQLQQQEQRRQYLQLLQPQQLQQQQLGVVKQQQLEQQSPPEPHHQAMMDSLQSTAACYCSPVPEECCPLPADDDAVLWDSLWRLVDGDGCGDGDGDGSSGGDY

SEQ ID NO: 11765 - DNA, 860 bp, Zea mays subsp. mays
  misc_feature (1)..(860): Ceres Seq. ID no. 12404667
  misc_feature: MA Experiment ID: 108528 Result: Down-regulated in Transcription
  misc_feature: MA Experiment 108528 PARAMETER Experiment Name: Zm_Imbibed_Seeds_P Parameter: Age (day) Value: 5 vs. 2
  misc_feature: MA Experiment 108528 PARAMETER Experiment Name: Zm_Imbibed_Seeds_P Parameter: Organism Value: Zea mays
  misc_feature: MA Experiment 108528 PARAMETER Experiment Name: Zm_Imbibed_Seeds_P Parameter: Plant Line Value: 35A19
  misc_feature: MA Experiment 108528 PARAMETER Experiment Name: Zm_Imbibed_Seeds_P Parameter: Tissue Value: Aerial vs. Embryo
  misc_feature: MA Experiment ID: 108530 Result: Down-regulated in Transcription
  misc_feature: MA Experiment 108530 PARAMETER Experiment Name: Zm_Imbibed_Seeds_P Parameter: Age (day) Value: 6 vs. 2
  misc_feature: MA Experiment 108530 PARAMETER Experiment Name: Zm_Imbibed_Seeds_P Parameter: Organism Value: Zea mays
  misc_feature: MA Experiment 108530 PARAMETER Experiment Name: Zm_Imbibed_Seeds_P Parameter: Plant Line Value: 35A19
  misc_feature: MA Experiment 108530 PARAMETER Experiment Name: Zm_Imbibed_Seeds_P Parameter: Tissue Value: Aerial vs. Embryo
  misc_feature: MA Experiment ID: 108535 Result: Down-regulated in Transcription
  misc_feature: MA Experiment 108535 PARAMETER Experiment Name: Zm_Meristem_P Parameter: Age (day) Value: 8
  misc_feature: MA Experiment 108535 PARAMETER Experiment Name: Zm_Meristem_P Parameter: Organism Value: Zea mays
  misc_feature: MA Experiment 108535 PARAMETER Experiment Name: Zm_Meristem_P Parameter: Plant Line Value: 35A19
  misc_feature: MA Experiment 108535 PARAMETER Experiment Name: Zm_Meristem_P Parameter: Tissue Value: Root Meristem vs. Above Root Meristem
  misc_feature: MA Experiment ID: 108545 Result: Down-regulated in Transcription
  misc_feature: MA Experiment 108545 PARAMETER Experiment Name: Zm_Imbibed_Seeds_P Parameter: Age (day) Value: 3 vs. 2
  misc_feature: MA Experiment 108545 PARAMETER Experiment Name: Zm_Imbibed_Seeds_P Parameter: Organism Value: Zea mays
  misc_feature: MA Experiment 108545 PARAMETER Experiment Name: Zm_Imbibed_Seeds_P Parameter: Plant Line Value: 35A19
  misc_feature: MA Experiment 108545 PARAMETER Experiment Name: Zm_Imbibed_Seeds_P Parameter: Tissue Value: Aerial vs. Embryo
  misc_feature: MA Experiment ID: 108547 Result: Down-regulated in Transcription
  misc_feature: MA Experiment 108547 PARAMETER Experiment Name: Zm_Imbibed_Seeds_P Parameter: Age (day) Value: 4 vs. 2
  misc_feature: MA Experiment 108547 PARAMETER Experiment Name: Zm_Imbibed_Seeds_P Parameter: Organism Value: Zea mays
  misc_feature: MA Experiment 108547 PARAMETER Experiment Name: Zm_Imbibed_Seeds_P Parameter: Plant Line Value: 35A19
  misc_feature: MA Experiment 108547 PARAMETER Experiment Name: Zm_Imbibed_Seeds_P Parameter: Tissue Value: Aerial vs. Embryo
  misc_feature: MA Experiment ID: 20000478 Result: Down-regulated in Transcription
  misc_feature: MA Experiment 20000478 PARAMETER Experiment Name: Zm_5mM_SA_P Parameter: Age (day) Value: 11
  misc_feature: MA Experiment 20000478 PARAMETER Experiment Name: Zm_5mM_SA_P Parameter: Organism Value: Zea mays
  misc_feature: MA Experiment 20000478 PARAMETER Experiment Name: Zm_5mM_SA_P Parameter: Plant Line Value: 35A19
  misc_feature: MA Experiment 20000478 PARAMETER Experiment Name: Zm_5mM_SA_P Parameter: Timepoint (hr) Value: 72
  misc_feature: MA Experiment 20000478 PARAMETER Experiment Name: Zm_5mM_SA_P Parameter: Tissue Value: Aerial
  misc_feature: MA Experiment 20000478 PARAMETER Experiment Name: Zm_5mM_SA_P Parameter: Treatment Value: 5mM SA vs. No Treatment
  misc_feature: MA Experiment ID: 20000480 Result: Down-regulated in Transcription
  misc_feature: MA Experiment 20000480 PARAMETER Experiment Name: Zm_Drought_P Parameter: Age (day) Value: 11
  misc_feature: MA Experiment 20000480 PARAMETER Experiment Name: Zm_Drought_P Parameter: Organism Value: Zea mays
  misc_feature: MA Experiment 20000480 PARAMETER Experiment Name: Zm_Drought_P Parameter: Plant Line Value: 35A19
  misc_feature: MA Experiment 20000480 PARAMETER Experiment Name: Zm_Drought_P Parameter: Timepoint (hr) Value: 72
  misc_feature: MA Experiment 20000480 PARAMETER Experiment Name: Zm_Drought_P Parameter: Tissue Value: Aerial
  misc_feature: MA Experiment 20000480 PARAMETER Experiment Name: Zm_Drought_P Parameter: Treatment Value: Drought vs. No Drought
  misc_feature: MA Experiment ID: 20000535 Result: Down-regulated in Transcription
  misc_feature: MA Experiment 20000535 PARAMETER Experiment Name: Zm_Hybrid_Seed_Dev_P Parameter: DAP Value: 30 vs. 12
  misc_feature: MA Experiment 20000535 PARAMETER Experiment Name: Zm_Hybrid_Seed_Dev_P Parameter: Organism Value: Zea mays
  misc_feature: MA Experiment 20000535 PARAMETER Experiment Name: Zm_Hybrid_Seed_Dev_P Parameter: Plant Line Value: 35A19
  misc_feature: MA Experiment 20000535 PARAMETER Experiment Name: Zm_Hybrid_Seed_Dev_P Parameter: Tissue Value: Embryo vs. Unfert Floret
  misc_feature: MA Experiment ID: 20000626 Result: Up-regulated in Transcription
  misc_feature: MA Experiment 20000626 PARAMETER Experiment Name: Zm_Herbicide-Treatments_P Parameter: Timepoint (hr) Value: 12
  misc_feature: MA Experiment 20000626 PARAMETER Experiment Name: Zm_Herbicide-Treatments_P Parameter: Tissue Value: Aerial
  misc_feature: MA Experiment 20000626 PARAMETER Experiment Name: Zm_Herbicide-Treatments_P Parameter: Treatment Value: Roundup vs. No Treatment
  misc_feature: MA Experiment ID: 20000629 Result: Up-regulated in Transcription
  misc_feature: MA Experiment 20000629 PARAMETER Experiment Name: Zm_Herbicide-Treatments_P Parameter: Timepoint (hr) Value: 12
  misc_feature: MA Experiment 20000629 PARAMETER Experiment Name: Zm_Herbicide-Treatments_P Parameter: Tissue Value: Aerial
  misc_feature: MA Experiment 20000629 PARAMETER Experiment Name: Zm_Herbicide-Treatments_P Parameter: Treatment Value: Trimec vs. No Treatment
  misc_feature: MA Experiment ID: 20000633 Result: Up-regulated in Transcription
  misc_feature: MA Experiment 20000633 PARAMETER Experiment Name: Zm_Herbicide-Treatments_P Parameter: Timepoint (hr) Value: 4
  misc_feature: MA Experiment 20000633 PARAMETER Experiment Name: Zm_Herbicide-Treatments_P Parameter: Tissue Value: Aerial
  misc_feature: MA Experiment 20000633 PARAMETER Experiment Name: Zm_Herbicide-Treatments_P Parameter: Treatment Value: Trimec vs. No Treatment
attacccaccataccaaccccgcgttgcggttatatagggccgtatttcccccgcgtctccgcgtcagtggaagcgatcgacaccattcaagctaaagctgctttcttgggaaacgcttcatcgccacagctcgatcgatggcttcttcctggggttctcggttgccgctcgcagtagtgctgctgctcgtggcactgctcctcctccacggcagccgccacaagctacaccgtcggcgacgggtccggctggacaaccggcgtcgactacacatcttgggccgcctccaaaaacttcaaagtcggggacaatctcgtgttcaactacgcgaaagggctgcacacggtggtggaggtgagcgcggccgagtacatggcgtgcacggccgccaactcgctgggctccgacagcagcggcgcgaccaccgtggccctcaggacgccaggcacccactacttcgtgtgcagcatcacggggcactgcggcgccgggatgaagctggcggtgaccctcggcggctccaactcccctgctgccacgccgcggacgtcgtccccgacccctaccacgccgtacacgacgccggccaccaccacgccgtacacgacgccgacgtgctctggcggcggcggcaccacggcgaccccgggcatgactccgttcacgtcataccccagcgcggccggccttgggtcggcggcgttggctggatttagtctggtttggtgtgtgagtgtccggctagcgctgctctaggcaaagggcggccatggaccgtggtcgaccagggtatgtaacagtgtaacgtatgtgtttgttctttgttccggatcgagctagctggggtatagtatacttg

SEQ ID NO: 11766 - protein, 192 aa, Zea mays subsp. mays
  peptide (1)..(192): Ceres Seq. ID no. 12404668
MASSWGSRLPLAVVLLLVALLLLHGSRHKLHRRRRVRLDNRRRLHILGRLQKLQSRGQSRVQLRERAAHGGGGERGRVHGVHGRQLAGLRQQRRDHRGPQDARHPLLRVQHHGALRRRDEAGGDPRRLQLPCCHAADVVPDPYHAVHDAGHHHAVHDADVLWRRRHHGDPGHDSVHVIPQRGRPWVGGVGWI

SEQ ID NO: 11767 - protein, 127 aa, Zea mays subsp. mays
  peptide (1)..(127): Ceres Seq. ID no. 12404669
  misc_feature (1)..(127): Homolog of NCBI NO: 14140127 NR Description: uclacyanin 3-like protein [Oryza sativa]
  misc_feature (1)..(90): Homolog of NCBI NO: 2493318 NR Description: Blue copper protein precursor
  misc_feature (1)..(91): Homolog of NCBI NO: 38346158 NR Description: OSJNBa0079A21.5 [Oryza sativa (japonica
  misc_feature (1)..(117): Homolog of NCBI NO: 25453522 NR Description: blue copper-binding protein II [imported] -
  misc_feature (1)..(117): Homolog of NCBI NO: 15224960 NR Description: phytocyanin; protein id: At2g44790.1, supported cDNA: 19760., supported by cDNA: gi_15146301, supported by cDNA: supported by cDNA: gi_20147336, supported by cDNA: gi_3399768
  misc_feature (1)..(117): Homolog of NCBI NO: 21554060 NR Description: phytocyanin [Arabidopsis thaliana]
  misc_feature (1)..(117): Homolog of NCBI NO: 25453521 NR Description: blue copper-binding protein II [imported] -
  misc_feature (1)..(66): Homolog of NCBI NO: 15219890 NR Description: uclacyanin II, putative; protein id: At1g22480.1
  misc_feature (1)..(33): Homolog of NCBI NO: 3747044 NR Description: blue copper protein [Zea mays]
  misc_feature (1)..(118): Homolog of NCBI NO: 38636764 NR Description: putative blue copper binding protein [Oryza
MACTAANSLGSDSSGATTVALRTPGTHYFVCSITGHCGAGMKLAVTLGGSNSPAATPRTSSPTPTTPYTTPATTTPYTTPTCSGGGGTTATPGMTPFTSYPSAAGLGSAALAGFSLVWCVSVRLALL

SEQ ID NO: 11768 - DNA, 1107 bp, Zea mays subsp. mays
  misc_feature (1)..(1107): Ceres Seq. ID no. 12376269
  misc_feature: MA Experiment ID: 108528 Result: Up-regulated in Transcription
  misc_feature: MA Experiment 108528 PARAMETER Experiment Name: Zm_Imbibed_Seeds_P Parameter: Age (day) Value: 5 vs. 2
  misc_feature: MA Experiment 108528 PARAMETER Experiment Name: Zm_Imbibed_Seeds_P Parameter: Organism Value: Zea mays
  misc_feature: MA Experiment 108528 PARAMETER Experiment Name: Zm_Imbibed_Seeds_P Parameter: Plant Line Value: 35A19
  misc_feature: MA Experiment 108528 PARAMETER Experiment Name: Zm_Imbibed_Seeds_P Parameter: Tissue Value: Aerial vs. Embryo
  misc_feature: MA Experiment ID: 108529 Result: Up-regulated in Transcription
  misc_feature: MA Experiment 108529 PARAMETER Experiment Name: Zm_Imbibed_Seeds_P Parameter: Age (day) Value: 5 vs. 2
  misc_feature: MA Experiment 108529 PARAMETER Experiment Name: Zm_Imbibed_Seeds_P Parameter: Organism Value: Zea mays
  misc_feature: MA Experiment 108529 PARAMETER Experiment Name: Zm_Imbibed_Seeds_P Parameter: Plant Line Value: 35A19
  misc_feature: MA Experiment 108529 PARAMETER Experiment Name: Zm_Imbibed_Seeds_P Parameter: Tissue Value: Roots vs. Embryo
  misc_feature: MA Experiment ID: 108530 Result: Up-regulated in Transcription
  misc_feature: MA Experiment 108530 PARAMETER Experiment Name: Zm_Imbibed_Seeds_P Parameter: Age (day) Value: 6 vs. 2
  misc_feature: MA Experiment 108530 PARAMETER Experiment Name: Zm_Imbibed_Seeds_P Parameter: Organism Value: Zea mays
  misc_feature: MA Experiment 108530 PARAMETER Experiment Name: Zm_Imbibed_Seeds_P Parameter: Plant Line Value: 35A19
  misc_feature: MA Experiment 108530 PARAMETER Experiment Name: Zm_Imbibed_Seeds_P Parameter: Tissue Value: Aerial vs. Embryo
  misc_feature: MA Experiment ID: 108535 Result: Down-regulated in Transcription
  misc_feature: MA Experiment 108535 PARAMETER Experiment Name: Zm_Meristem_P Parameter: Age (day) Value: 8
  misc_feature: MA Experiment 108535 PARAMETER Experiment Name: Zm_Meristem_P Parameter: Organism Value: Zea mays
  misc_feature: MA Experiment 108535 PARAMETER Experiment Name: Zm_Meristem_P Parameter: Plant Line Value: 35A19
  misc_feature: MA Experiment 108535 PARAMETER Experiment Name: Zm_Meristem_P Parameter: Tissue Value: Root Meristem vs. Above Root Meristem
  misc_feature: MA Experiment ID: 20000535 Result: Down-regulated in Transcription
  misc_feature: MA Experiment 20000535 PARAMETER Experiment Name: Zm_Hybrid_Seed_Dev_P Parameter: DAP Value: 30 vs. 12
  misc_feature: MA Experiment 20000535 PARAMETER Experiment Name: Zm_Hybrid_Seed_Dev_P Parameter: Organism Value: Zea mays
  misc_feature: MA Experiment 20000535 PARAMETER Experiment Name: Zm_Hybrid_Seed_Dev_P Parameter: Plant Line Value: 35A19
  misc_feature: MA Experiment 20000535 PARAMETER Experiment Name: Zm_Hybrid_Seed_Dev_P Parameter: Tissue Value: Embryo vs. Unfert Floret
gacgacggcgacgcttcagttgagtgcgggtgtagtgctcctgcgacttcggcctgtccactttttagggggcgccgaggggcgtgggggtacggccgtccgcacaataatctgcgctgcgcggaagaagggaaggggaaaagcagttaagcttgagcgcgcgcgacagggtcaagtcgagggccggggaatcgccggagaatggaggtgggcagggctccgcgacgacgggtgtccccagcagcggcggcggcggctgtgccttcgctgcttctgttcgccgttctattcgcgggccgggcggcggcgttcggccacctgcaagccgccggcgccggcgcgacggcgctgtacaagcacgcgtcgttcttcgaccgcgacggcgacggcgtcgtctccttctcggagacgtacggcgcgtttcgggcactcgggtttggattcggcctgtccagcgtcagcgctgcgctcatcaacggcgctcttggtagcaagtgcagacctcaaaatgcaacgtcatcgaagttggatatctacatagaggacatccagaaagggaaacatggaagcgattcagggtcatacgacgccgaaggaaggtttgttcctgacaagttcgaagagatattcgccaagcacgccaagactgtcccagacgccctgacgtcggacgagatcgaccagctgctccaggcgaacagagagcccggggactacagcggatgggctggcgcagaagcggagtggaagaccctctacagcctcggcaaggacaaggacggcctcctccgcaaggacgtcgcgagaagcgtctacgacgggacactgttccacatgctcgcgcccaactggaaatctcccgacgaggaggaggaacaggaactaagcgtgatccgggagagctgaaccgagaggtacaagcaaagtctggttgagagataaggactctgggaccctctgaacatgctgtcaagcaacatgtactactagctaagtttttacaatatatattcttattgtgtaattaaactttaaatgggttaatttcacaattaaaatcattgaaagggaaatagttttaaaactatttcttatattttggtgctc

SEQ ID NO: 11769 - protein, 234 aa, Zea mays subsp. mays
  peptide (1)..(234): Ceres Seq. ID no. 12376270
  misc_feature (50)..(213): Pfam Name: Caleosin related protein Pfam Description: Caleosin related protein
  misc_feature (50)..(213): Homolog of NCBI NO: 18409649 NR Description: Ca2+-binding EF-hand common family protein, protein id: At1g70670.1, supported by cDNA: 5143., supported by gi_15810176 [Arabidopsis thaliana] >gi|25406062|pir||A96731
  misc_feature (50)..(213): Homolog of NCBI NO: 18409651 NR Description: Ca2+-binding EF-hand common family protein, protein id: At1g70680.1, supported by cDNA: 9200. [Arabidopsis
  misc_feature (50)..(213): Homolog of NCBI NO: 21593851 NR Description: unknown [Arabidopsis thaliana]
  misc_feature (50)..(213): Homolog of NCBI NO: 21617961 NR Description: unknown [Arabidopsis thaliana]
  misc_feature (46)..(219): Homolog of NCBI NO: 34902470 NR Description: Putative abscisic acid-induced protein - rice
  misc_feature (35)..(192): Homolog of NCBI NO: 37652831 NR Description: calcium binding protein [Fagus sylvatica]
  misc_feature (48)..(228): Homolog of NCBI NO: 15220687 NR Description: pollen coat EF-hand protein; protein id: supported by cDNA: 16644. [Arabidopsis thaliana]
  misc_feature (7)..(217): Homolog of NCBI NO: 6900308 NR Description: putative calcium binding EF-hand protein [Hordeum
  misc_feature (48)..(223): Homolog of NCBI NO: 6478218 NR Description: caleosin [Sesamum indicum]
MEVGRAPRRRVSPAAAAAAVPSLLLFAVLFAGRAAAFGHLQAAGAGATALYKHASFFDRDGDGVVSFSETYGAFRALGFGFGLSSVSAALINGALGSKCRPQNATSSKLDIYIEDIQKGKHGSDSGSYDAEGRFVPDKFEEIFAKHAKTVPDALTSDEIDQLLQANREPGDYSGWAGAEAEWKTLYSLGKDKDGLLRKDVARSVYDGTLFHMLAPNWKSPDEEEEQELSVIRES

SEQ ID NO: 11770 - protein, 179 aa, Zea mays subsp. mays
  peptide (1)..(179): Ceres Seq. ID no. 12376271
TTATLQLSAGVVLLRLRPVHFLGGAEGRGGTAVRTIICAARKKGRGKAVKLERARQGQVEGRGIAGEWRWAGLRDDGCPQQRRRRLCLRCFCSPFYSRAGRRRSATCKPPAPARRRCTSTRRSSTATATASSPSRRRTARFGHSGLDSACPASALRSSTALLVASADLKMQRHRSWIST

SEQ ID NO: 11771 - DNA, 1048 bp, Zea mays subsp. mays
  misc_feature (1)..(1048): Ceres Seq. ID no. 13492045
  misc_feature: MA Experiment ID: 108515 Result: Up-regulated in Transcription
  misc_feature: MA Experiment 108515 PARAMETER Experiment Name: Zm_2mM_SA_P Parameter: Age (day) Value: 8
  misc_feature: MA Experiment 108515 PARAMETER Experiment Name: Zm_2mM_SA_P Parameter: Organism Value: Zea mays
  misc_feature: MA Experiment 108515 PARAMETER Experiment Name: Zm_2mM_SA_P Parameter: Plant Line Value: 35A19
  misc_feature: MA Experiment 108515 PARAMETER Experiment Name: Zm_2mM_SA_P Parameter: Timepoint (hr) Value: 12
  misc_feature: MA Experiment 108515 PARAMETER Experiment Name: Zm_2mM_SA_P Parameter: Tissue Value: Aerial
  misc_feature: MA Experiment 108515 PARAMETER Experiment Name: Zm_2mM_SA_P Parameter: Treatment Value: 2mM SA vs. No Treatment
  misc_feature: MA Experiment ID: 108522 Result: Up-regulated in Transcription
  misc_feature: MA Experiment 108522 PARAMETER Experiment Name: Zm_42deg_Heat_P Parameter: Age (day) Value: 8
  misc_feature: MA Experiment 108522 PARAMETER Experiment Name: Zm_42deg_Heat_P Parameter: Organism Value: Zea mays
  misc_feature: MA Experiment 108522 PARAMETER Experiment Name: Zm_42deg_Heat_P Parameter: Plant Line Value: 35A19
  misc_feature: MA Experiment 108522 PARAMETER Experiment Name: Zm_42deg_Heat_P Parameter: Temperature (deg C) Value: 42 vs. 22
  misc_feature: MA Experiment 108522 PARAMETER Experiment Name: Zm_42deg_Heat_P Parameter: Timepoint (hr) Value: 1
  misc_feature: MA Experiment 108522 PARAMETER Experiment Name: Zm_42deg_Heat_P Parameter: Tissue Value: Aerial
  misc_feature: MA Experiment ID: 108523 Result: Up-regulated in Transcription
  misc_feature: MA Experiment 108523 PARAMETER Experiment Name: Zm_42deg_Heat_P Parameter: Age (day) Value: 8
  misc_feature: MA Experiment 108523 PARAMETER Experiment Name: Zm_42deg_Heat_P Parameter: Organism Value: Zea mays
  misc_feature: MA Experiment 108523 PARAMETER Experiment Name: Zm_42deg_Heat_P Parameter: Plant Line Value: 35A19
  misc_feature: MA Experiment 108523 PARAMETER Experiment Name: Zm_42deg_Heat_P Parameter: Temperature (deg C) Value: 42 vs. 22
  misc_feature: MA Experiment 108523 PARAMETER Experiment Name: Zm_42deg_Heat_P Parameter: Timepoint (hr) Value: 6
  misc_feature: MA Experiment 108523 PARAMETER Experiment Name: Zm_42deg_Heat_P Parameter: Tissue Value: Aerial
  misc_feature: MA Experiment ID: 108527 Result: Up-regulated in Transcription
  misc_feature: MA Experiment 108527 PARAMETER Experiment Name: Zm_5mM_NO_P Parameter: Age (day) Value: 8
  misc_feature: MA Experiment 108527 PARAMETER Experiment Name: Zm_5mM_NO_P Parameter: Organism Value: Zea mays
  misc_feature: MA Experiment 108527 PARAMETER Experiment Name: Zm_5mM_NO_P Parameter: Plant Line Value: 35A19
  misc_feature: MA Experiment 108527 PARAMETER Experiment Name: Zm_5mM_NO_P Parameter: Timepoint (hr) Value: 6
  misc_feature: MA Experiment 108527 PARAMETER Experiment Name: Zm_5mM_NO_P Parameter: Tissue Value: Aerial
  misc_feature: MA Experiment 108527 PARAMETER Experiment Name: Zm_5mM_NO_P Parameter: Treatment Value: 5mM NO vs. No Treatment
  misc_feature: MA Experiment ID: 108528 Result: Down-regulated in Transcription
  misc_feature: MA Experiment 108528 PARAMETER Experiment Name: Zm_Imbibed_Seeds_P Parameter: Age (day) Value: 5 vs. 2
  misc_feature: MA Experiment 108528 PARAMETER Experiment Name: Zm_Imbibed_Seeds_P Parameter: Organism Value: Zea mays
  misc_feature: MA Experiment 108528 PARAMETER Experiment Name: Zm_Imbibed_Seeds_P Parameter: Plant Line Value: 35A19
  misc_feature: MA Experiment 108528 PARAMETER Experiment Name: Zm_Imbibed_Seeds_P Parameter: Tissue Value: Aerial vs. Embryo
  misc_feature: MA Experiment ID: 108529 Result: Down-regulated in Transcription
  misc_feature: MA Experiment 108529 PARAMETER Experiment Name: Zm_Imbibed_Seeds_P Parameter: Age (day) Value: 5 vs. 2
  misc_feature: MA Experiment 108529 PARAMETER Experiment Name: Zm_Imbibed_Seeds_P Parameter: Organism Value: Zea mays
  misc_feature: MA Experiment 108529 PARAMETER Experiment Name: Zm_Imbibed_Seeds_P Parameter: Plant Line Value: 35A19
  misc_feature: MA Experiment 108529 PARAMETER Experiment Name: Zm_Imbibed_Seeds_P Parameter: Tissue Value: Roots vs. Embryo
  misc_feature: MA Experiment ID: 108530 Result: Down-regulated in Transcription
  misc_feature: MA Experiment 108530 PARAMETER Experiment Name: Zm_Imbibed_Seeds_P Parameter: Age (day) Value: 6 vs. 2
  misc_feature: MA Experiment 108530 PARAMETER Experiment Name: Zm_Imbibed_Seeds_P Parameter: Organism Value: Zea mays
  misc_feature: MA Experiment 108530 PARAMETER Experiment Name: Zm_Imbibed_Seeds_P Parameter: Plant Line Value: 35A19
  misc_feature: MA Experiment 108530 PARAMETER Experiment Name: Zm_Imbibed_Seeds_P Parameter: Tissue Value: Aerial vs. Embryo
  misc_feature: MA Experiment ID: 108534 Result: Up-regulated in Transcription
  misc_feature: MA Experiment 108534 PARAMETER Experiment Name: Zm_4deg_Cold_P Parameter: Age (hr) Value: 8
  misc_feature: MA Experiment 108534 PARAMETER Experiment Name: Zm_4deg_Cold_P Parameter: Organism Value: Zea mays
  misc_feature: MA Experiment 108534 PARAMETER Experiment Name: Zm_4deg_Cold_P Parameter: Plant Line Value: 35A19
  misc_feature: MA Experiment 108534 PARAMETER Experiment Name: Zm_4deg_Cold_P Parameter: Temperature (deg C) Value: 4 vs. 22
  misc_feature: MA Experiment 108534 PARAMETER Experiment Name: Zm_4deg_Cold_P Parameter: Timepoint (hr) Value: 6
  misc_feature: MA Experiment 108534 PARAMETER Experiment Name: Zm_4deg_Cold_P Parameter: Tissue Value: Aerial
  misc_feature: MA Experiment ID: 108545 Result: Down-regulated in Transcription
  misc_feature: MA Experiment 108545 PARAMETER Experiment Name: Zm_Imbibed_Seeds_P Parameter: Age (day) Value: 3 vs. 2
  misc_feature: MA Experiment 108545 PARAMETER Experiment Name: Zm_Imbibed_Seeds_P Parameter: Organism Value: Zea mays
  misc_feature: MA Experiment 108545 PARAMETER Experiment Name: Zm_Imbibed_Seeds_P Parameter: Plant Line Value: 35A19
  misc_feature: MA Experiment 108545 PARAMETER Experiment Name: Zm_Imbibed_Seeds_P Parameter: Tissue Value: Aerial vs. Embryo
  misc_feature: MA Experiment ID: 108546 Result: Down-regulated in Transcription
  misc_feature: MA Experiment 108546 PARAMETER Experiment Name: Zm_Imbibed_Seeds_P Parameter: Age (day) Value: 3 vs. 2
  misc_feature: MA Experiment 108546 PARAMETER Experiment Name: Zm_Imbibed_Seeds_P Parameter: Organism Value: Zea mays
  misc_feature: MA Experiment 108546 PARAMETER Experiment Name: Zm_Imbibed_Seeds_P Parameter: Plant Line Value: 35A19
  misc_feature: MA Experiment 108546 PARAMETER Experiment Name: Zm_Imbibed_Seeds_P Parameter: Tissue Value: Roots vs. Embryo
  misc_feature: MA Experiment ID: 108547 Result: Down-regulated in Transcription
  misc_feature: MA Experiment 108547 PARAMETER Experiment Name: Zm_Imbibed_Seeds_P Parameter: Age (day) Value: 4 vs. 2
  misc_feature: MA Experiment 108547 PARAMETER Experiment Name: Zm_Imbibed_Seeds_P Parameter: Organism Value: Zea mays
  misc_feature: MA Experiment 108547 PARAMETER Experiment Name: Zm_Imbibed_Seeds_P Parameter: Plant Line Value: 35A19
  misc_feature: MA Experiment 108547 PARAMETER Experiment Name: Zm_Imbibed_Seeds_P Parameter: Tissue Value: Aerial vs. Embryo
  misc_feature: MA Experiment ID: 108559 Result: Up-regulated in Transcription
  misc_feature: MA Experiment 108559 PARAMETER Experiment Name: Zm_5mM_NO_P Parameter: Age (day) Value: 8
  misc_feature: MA Experiment 108559 PARAMETER Experiment Name: Zm_5mM_NO_P Parameter: Organism Value: Zea mays
  misc_feature: MA Experiment 108559 PARAMETER Experiment Name: Zm_5mM_NO_P Parameter: Plant Line Value: 35A19
  misc_feature: MA Experiment 108559 PARAMETER Experiment Name: Zm_5mM_NO_P Parameter: Timepoint (hr) Value: 12
  misc_feature: MA Experiment 108559 PARAMETER Experiment Name: Zm_5mM_NO_P Parameter: Tissue Value: Aerial
  misc_feature: MA Experiment 108559 PARAMETER Experiment Name: Zm_5mM_NO_P Parameter: Treatment Value: 5mM NO vs. No Treatment
  misc_feature: MA Experiment ID: 20000478 Result: Up-regulated in Transcription
  misc_feature: MA Experiment 20000478 PARAMETER Experiment Name: Zm_5mM_SA_P Parameter: Age (day) Value: 11
  misc_feature: MA Experiment 20000478 PARAMETER Experiment Name: Zm_5mM_SA_P Parameter: Organism Value: Zea mays
  misc_feature: MA Experiment 20000478 PARAMETER Experiment Name: Zm_5mM_SA_P Parameter: Plant Line Value: 35A19
  misc_feature: MA Experiment 20000478 PARAMETER Experiment Name: Zm_5mM_SA_P Parameter: Timepoint (hr) Value: 72
  misc_feature: MA Experiment 20000478 PARAMETER Experiment Name: Zm_5mM_SA_P Parameter: Tissue Value: Aerial
  misc_feature: MA Experiment 20000478 PARAMETER Experiment Name: Zm_5mM_SA_P Parameter: Treatment Value: 5mM SA vs. No Treatment
  misc_feature: MA Experiment ID: 20000492 Result: Up-regulated in Transcription
  misc_feature: MA Experiment 20000492 PARAMETER Experiment Name: Zm_Hybrid_Seed_Dev_P Parameter: DAP Value: 12
  misc_feature: MA Experiment 20000492 PARAMETER Experiment Name: Zm_Hybrid_Seed_Dev_P Parameter: Organism Value: Zea mays
  misc_feature: MA Experiment 20000492 PARAMETER Experiment Name: Zm_Hybrid_Seed_Dev_P Parameter: Plant Line Value: 35A19
  misc_feature: MA Experiment 20000492 PARAMETER Experiment Name: Zm_Hybrid_Seed_Dev_P Parameter: Tissue Value: Fert Kernel vs. Unfert Floret
  misc_feature: MA Experiment ID: 20000535 Result: Up-regulated in Transcription
  misc_feature: MA Experiment 20000535 PARAMETER Experiment Name: Zm_Hybrid_Seed_Dev_P Parameter: DAP Value: 30 vs. 12
  misc_feature: MA Experiment 20000535 PARAMETER Experiment Name: Zm_Hybrid_Seed_Dev_P Parameter: Organism Value: Zea mays
  misc_feature: MA Experiment 20000535 PARAMETER Experiment Name: Zm_Hybrid_Seed_Dev_P Parameter: Plant Line Value: 35A19
  misc_feature: MA Experiment 20000535 PARAMETER Experiment Name: Zm_Hybrid_Seed_Dev_P Parameter: Tissue Value: Embryo vs. Unfert Floret
  misc_feature: MA Experiment ID: 20000626 Result: Up-regulated in Transcription
  misc_feature: MA Experiment 20000626 PARAMETER Experiment Name: Zm_Herbicide-Treatments_P Parameter: Timepoint (hr) Value: 12
  misc_feature: MA Experiment 20000626 PARAMETER Experiment Name: Zm_Herbicide-Treatments_P Parameter: Tissue Value: Aerial
  misc_feature: MA Experiment 20000626 PARAMETER Experiment Name: Zm_Herbicide-Treatments_P Parameter: Treatment Value: Roundup vs. No Treatment
  misc_feature: MA Experiment ID: 20000629 Result: Up-regulated in Transcription
  misc_feature: MA Experiment 20000629 PARAMETER Experiment Name: Zm_Herbicide-Treatments_P Parameter: Timepoint (hr) Value: 12
  misc_feature: MA Experiment 20000629 PARAMETER Experiment Name: Zm_Herbicide-Treatments_P Parameter: Tissue Value: Aerial
  misc_feature: MA Experiment 20000629 PARAMETER Experiment Name: Zm_Herbicide-Treatments_P Parameter: Treatment Value: Trimec vs. No Treatment
  misc_feature: MA Experiment ID: 20001610 Result: Up-regulated in Transcription
  misc_feature: MA Experiment 20001610 PARAMETER Experiment Name: Zm_50ppm_KNO3_L-to-H_P Parameter: Age (day) Value: 19
  misc_feature: MA Experiment 20001610 PARAMETER Experiment Name: Zm_50ppm_KNO3_L-to-H_P Parameter: Organism Value: Zea mays
  misc_feature: MA Experiment 20001610 PARAMETER Experiment Name: Zm_50ppm_KNO3_L-to-H_P Parameter: Plant Line Value: 35A19
  misc_feature: MA Experiment 20001610 PARAMETER Experiment Name: Zm_50ppm_KNO3_L-to-H_P Parameter: Timepoint (hr) Value: 2
  misc_feature: MA Experiment 20001610 PARAMETER Experiment Name: Zm_50ppm_KNO3_L-to-H_P Parameter: Tissue Value: Roots
  misc_feature: MA Experiment 20001610 PARAMETER Experiment Name: Zm_50ppm_KNO3_L-to-H_P Parameter: Treatment Value: 50ppm KNO3 vs. 50ppm KCl
aaccgcaaggatccaccacaacagcgaaggagaaagcagaccaacctagccacccagggagaaaggccaaaagggaggggagagtgtcgtcatggcttccattgtcgcttccaggagggccgttcctctagttcgctctctggagaagctcatcgcagcgtcctccgcgcccgggactggctccgccctcaggccggtggcagtcgccggcggcctccgtggctacaacaccggcgctccgctccgacgctacgagggggccgagtcggaagacgatagcgtccgcgagtacgatgggcggcacggcggccgggactacgccgtgcccagcctgttctcagatattttccgtgatccgcttagtgcgccgcacagcattggccgcctgctgaacctgatggacgacttggcggtggcggcgccaggtcgtgcggtgcgccgtggctggaacgcgaaggaggacgaggaggcgctgcacctgagggtggacatgccgggcctggggaaggagcacgtcaaggtgtgggcggagcagaacagcctggtgatcaagggcgagggcgagaaggaggatagcgaggacgaggccgccccgcctccgagatacagcggtcgcatcgagctcgcgccagaggtttacaggatggacaagatcaaggcggagatgaagaacggcgtgctcaaggtggtcgtgccgaaggtgaaggagcagcagcgcaaggacgtgttccaagtcaacgtcgagtagatgtttccaaatagaagcaagtgccggtacgggatggaggattggagcctggaggggcactgccaaactaggattcctctctctcaatctgatctggattctggaatcagatttctcttctttcatttttctcgtctatcttctatcagtatgaaataagcaacgtcgcttcagttttcgtgtcaaggccggtggagtcgcctatgtttattttattttctttgtatttcctacctggacacacgttctctatgccgtgtttggtttccgcagatttttaaaatatgcatgttcaaaccc

SEQ ID NO: 11772 - protein, 218 aa, Zea mays subsp. mays
  peptide (1)..(218): Ceres Seq. ID no. 13492046
  misc_feature (1)..(218): Homolog of NCBI NO: 7441311 NR Description: heat shock protein hsp22 precursor, mitochondrial maize >gi|3015621|gb|AAC12279.1| low molecular weight heat shock
  misc_feature (1)..(218): Homolog of NCBI NO: 4138869 NR Description: small heat shock protein Hsp23.5 [Triticum
  misc_feature (29)..(218): Homolog of NCBI NO: 123564 NR Description: Small heat shock protein, chloroplast precursor
  misc_feature (33)..(218): Homolog of NCBI NO: 7441310 NR Description: heat shock protein MTSHP precursor, mitochondrial tomato >gi|3492854|dbj|BAA32547.1| mitochondrial small heat shock
  misc_feature (16)..(218): Homolog of NCBI NO: 21554988 NR Description: mitochondrial heat shock 22 kd protein-like
  misc_feature (16)..(218): Homolog of NCBI NO: 15242086 NR Description: heat shock protein, putative [Arabidopsis
  misc_feature (24)..(218): Homolog of NCBI NO: 4138871 NR Description: small heat shock protein Hsp23.6 [Triticum
  misc_feature (24)..(218): Homolog of NCBI NO: 1170368 NR Description: Heat shock 22 kDa protein, mitochondrial precursor
  misc_feature (16)..(218): Homolog of NCBI NO: 7159338 NR Description: LMW heat shock protein [Euphorbia esula]
  misc_feature (16)..(217): Homolog of NCBI NO: 15234969 NR Description: mitochondrion-localized small heat shock protein thaliana] >gi|3122232|sp|Q96331|HS2M_ARATH Heat shock 22 kDa mitochondrial precursor >gi|7441312|pir||T05541 heat shock heat
MASIVASRRAVPLVRSLEKLIAASSAPGTGSALRPVAVAGGLRGYNTGAPLRRYEGAESEDDSVREYDGRHGGRDYAVPSLFSDIFRDPLSAPHSIGRLLNLMDDLAVAAPGRAVRRGWNAKEDEEALHLRVDMPGLGKEHVKVWAEQNSLVIKGEGEKEDSEDEAAPPPRYSGRIELAPEVYRMDKIKAEMKNGVLKVVVPKVKEQQRKDVFQVNVE

SEQ ID NO: 11773 - protein, 116 aa, Zea mays subsp. mays
  peptide (1)..(116): Ceres Seq. ID no. 13492047
  misc_feature (1)..(116): Homolog of NCBI NO: 7441311 NR Description: heat shock protein hsp22 precursor, mitochondrial maize >gi|3015621|gb|AAC12279.1| low molecular weight heat shock
  misc_feature (1)..(116): Homolog of NCBI NO: 4138869 NR Description: small heat shock protein Hsp23.5 [Triticum
  misc_feature (1)..(116): Homolog of NCBI NO: 123564 NR Description: Small heat shock protein, chloroplast precursor
  misc_feature (1)..(116): Homolog of NCBI NO: 7441310 NR Description: heat shock protein MTSHP precursor, mitochondrial tomato >gi|3492854|dbj|BAA32547.1| mitochondrial small heat shock
  misc_feature (1)..(116): Homolog of NCBI NO: 21554988 NR Description: mitochondrial heat shock 22 kd protein-like
  misc_feature (1)..(116): Homolog of NCBI NO: 15242086 NR Description: heat shock protein, putative [Arabidopsis
  misc_feature (1)..(116): Homolog of NCBI NO: 4138871 NR Description: small heat shock protein Hsp23.6 [Triticum
  misc_feature (1)..(116): Homolog of NCBI NO: 1170368 NR Description: Heat shock 22 kDa protein, mitochondrial precursor
  misc_feature (1)..(116): Homolog of NCBI NO: 7159338 NR Description: LMW heat shock protein [Euphorbia esula]
  misc_feature (1)..(115): Homolog of NCBI NO: 15234969 NR Description: mitochondrion-localized small heat shock protein thaliana] >gi|3122232|sp|Q96331|HS2M_ARATH Heat shock 22 kDa mitochondrial precursor >gi|7441312|pir||T05541 heat shock heat
MDDLAVAAPGRAVRRGWNAKEDEEALHLRVDMPGLGKEHVKVWAEQNSLVIKGEGEKEDSEDEAAPPPRYSGRIELAPEVYRMDKIKAEMKNGVLKVVVPKVKEQQRKDVFQVNVE

SEQ ID NO: 11774 - DNA, 876 bp, Zea mays subsp. mays
  misc_feature (1)..(876): Ceres Seq. ID no. 12403778
  misc_feature: MA Experiment ID: 108523 Result: Down-regulated in Transcription
  misc_feature: MA Experiment 108523 PARAMETER Experiment Name: Zm_42deg_Heat_P Parameter: Age (day) Value: 8
  misc_feature: MA Experiment 108523 PARAMETER Experiment Name: Zm_42deg_Heat_P Parameter: Organism Value: Zea mays
  misc_feature: MA Experiment 108523 PARAMETER Experiment Name: Zm_42deg_Heat_P Parameter: Plant Line Value: 35A19
  misc_feature: MA Experiment 108523 PARAMETER Experiment Name: Zm_42deg_Heat_P Parameter: Temperature (deg C) Value: 42 vs. 22
  misc_feature: MA Experiment 108523 PARAMETER Experiment Name: Zm_42deg_Heat_P Parameter: Timepoint (hr) Value: 6
  misc_feature: MA Experiment 108523 PARAMETER Experiment Name: Zm_42deg_Heat_P Parameter: Tissue Value: Aerial
  misc_feature: MA Experiment ID: 108535 Result: Down-regulated in Transcription
  misc_feature: MA Experiment 108535 PARAMETER Experiment Name: Zm_Meristem_P Parameter: Age (day) Value: 8
  misc_feature: MA Experiment 108535 PARAMETER Experiment Name: Zm_Meristem_P Parameter: Organism Value: Zea mays
  misc_feature: MA Experiment 108535 PARAMETER Experiment Name: Zm_Meristem_P Parameter: Plant Line Value: 35A19
  misc_feature: MA Experiment 108535 PARAMETER Experiment Name: Zm_Meristem_P Parameter: Tissue Value: Root Meristem vs. Above Root Meristem
  misc_feature: MA Experiment ID: 108543 Result: Up-regulated in Transcription
  misc_feature: MA Experiment ID: 20000535 Result: Down-regulated in Transcription
  misc_feature: MA Experiment 20000535 PARAMETER Experiment Name: Zm_Hybrid_Seed_Dev_P Parameter: DAP Value: 30 vs. 12
  misc_feature: MA Experiment 20000535 PARAMETER Experiment Name: Zm_Hybrid_Seed_Dev_P Parameter: Organism Value: Zea mays
  misc_feature: MA Experiment 20000535 PARAMETER Experiment Name: Zm_Hybrid_Seed_Dev_P Parameter: Plant Line Value: 35A19
  misc_feature: MA Experiment 20000535 PARAMETER Experiment Name: Zm_Hybrid_Seed_Dev_P Parameter: Tissue Value: Embryo vs. Unfert Floret
gcaccagcaccagcacggcgaccaaccctctcccaacccgactagtcggactcgcagctccgccccaagtccaggtccaagcatggaagtcgcggcggcgtcggcgaggcccgtcctgcgcgtggctgccatctgcggctccctccgcaaggcctccttcaaccgcggcctcctccgcgccgccgcggaggtgtgcgaggactccatcccggggctccgcatcgacgagctcgacatctccgacctgcccatcatcaacaccgaccttgagaccggcagcggcagcggcaccgtcttcccgcccgccgtcgaggccttccgcgccaaggtctgccaggccgactgcttcctcttcggcgcgcccgagtacaactactccatcgccacccccctgaagaacgtgcttgactgggcctctagaggaaagaactgttgggcagacaaacctgctgcgatcgtgagtgcaggcggcggctttggaggagggaggtcgcagtaccatctccgtcaggtcggggttttcctggatctccatttcatcaacaagccagaactgtgcgtccaagccttccagcagccacccaagtttgacagcgatggaaatctggtcgatgctgaaatcagagagcggctcaagaaagtgctcctatcccttcaggccttcacgctcaggcttcagaaggaggactgaatcaactcggtaccattgtagtacgtgcttccctgagaagcgtttattgctcttggaagtttgtaacgcgttgctgggtggcctggaagtttgtaataaatccaagaagtgttctcgctgaatatttaagatttgatcgcatctatatataataaagattgtgttctagcgtttttgcgtttccc

SEQ ID NO: 11775 - protein, 229 aa, Zea mays subsp. mays
  peptide (1)..(229): Ceres Seq. ID no. 12403779
  misc_feature (39)..(213): Pfam Name: NADPH-dependent FMN reductase Pfam Description: NADPH-dependent FMN reductase
  misc_feature (32)..(229): Homolog of NCBI NO: 34906648 NR Description: putative NADPH:quinone oxidoreductase [Oryza
  misc_feature (34)..(226): Homolog of NCBI NO: 24745889 NR Description: NAD(P)H:quinone oxidoreductase [Solanum tuberosum]
  misc_feature (28)..(226): Homolog of NCBI NO: 15232856 NR Description: NADPH:quinone oxidoreductase (NQR); protein id: supported by cDNA: gi_5002231 [Arabidopsis thaliana]
  misc_feature (28)..(226): Homolog of NCBI NO: 5002232 NR Description: NADPH:quinone oxidoreductase [Arabidopsis
  misc_feature (34)..(226): Homolog of NCBI NO: 34906652 NR Description: putative NADPH:quinone oxidoreductase [Oryza
  misc_feature (39)..(226): Homolog of NCBI NO: 15596401 NR Description: conserved hypothetical protein [Pseudomonas
  misc_feature (39)..(227): Homolog of NCBI NO: 22406524 NR Description: hypothetical protein [Ferroplasma acidarmanus]
  misc_feature (39)..(209): Homolog of NCBI NO: 17942391 NR Description: putative NADH-dependent reductase [Burkholderia
  misc_feature (38)..(184): Homolog of NCBI NO: 23061144 NR Description: hypothetical protein [Pseudomonas fluorescens
  misc_feature (39)..(226): Homolog of NCBI NO: 16767134 NR Description: putative oxidoreductase [Salmonella typhimurium >gi|16422423|gb|AAL22708.1| putative oxidoreductase [Salmonella
HQHQHGDQPSPNPTSRTRSSAPSPGPSMEVAAASARPVLRVAAICGSLRKASFNRGLLRAAAEVCEDSIPGLRIDELDISDLPIINTDLETGSGSGTVFPPAVEAFRAKVCQADCFLFGAPEYNYSIATPLKNVLDWASRGKNCWADKPAAIVSAGGGFGGGRSQYHLRQVGVFLDLHFINKPELCVQAFQQPPKFDSDGNLVDAEIRERLKKVLLSLQAFTLRLQKED

SEQ ID NO: 11776 - protein, 202 aa, Zea mays subsp. mays
  peptide (1)..(202): Ceres Seq. ID no. 12403780
  misc_feature (12)..(186): Pfam Name: NADPH-dependent FMN reductase Pfam Description: NADPH-dependent FMN reductase
  misc_feature (5)..(202): Homolog of NCBI NO: 34906648 NR Description: putative NADPH:quinone oxidoreductase [Oryza
  misc_feature (7)..(199): Homolog of NCBI NO: 24745889 NR Description: NAD(P)H:quinone oxidoreductase [Solanum tuberosum]
  misc_feature (1)..(199): Homolog of NCBI NO: 15232856 NR Description: NADPH:quinone oxidoreductase (NQR); protein id: supported by cDNA: gi_5002231 [Arabidopsis thaliana]
  misc_feature (1)..(199): Homolog of NCBI NO: 5002232 NR Description: NADPH:quinone oxidoreductase [Arabidopsis
  misc_feature (7)..(199): Homolog of NCBI NO: 34906652 NR Description: putative NADPH:quinone oxidoreductase [Oryza
  misc_feature (12)..(199): Homolog of NCBI NO: 15596401 NR Description: conserved hypothetical protein [Pseudomonas
  misc_feature (12)..(200): Homolog of NCBI NO: 22406524 NR Description: hypothetical protein [Ferroplasma acidarmanus]
  misc_feature (12)..(182): Homolog of NCBI NO: 17942391 NR Description: putative NADH-dependent reductase [Burkholderia
  misc_feature (11)..(157): Homolog of NCBI NO: 23061144 NR Description: hypothetical protein [Pseudomonas fluorescens
  misc_feature (12)..(199): Homolog of NCBI NO: 16767134 NR Description: putative oxidoreductase [Salmonella typhimurium >gi|16422423|gb|AAL22708.1| putative oxidoreductase [Salmonella
MEVAAASARPVLRVAAICGSLRKASFNRGLLRAAAEVCEDSIPGLRIDELDISDLPIINTDLETGSGSGTVFPPAVEAFRAKVCQADCFLFGAPEYNYSIATPLKNVLDWASRGKNCWADKPAAIVSAGGGFGGGRSQYHLRQVGVFLDLHFINKPELCVQAFQQPPKFDSDGNLVDAEIRERLKKVLLSLQAFTLRLQKED

SEQ ID NO: 11777 - protein, 130 aa, Zea mays subsp. mays
  peptide (1)..(130): Ceres Seq. ID no. 12403781
  misc_feature (2)..(130): Pfam Name: Herpes virus major outer envelope glycoprotein (BLLF1) Pfam Description: Herpes virus major outer envelope glycoprotein
  misc_feature (43)..(130): Homolog of NCBI NO: 5420387 NR Description: proteophosphoglycan [Leishmania major]
  misc_feature (18)..(130): Homolog of NCBI NO: 11359723 NR Description: proteophosphoglycan, membrane-associated - Leishmania major (fragment) >gi|5420389|emb|CAB46680.1|
  misc_feature (43)..(130): Homolog of NCBI NO: 28829783 NR Description: similar to Leishmania major. Ppg3 [Dictyostelium
  misc_feature (43)..(130): Homolog of NCBI NO: 11359723 NR Description: proteophosphoglycan, membrane-associated - Leishmania major (fragment) >gi|5420389|emb|CAB46680.1|
  misc_feature (1)..(130): Homolog of NCBI NO: 5420387 NR Description: proteophosphoglycan [Leishmania major]
  misc_feature (1)..(130): Homolog of NCBI NO: 13592175 NR Description: ppg3 [Leishmania major]
  misc_feature (37)..(130): Homolog of NCBI NO: 11359723 NR Description: proteophosphoglycan, membrane-associated - Leishmania major (fragment) >gi|5420389|emb|CAB46680.1|
  misc_feature (44)..(130): Homolog of NCBI NO: 5420387 NR Description: proteophosphoglycan [Leishmania major]
  misc_feature (18)..(130): Homolog of NCBI NO: 5420387 NR Description: proteophosphoglycan [Leishmania major]
  misc_feature (43)..(130): Homolog of NCBI NO: 13592175 NR Description: ppg3 [Leishmania major]
TSTSTATNPLPTRLVGLAAPPQVQVQAWKSRRRRRGPSCAWLPSAAPSARPPSTAASSAPPRRCARTPSRGSASTSSTSPTCPSSTPTLRPAAAAAPSSRPPSRPSAPRSARPTASSSARPSTTTPSPPP

SEQ ID NO: 11778 - DNA, 745 bp, Zea mays subsp. mays
  misc_feature (1)..(745): Ceres Seq. ID no. 12382779
  misc_feature: MA Experiment ID: 108527 Result: Down-regulated in Transcription
  misc_feature: MA Experiment 108527 PARAMETER Experiment Name: Zm_5mM_NO_P Parameter: Age (day) Value: 8
  misc_feature: MA Experiment 108527 PARAMETER Experiment Name: Zm_5mM_NO_P Parameter: Organism Value: Zea mays
  misc_feature: MA Experiment 108527 PARAMETER Experiment Name: Zm_5mM_NO_P Parameter: Plant Line Value: 35A19
  misc_feature: MA Experiment 108527 PARAMETER Experiment Name: Zm_5mM_NO_P Parameter: Timepoint (hr) Value: 6
  misc_feature: MA Experiment 108527 PARAMETER Experiment Name: Zm_5mM_NO_P Parameter: Tissue Value: Aerial
  misc_feature: MA Experiment 108527 PARAMETER Experiment Name: Zm_5mM_NO_P Parameter: Treatment Value: 5mM NO vs. No Treatment
  misc_feature: MA Experiment ID: 108529 Result: Up-regulated in Transcription
  misc_feature: MA Experiment 108529 PARAMETER Experiment Name: Zm_Imbibed_Seeds_P Parameter: Age (day) Value: 5 vs. 2
  misc_feature: MA Experiment 108529 PARAMETER Experiment Name: Zm_Imbibed_Seeds_P Parameter: Organism Value: Zea mays
  misc_feature: MA Experiment 108529 PARAMETER Experiment Name: Zm_Imbibed_Seeds_P Parameter: Plant Line Value: 35A19
  misc_feature: MA Experiment 108529 PARAMETER Experiment Name: Zm_Imbibed_Seeds_P Parameter: Tissue Value: Roots vs. Embryo
  misc_feature: MA Experiment ID: 108535 Result: Down-regulated in Transcription
  misc_feature: MA Experiment 108535 PARAMETER Experiment Name: Zm_Meristem_P Parameter: Age (day) Value: 8
  misc_feature: MA Experiment 108535 PARAMETER Experiment Name: Zm_Meristem_P Parameter: Organism Value: Zea mays
  misc_feature: MA Experiment 108535 PARAMETER Experiment Name: Zm_Meristem_P Parameter: Plant Line Value: 35A19
  misc_feature: MA Experiment 108535 PARAMETER Experiment Name: Zm_Meristem_P Parameter: Tissue Value: Root Meristem vs. Above Root Meristem
  misc_feature: MA Experiment ID: 108687 Result: Down-regulated in Transcription
  misc_feature: MA Experiment 108687 PARAMETER Experiment Name: Zm_Embryos-Flowers__P Parameter: Tissue Value: Embryo vs. Aerial+
  misc_feature: MA Experiment ID: 20000108 Result: Down-regulated in Transcription
  misc_feature: MA Experiment 20000108 PARAMETER Experiment Name: Zm_Root-Tips_P Parameter: Age (day) Value: 12
  misc_feature: MA Experiment 20000108 PARAMETER Experiment Name: Zm_Root-Tips_P Parameter: Organism Value: Zea mays
  misc_feature: MA Experiment 20000108 PARAMETER Experiment Name: Zm_Root-Tips_P Parameter: Tissue Value: Root tips vs. Root mid region    35
  misc_feature: MA Experiment 20000108 PARAMETER Experiment Name: Zm_Root-Tips_P Parameter: Tissue Value: Root tips vs. Root mid region   Sequence Listing-Misc Features (4)
  misc_feature: MA Experiment ID: 20000477 Result: Down-regulated in Transcription
  misc_feature: MA Experiment 20000477 PARAMETER Experiment Name: Zm_5mM_SA_P Parameter: Age (day) Value: 10
  misc_feature: MA Experiment 20000477 PARAMETER Experiment Name: Zm_5mM_SA_P Parameter: Organism Value: Zea mays
  misc_feature: MA Experiment 20000477 PARAMETER Experiment Name: Zm_5mM_SA_P Parameter: Plant Line Value: 35A19
  misc_feature: MA Experiment 20000477 PARAMETER Experiment Name: Zm_5mM_SA_P Parameter: Timepoint (hr) Value: 48
  misc_feature: MA Experiment 20000477 PARAMETER Experiment Name: Zm_5mM_SA_P Parameter: Tissue Value: Aerial
  misc_feature: MA Experiment 20000477 PARAMETER Experiment Name: Zm_5mM_SA_P Parameter: Treatment Value: 5mM SA vs. No Treatment
  misc_feature: MA Experiment ID: 20000480 Result: Down-regulated in Transcription
  misc_feature: MA Experiment 20000480 PARAMETER Experiment Name: Zm_Drought_P Parameter: Age (day) Value: 11
  misc_feature: MA Experiment 20000480 PARAMETER Experiment Name: Zm_Drought_P Parameter: Organism Value: Zea mays
  misc_feature: MA Experiment 20000480 PARAMETER Experiment Name: Zm_Drought_P Parameter: Plant Line Value: 35A19
  misc_feature: MA Experiment 20000480 PARAMETER Experiment Name: Zm_Drought_P Parameter: Timepoint (hr) Value: 72
  misc_feature: MA Experiment 20000480 PARAMETER Experiment Name: Zm_Drought_P Parameter: Tissue Value: Aerial
  misc_feature: MA Experiment 20000480 PARAMETER Experiment Name: Zm_Drought_P Parameter: Treatment Value: Drought vs. No Drought
aaaaattccaagagatgaacatcttgttgagtcacttgtgttgctgcattcttattctaggcatctacgctccgacatccgccacatcagacaatcctcctctgcaggatgtatgccccatggctccccagggcgagcggcgagagttgtccatgaacgggttcctctgcaagcatccgagcaccatcctggcgtccgacttcaagactctgatgctaaaccacgccggagacctggacagcatagcctcggtcgtcggtgagcatggtgaccgctgccgagttcccaggcctgaacaccctgggcctgtcgatggcgcgcaccgacatcgccccctacggggtggtgctcccgcactcccacccgcgggcgtcggagatgatgttcgtacacggtggcagcgtggtggccggcttcctggacaccgagggcaggctgttccagaagcgtctcggtgagggagaggtgttcgtcttcccccgcggcttgcttcactacgtcatgaactacggtttcggcctcgcgacggcgttctccgtgctgaacagccagaaccccggcgtggtcggtgtcgcccacgccatgttttttgcgagtgagtcggacgtagtcgaaggtctaatggccaggatgctcaagtttggagagatggaggtgactagtgacaacaacatcactgctggtttcccatgggcattctgatctgagtaggtgcaattcaagatcgttggtggtttaagttccc

SEQ ID NO: 11779 - protein, 151 aa, Zea mays subsp. mays
  peptide (1)..(151): Ceres Seq. ID no. 12382780
  misc_feature (16)..(80): Homolog of NCBI NO: 15240338 NR Description: germin-like protein - like; protein id:
  misc_feature (29)..(77): Homolog of NCBI NO: 22329473 NR Description: germin-like oxalate oxidase; protein id:
  misc_feature (23)..(85): Homolog of NCBI NO: 34906612 NR Description: germin(oxalate oxidase)-like protein [Oryza
KFQEMNILLSHLCCCILILGIYAPTSATSDNPPLQDVCPMAPQGERRELSMNGFLCKHPSTILASDFKTLMLNHAGDLDSIASVVGEHGDRCRVPRPEHPGPVDGAHRHRPLRGGAPALPPAGVGDDVRTRWQRGGRLPGHRGQAVPEASR

SEQ ID NO: 11780 - protein, 147 aa, Zea mays subsp. mays
  peptide (1)..(147): Ceres Seq. ID no. 12382781
  misc_feature (12)..(76): Homolog of NCBI NO: 15240338 NR Description: germin-like protein - like; protein id:
  misc_feature (25)..(73): Homolog of NCBI NO: 22329473 NR Description: germin-like oxalate oxidase; protein id:
  misc_feature (19)..(81): Homolog of NCBI NO: 34906612 NR Description: germin(oxalate oxidase)-like protein [Oryza
MNILLSHLCCCILILGIYAPTSATSDNPPLQDVCPMAPQGERRELSMNGFLCKHPSTILASDFKTLMLNHAGDLDSIASVVGEHGDRCRVPRPEHPGPVDGAHRHRPLRGGAPALPPAGVGDDVRTRWQRGGRLPGHRGQAVPEASR

SEQ ID NO: 11781 - protein, 145 aa, Zea mays subsp. mays
  peptide (1)..(145): Ceres Seq. ID no. 12382782
  misc_feature (1)..(103): Pfam Name: Cupin Pfam Description: Cupin
  misc_feature (1)..(137): Homolog of NCBI NO: 15240338 NR Description: germin-like protein - like; protein id:
  misc_feature (1)..(119): Homolog of NCBI NO: 22329473 NR Description: germin-like oxalate oxidase; protein id:
  misc_feature (1)..(111): Homolog of NCBI NO: 34906612 NR Description: germin(oxalate oxidase)-like protein [Oryza
  misc_feature (1)..(122): Homolog of NCBI NO: 4996622 NR Description: germin-like protein [Atriplex lentiformis]
  misc_feature (3)..(141): Homolog of NCBI NO: 34910362 NR Description: putative germin-like protein [Oryza sativa
  misc_feature (1)..(132): Homolog of NCBI NO: 2745849 NR Description: germin-like protein; PcGER1 [Pinus caribaea]
  misc_feature (1)..(131): Homolog of NCBI NO: 5852087 NR Description: zwh0010.1 [Oryza sativa (indica cultivar-group)]
  misc_feature (1)..(131): Homolog of NCBI NO: 21741995 NR Description: OSJNBa0058K23.2 [Oryza sativa (japonica
  misc_feature (1)..(132): Homolog of NCBI NO: 19071771 NR Description: germin-like protein [Pinus sylvestris]
  misc_feature (1)..(132): Homolog of NCBI NO: 7447346 NR Description: germin-like protein - Monterey pine
MVTAAEFPGLNTLGLSMARTDIAPYGVVLPHSHPRASEMMFVHGGSVVAGFLDTEGRLFQKRLGEGEVFVFPRGLLHYVMNYGFGLATAFSVLNSQNPGVVGVAHAMFFASESDVVEGLMARMLKFGEMEVTSDNNITAGFPWAF

SEQ ID NO: 11782 - DNA, 830 bp, Zea mays subsp. mays
  misc_feature (1)..(830): Ceres Seq. ID no. 12355697
  misc_feature: MA Experiment ID: 108535 Result: Up-regulated in Transcription
  misc_feature: MA Experiment 108535 PARAMETER Experiment Name: Zm_Meristem_P Parameter: Age (day) Value: 8
  misc_feature: MA Experiment 108535 PARAMETER Experiment Name: Zm_Meristem_P Parameter: Organism Value: Zea mays
  misc_feature: MA Experiment 108535 PARAMETER Experiment Name: Zm_Meristem_P Parameter: Plant Line Value: 35A19
  misc_feature: MA Experiment 108535 PARAMETER Experiment Name: Zm_Meristem_P Parameter: Tissue Value: Root Meristem vs. Above Root Meristem
  misc_feature: MA Experiment ID: 108543 Result: Up-regulated in Transcription
  misc_feature: MA Experiment ID: 108547 Result: Down-regulated in Transcription
  misc_feature: MA Experiment 108547 PARAMETER Experiment Name: Zm_Imbibed_Seeds_P Parameter: Age (day) Value: 4 vs. 2
  misc_feature: MA Experiment 108547 PARAMETER Experiment Name: Zm_Imbibed_Seeds_P Parameter: Organism Value: Zea mays
  misc_feature: MA Experiment 108547 PARAMETER Experiment Name: Zm_Imbibed_Seeds_P Parameter: Plant Line Value: 35A19
  misc_feature: MA Experiment 108547 PARAMETER Experiment Name: Zm_Imbibed_Seeds_P Parameter: Tissue Value: Aerial vs. Embryo
gcacacgacgcaggcactcggcctgccgtctgtccctttcgaccttcataggcgcacttctccctcccgctctcgcgccgccgccctcgtgcgtttgagcgagatccatacatccccatcccattttgcacccggattggcttcttcttctactactgtacagcacttcttttgtgtggctgcaaagttctgtaattctagaggagcaagatggagattattatcatcatctcacttgtcattcttttggcactaggagctctctttgtgatcccaaagtcacaaaataaaggtaaatcaaagagaaacgacttaggagctggaacgacatctaggagctttacgacagaagagatctctaaacattccacaagggaggactgttggatcattatcaaggacaaggtctatgatgtcactccttatgtagaggaacatccaggcggagatgccattctaaataatgctgggggtgattccacggagggcttttttgggccacagcatggcactagggtcttcgatatcatcgaggatttctgcatcggtcagttgaaggcttcatgatgatgacaggatagtttgtattgaatttgttacgggacataaatttgtgagaagctacattttatctatgtttgagcattgcgaccatgagcatatgaatgccagtataattgttccacaactgttattaggcctgccctgagctgtgatgtaggagctcgtttttttttctctgctgggggcaatgtgagcatcagttcgaccactggttgttgtgcttgcacatttctgttgttggacaagactgaaacgtttttttcccg

SEQ ID NO: 11783 - protein, 118 aa, Zea mays subsp. mays
  peptide (1)..(118): Ceres Seq. ID no. 12355698
  misc_feature (43)..(115): Pfam Name: Cytochrome b5-like Heme/Steroid binding domain Pfam Description: Cytochrome b5-like Heme/Steroid binding domain
  misc_feature (39)..(115): Homolog of NCBI NO: 30090027 NR Description: cytochrome b5 [Sorghum bicolor]
  misc_feature (1)..(118): Homolog of NCBI NO: 40253472 NR Description: cytochrome b5-like [Oryza sativa (japonica
  misc_feature (39)..(118): Homolog of NCBI NO: 25044825 NR Description: cytochrome b5 [Ananas comosus]
  misc_feature (47)..(115): Homolog of NCBI NO: 19921470 NR Description: CG6870-PA [Drosophila melanogaster]
  misc_feature (47)..(118): Homolog of NCBI NO: 15238776 NR Description: cytochrome b5 (dbj|BAA74839.1); protein id: supported by cDNA: 31303., supported by cDNA: gi_19423893, by cDNA: gi_21281007, supported by cDNA: gi_4240119 b5 isoform 1
  misc_feature (47)..(118): Homolog of NCBI NO: 729252 NR Description: Cytochrome B5 >gi|7430587|pir||T14454 cytochrome
  misc_feature (39)..(118): Homolog of NCBI NO: 29469883 NR Description: cytochrome b5 [Candida tropicalis]
  misc_feature (40)..(115): Homolog of NCBI NO: 20137975 NR Description: Cytochrome b5
  misc_feature (3)..(115): Homolog of NCBI NO: 15219780 NR Description: cytochrome b5, putative; protein id: At1g60660.1, by cDNA: gi_15146311 [Arabidopsis thaliana]
  misc_feature (37)..(116): Homolog of NCBI NO: 40644254 NR Description: cytochrome b5 [Oryza sativa (japonica
MEIIIIISLVILLALGALFVIPKSQNKGKSKRNDLGAGTTSRSFTTEEISKHSTREDCWIIIKDKVYDVTPYVEEHPGGDAILNNAGGDSTEGFFGPQHGTRVFDIIEDFCIGQLKAS

SEQ ID NO: 11784 - protein, 84 aa, Zea mays subsp. mays
  peptide (1)..(84): Ceres Seq. ID no. 12355699
HTTQALGLPSVPFDLHRRTSPSRSRAAALVRLSEIHTSPSHFAPGLASSSTTVQHFFCVAAKFCNSRGARWRLLSSSHLSFFWH

SEQ ID NO: 11785 - DNA, 1095 bp, Zea mays subsp. mays
  misc_feature (1)..(1095): Ceres Seq. ID no. 12403775
  misc_feature: MA Experiment ID: 108522 Result: Down-regulated in Transcription
  misc_feature: MA Experiment 108522 PARAMETER Experiment Name: Zm_42deg_Heat_P Parameter: Age (day) Value: 8
  misc_feature: MA Experiment 108522 PARAMETER Experiment Name: Zm_42deg_Heat_P Parameter: Organism Value: Zea mays
  misc_feature: MA Experiment 108522 PARAMETER Experiment Name: Zm_42deg_Heat_P Parameter: Plant Line Value: 35A19
  misc_feature: MA Experiment 108522 PARAMETER Experiment Name: Zm_42deg_Heat_P Parameter: Temperature (deg C) Value: 42 vs. 22
  misc_feature: MA Experiment 108522 PARAMETER Experiment Name: Zm_42deg_Heat_P Parameter: Timepoint (hr) Value: 1
  misc_feature: MA Experiment 108522 PARAMETER Experiment Name: Zm_42deg_Heat_P Parameter: Tissue Value: Aerial
aacaaattgaccgccattgtgcaaaccagaaccccttcgccattttcaccaactccctccgatcccggccatggcgggggaggactgccgctccggcgcggaaatggacgcgctcgtacgacgcttgaagctccaccggccgtccccatccccctacgaccccgatccggccgcggcccccgtccccgccaccgccggcgacggcgagctgttccggccgcggagagctgccgtgcttgtctgcctcttccggggagacggcggcgagctccgcgtcatcctcactaagcgctcgtcctccctctccacccactccggtgaagtttcattgccaggaggaaaagtcgaggagggtgatgctgatgatgtagcaacagcgttaagagagtcaaaagaggagattggacttgatccagctctggtaactgtggttgcctctcttgaacacttcttgtccaagcatcttctggtagttgttcctgttgttggcatactgttagacagacaagcatttaaacctgctcttaatattgctgaggtagacgaaatatttgatgtacccctggagatgttcctcaaggatgagaacaggacatcggaggagcgagaaaagatgggccagacattcacagttcattacttcacttatgagaacggaatccagaagtacttaatctggggtctgaccgcccgcatcttgatccatgctgcttcagttgtatacgagcgaccgccagactttacagagcgaagagcacattttaaattgccaatgttcacaaaggactgctcttcaatgctagcaggacctgctaaacattagtgcacactgcctacgctgctatctcagctacatgctatttggagtacgggatgttgcaccaacatagtttatagaatcgaagaggcgtccaaatcacttgatgtcatatgaatttagattctttcgacaaaacactatagtggcatttatgttcagaacaatgttcgtatatgatgcaccacaaatcatccatgttgatgctgttaatgacatggagcacttgctcggatgcaattggctcgtatatacacataagattgttctactgaatc

SEQ ID NO: 11786 - protein, 250 aa, Zea mays subsp. mays
  peptide (1)..(250): Ceres Seq. ID no. 12403776
  misc_feature (51)..(189): Pfam Name: NUDIX domain Pfam Description: NUDIX domain
  misc_feature (9)..(243): Homolog of NCBI NO: 40253324 NR Description: putative phosphohydrolase [Oryza sativa (japonica group)] >gi|40253358|dbj|BAD05290.1| putative phosphohydrolase
  misc_feature (44)..(243): Homolog of NCBI NO: 18396900 NR Description: Expressed protein; protein id: At1g28960.1,
  misc_feature (44)..(234): Homolog of NCBI NO: 30690557 NR Description: MutT/nudix family protein [Arabidopsis thaliana]
  misc_feature (44)..(234): Homolog of NCBI NO: 26450576 NR Description: unknown protein [Arabidopsis thaliana]
  misc_feature (44)..(243): Homolog of NCBI NO: 10764850 NR Description: F1K23.5 [Arabidopsis thaliana]
  misc_feature (48)..(232): Homolog of NCBI NO: 18403412 NR Description: expressed protein; protein id: At2g33980.1, by cDNA: gi_13430755, supported by cDNA: gi_15293224 [Arabidopsis >gi|13430756|gb|AAK26000.1|AF360290_1 unknown protein
  misc_feature (48)..(231): Homolog of NCBI NO: 21553389 NR Description: unknown [Arabidopsis thaliana]
  misc_feature (48)..(231): Homolog of NCBI NO: 15242543 NR Description: putative protein; protein id: At5g45940.1, by cDNA: 141753. [Arabidopsis thaliana] gb|AAF24540.1~gene_id:K15I22.14~similar to unknown protein
  misc_feature (39)..(219): Homolog of NCBI NO: 23470438 NR Description: hypothetical protein [Pseudomonas syringae pv.
  misc_feature (39)..(219): Homolog of NCBI NO: 28868671 NR Description: mutT/nudix family protein [Pseudomonas syringae tomato str. DC3000] >gi|28851910|gb|AAO54985.1| mutT/nudix family
MAGEDCRSGAEMDALVRRLKLHRPSPSPYDPDPAAAPVPATAGDGELFRPRRAAVLVCLFRGDGGELRVILTKRSSSLSTHSGEVSLPGGKVEEGDADDVATALRESKEEIGLDPALVTVVASLEHFLSKHLLVVVPVVGILLDRQAFKPALNIAEVDEIFDVPLEMFLKDENRTSEEREKMGQTFTVHYFTYENGIQKYLIWGLTARILIHAASVVYERPPDFTERRAHFKLPMFTKDCSSMLAGPAKH

SEQ ID NO: 11787 - protein, 239 aa, Zea mays subsp. mays
  peptide (1)..(239): Ceres Seq. ID no. 12403777
  misc_feature (40)..(178): Pfam Name: NUDIX domain Pfam Description: NUDIX domain
  misc_feature (1)..(232): Homolog of NCBI NO: 40253324 NR Description: putative phosphohydrolase [Oryza sativa (japonica group)] >gi|40253358|dbj|BAD05290.1| putative phosphohydrolase
  misc_feature (33)..(232): Homolog of NCBI NO: 18396900 NR Description: Expressed protein; protein id: At1g28960.1,
  misc_feature (33)..(223): Homolog of NCBI NO: 30690557 NR Description: MutT/nudix family protein [Arabidopsis thaliana]
  misc_feature (33)..(223): Homolog of NCBI NO: 26450576 NR Description: unknown protein [Arabidopsis thaliana]
  misc_feature (33)..(232): Homolog of NCBI NO: 10764850 NR Description: F1K23.5 [Arabidopsis thaliana]
  misc_feature (37)..(221): Homolog of NCBI NO: 18403412 NR Description: expressed protein; protein id: At2g33980.1, by cDNA: gi_13430755, supported by cDNA: gi_15293224 [Arabidopsis >gi|13430756|gb|AAK26000.1|AF360290_1 unknown protein
  misc_feature (37)..(220): Homolog of NCBI NO: 21553389 NR Description: unknown [Arabidopsis thaliana]
  misc_feature (37)..(220): Homolog of NCBI NO: 15242543 NR Description: putative protein; protein id: At5g45940.1, by cDNA: 141753. [Arabidopsis thaliana] gb|AAF24540.1~gene_id:K15I22.14~similar to unknown protein
  misc_feature (28)..(208): Homolog of NCBI NO: 23470438 NR Description: hypothetical protein [Pseudomonas syringae pv.
  misc_feature (28)..(208): Homolog of NCBI NO: 28868671 NR Description: mutT/nudix family protein [Pseudomonas syringae tomato str. DC3000] >gi|28851910|gb|AAO54985.1| mutT/nudix family
MDALVRRLKLHRPSPSPYDPDPAAAPVPATAGDGELFRPRRAAVLVCLFRGDGGELRVILTKRSSSLSTHSGEVSLPGGKVEEGDADDVATALRESKEEIGLDPALVTVVASLEHFLSKHLLVVVPVVGILLDRQAFKPALNIAEVDEIFDVPLEMFLKDENRTSEEREKMGQTFTVHYFTYENGIQKYLIWGLTARILIHAASVVYERPPDFTERRAHFKLPMFTKDCSSMLAGPAKH

SEQ ID NO: 11788 - DNA, 1688 bp, Zea mays subsp. mays
  misc_feature (1)..(1688): Ceres Seq. ID no. 12347726
  misc_feature: MA Experiment ID: 108530 Result: Down-regulated in Transcription
  misc_feature: MA Experiment 108530 PARAMETER Experiment Name: Zm_Imbibed_Seeds_P Parameter: Age (day) Value: 6 vs. 2
  misc_feature: MA Experiment 108530 PARAMETER Experiment Name: Zm_Imbibed_Seeds_P Parameter: Organism Value: Zea mays
  misc_feature: MA Experiment 108530 PARAMETER Experiment Name: Zm_Imbibed_Seeds_P Parameter: Plant Line Value: 35A19
  misc_feature: MA Experiment 108530 PARAMETER Experiment Name: Zm_Imbibed_Seeds_P Parameter: Tissue Value: Aerial vs. Embryo
  misc_feature: MA Experiment ID: 108534 Result: Up-regulated in Transcription
  misc_feature: MA Experiment 108534 PARAMETER Experiment Name: Zm_4deg_Cold_P Parameter: Age (hr) Value: 8
  misc_feature: MA Experiment 108534 PARAMETER Experiment Name: Zm_4deg_Cold_P Parameter: Organism Value: Zea mays
  misc_feature: MA Experiment 108534 PARAMETER Experiment Name: Zm_4deg_Cold_P Parameter: Plant Line Value: 35A19
  misc_feature: MA Experiment 108534 PARAMETER Experiment Name: Zm_4deg_Cold_P Parameter: Temperature (deg C) Value: 4 vs. 22
  misc_feature: MA Experiment 108534 PARAMETER Experiment Name: Zm_4deg_Cold_P Parameter: Timepoint (hr) Value: 6
  misc_feature: MA Experiment 108534 PARAMETER Experiment Name: Zm_4deg_Cold_P Parameter: Tissue Value: Aerial
  misc_feature: MA Experiment ID: 108543 Result: Up-regulated in Transcription
  misc_feature: MA Experiment ID: 108544 Result: Up-regulated in Transcription
  misc_feature: MA Experiment ID: 20000532 Result: Up-regulated in Transcription
  misc_feature: MA Experiment 20000532 PARAMETER Experiment Name: Zm_0.001percent_MeJA_P Parameter: Age (day) Value: 10
  misc_feature: MA Experiment 20000532 PARAMETER Experiment Name: Zm_0.001percent_MeJA_P Parameter: Organism Value: Zea mays
  misc_feature: MA Experiment 20000532 PARAMETER Experiment Name: Zm_0.001percent_MeJA_P Parameter: Plant Line Value: 35A19
  misc_feature: MA Experiment 20000532 PARAMETER Experiment Name: Zm_0.001percent_MeJA_P Parameter: Timepoint (hr) Value: 48
  misc_feature: MA Experiment 20000532 PARAMETER Experiment Name: Zm_0.001percent_MeJA_P Parameter: Tissue Value: Aerial
  misc_feature: MA Experiment 20000532 PARAMETER Experiment Name: Zm_0.001percent_MeJA_P Parameter: Treatment Value: 0.001percent MeJA vs. No Treatment
cgtgccacacatccatccccgttcgcctcttctcctccctcctgccgggtccttaataaagagcagcagcgcaagaggttggtagagcgagcgagaagaaggcaatggcggcggagagcttcctgttcacctcggagtccgtgaacgaggggcacccagacaagctgtgcgaccaggtgtcggacgcggtgctggacgcctgcctggcgcaggaccccgacagcaaggtggcctgcgagacctgcaccaagacgaacatggtgatggtgttcggcgagatcaccaccaaggcgagcgtggactacgagaagatcgtgcgcgacacctgccgcgagatcgggttcacctccgacgacgtggggctcgacgccgaccgctgcaaggtgctggtgaacatcgagcagcagtcccccgacatcgcgcagggcgtgcacgggcacttcacgaagcggcccgaggagatcggcgccggcgaccagggccacatgttcgggtacgccaccgacgagacccccgagctgatgccgctgagccacgtgctggccaccaagctcggcgcgcgcctgacggaggtccgcaaggacggcacctgcgcctggctcaggcccgacagcaagacccaggtgacggtggagtacgtgaacgagggcggcgccatggtgcccgtccgcgtgcacaccgtgctcatctccacccagcacgacgagaccgtcaccaacgacgagatcgccgccgacctcaaggagcacgtcatcaagcccgtcatcccggagaggtacctggacgagaagaccatcttccacctcaacccgtcggggcgcttcgtcatcggcgggccccacggggacgccggcctcaccggccgcaagatcatcatcgacacctacggcggctggggagcccacggcgggggcgccttctccggcaaggaccccaccaaggtggaccgcagcggggcctacgtcgccaggcaggccgccaagagcatcgtggccagcggcctcgcccgccgctgcctcgtgcaggtgtcctacgccatcggcgtgccggagcccctgtccgtgttcgtcgactcctacggcaccgggaccatccccgacaaggagatcctaaagatcgtcaaggagaacttcgacttcaggccagggatggtcaccatcaacctcgacctcaagaagggcggcaacaggttcatcaagaccgccgcatacggccactttggccgtgacgacgccgacttcacctgggaggtggtcaagcccctaaagaaggcatccgcttaagaatgtattgggaagttcactggacatgaggttcatcttcgtctggctctgctgatacctgcaaggattgctgctgctgctgccgcccctggatgtgtgtttgatcagtgactggctgctctgctccatagaagatgaatgaagagagagatggtgaagaaggctttggcaaatggcaattgccgcagcaagccatgtcggcgccaccgaccgccttagtgattggtataatttggtgtggcagcagccaggattaatgcgctggtcttttatctttactactagtttggtctcgtccggtatcttatttttctttccccttttcgagtctgtactgaaactgctgagagatttgcagttttgatctatcataccctttggtaatactgttcatctcgagtgcgc

SEQ ID NO: 11789 - protein, 392 aa, Zea mays subsp. mays
  peptide (1)..(392): Ceres Seq. ID no. 12347727
  misc_feature (118)..(240): Pfam Name: S-adenosylmethionine synthetase, central domain Pfam Description: S-adenosylmethionine synthetase, central domain
  misc_feature (1)..(392): Homolog of NCBI NO: 1709000 NR Description: S-adenosylmethionine synthetase 1 (Methionine
  misc_feature (4)..(388): Homolog of NCBI NO: 13540318 NR Description: S-adenosyl-L-methionine synthetase [Elaeagnus
  misc_feature (4)..(388): Homolog of NCBI NO: 16226059 NR Description: S-adenosyl-L-methionine synthetase [Dendrobium
  misc_feature (1)..(392): Homolog of NCBI NO: 1170937 NR Description: S-adenosylmethionine synthetase 1 (Methionine
  misc_feature (4)..(388): Homolog of NCBI NO: 13540316 NR Description: S-adenosyl-L-methionine synthetase [Elaeagnus
  misc_feature (4)..(388): Homolog of NCBI NO: 10443981 NR Description: S-adenosylmethionine synthetase [Brassica juncea]
  misc_feature (3)..(388): Homolog of NCBI NO: 1346524 NR Description: S-adenosylmethionine synthetase (Methionine
  misc_feature (1)..(392): Homolog of NCBI NO: 17529621 NR Description: S-adenosylmethionine synthetase [Oryza sativa]
  misc_feature (4)..(386): Homolog of NCBI NO: 22774026 NR Description: S-adenosylmethionine synthase [Carica papaya]
  misc_feature (1)..(388): Homolog of NCBI NO: 127046 NR Description: S-adenosylmethionine synthetase 2 (Methionine
MAAESFLFTSESVNEGHPDKLCDQVSDAVLDACLAQDPDSKVACETCTKTNMVMVFGEITTKASVDYEKIVRDTCREIGFTSDDVGLDADRCKVLVNIEQQSPDIAQGVHGHFTKRPEEIGAGDQGHMFGYATDETPELMPLSHVLATKLGARLTEVRKDGTCAWLRPDSKTQVTVEYVNEGGAMVPVRVHTVLISTQHDETVTNDEIAADLKEHVIKPVIPERYLDEKTIFHLNPSGRFVIGGPHGDAGLTGRKIIIDTYGGWGAHGGGAFSGKDPTKVDRSGAYVARQAAKSIVASGLARRCLVQVSYAIGVPEPLSVFVDSYGTGTIPDKEILKIVKENFDFRPGMVTINLDLKKGGNRFIKTAAYGHFGRDDADFTWEVVKPLKKASA

SEQ ID NO: 11790 - protein, 341 aa, Zea mays subsp. mays
  peptide (1)..(341): Ceres Seq. ID no. 12347728
  misc_feature (67)..(189): Pfam Name: S-adenosylmethionine synthetase, central domain Pfam Description: S-adenosylmethionine synthetase, central domain
  misc_feature (1)..(341): Homolog of NCBI NO: 1709000 NR Description: S-adenosylmethionine synthetase 1 (Methionine
  misc_feature (1)..(337): Homolog of NCBI NO: 13540318 NR Description: S-adenosyl-L-methionine synthetase [Elaeagnus
  misc_feature (1)..(337): Homolog of NCBI NO: 16226059 NR Description: S-adenosyl-L-methionine synthetase [Dendrobium
  misc_feature (1)..(341): Homolog of NCBI NO: 1170937 NR Description: S-adenosylmethionine synthetase 1 (Methionine
  misc_feature (1)..(337): Homolog of NCBI NO: 13540316 NR Description: S-adenosyl-L-methionine synthetase [Elaeagnus
  misc_feature (1)..(337): Homolog of NCBI NO: 10443981 NR Description: S-adenosylmethionine synthetase [Brassica juncea]
  misc_feature (1)..(337): Homolog of NCBI NO: 1346524 NR Description: S-adenosylmethionine synthetase (Methionine
  misc_feature (1)..(341): Homolog of NCBI NO: 17529621 NR Description: S-adenosylmethionine synthetase [Oryza sativa]
  misc_feature (1)..(335): Homolog of NCBI NO: 22774026 NR Description: S-adenosylmethionine synthase [Carica papaya]
  misc_feature (1)..(337): Homolog of NCBI NO: 127046 NR Description: S-adenosylmethionine synthetase 2 (Methionine
MVMVFGEITTKASVDYEKIVRDTCREIGFTSDDVGLDADRCKVLVNIEQQSPDIAQGVHGHFTKRPEEIGAGDQGHMFGYATDETPELMPLSHVLATKLGARLTEVRKDGTCAWLRPDSKTQVTVEYVNEGGAMVPVRVHTVLISTQHDETVTNDEIAADLKEHVIKPVIPERYLDEKTIFHLNPSGRFVIGGPHGDAGLTGRKIIIDTYGGWGAHGGGAFSGKDPTKVDRSGAYVARQAAKSIVASGLARRCLVQVSYAIGVPEPLSVFVDSYGTGTIPDKEILKIVKENFDFRPGMVTINLDLKKGGNRFIKTAAYGHFGRDDADFTWEVVKPLKKASA

SEQ ID NO: 11791 - protein, 339 aa, Zea mays subsp. mays
  peptide (1)..(339): Ceres Seq. ID no. 12347729
  misc_feature (65)..(187): Pfam Name: S-adenosylmethionine synthetase, central domain Pfam Description: S-adenosylmethionine synthetase, central domain
  misc_feature (1)..(339): Homolog of NCBI NO: 1709000 NR Description: S-adenosylmethionine synthetase 1 (Methionine
  misc_feature (1)..(335): Homolog of NCBI NO: 13540318 NR Description: S-adenosyl-L-methionine synthetase [Elaeagnus
  misc_feature (1)..(335): Homolog of NCBI NO: 16226059 NR Description: S-adenosyl-L-methionine synthetase [Dendrobium
  misc_feature (1)..(339): Homolog of NCBI NO: 1170937 NR Description: S-adenosylmethionine synthetase 1 (Methionine
  misc_feature (1)..(335): Homolog of NCBI NO: 13540316 NR Description: S-adenosyl-L-methionine synthetase [Elaeagnus
  misc_feature (1)..(335): Homolog of NCBI NO: 10443981 NR Description: S-adenosylmethionine synthetase [Brassica juncea]
  misc_feature (1)..(335): Homolog of NCBI NO: 1346524 NR Description: S-adenosylmethionine synthetase (Methionine
  misc_feature (1)..(339): Homolog of NCBI NO: 17529621 NR Description: S-adenosylmethionine synthetase [Oryza sativa]
  misc_feature (1)..(333): Homolog of NCBI NO: 22774026 NR Description: S-adenosylmethionine synthase [Carica papaya]
  misc_feature (1)..(335): Homolog of NCBI NO: 127046 NR Description: S-adenosylmethionine synthetase 2 (Methionine
MVFGEITTKASVDYEKIVRDTCREIGFTSDDVGLDADRCKVLVNIEQQSPDIAQGVHGHFTKRPEEIGAGDQGHMFGYATDETPELMPLSHVLATKLGARLTEVRKDGTCAWLRPDSKTQVTVEYVNEGGAMVPVRVHTVLISTQHDETVTNDEIAADLKEHVIKPVIPERYLDEKTIFHLNPSGRFVIGGPHGDAGLTGRKIIIDTYGGWGAHGGGAFSGKDPTKVDRSGAYVARQAAKSIVASGLARRCLVQVSYAIGVPEPLSVFVDSYGTGTIPDKEILKIVKENFDFRPGMVTINLDLKKGGNRFIKTAAYGHFGRDDADFTWEVVKPLKKASA

SEQ ID NO: 11792 - DNA, 1066 bp, Zea mays subsp. mays
  misc_feature (1)..(1066): Ceres Seq. ID no. 12411760
  misc_feature: MA Experiment ID: 108523 Result: Down-regulated in Transcription
  misc_feature: MA Experiment 108523 PARAMETER Experiment Name: Zm_42deg_Heat_P Parameter: Age (day) Value: 8
  misc_feature: MA Experiment 108523 PARAMETER Experiment Name: Zm_42deg_Heat_P Parameter: Organism Value: Zea mays
  misc_feature: MA Experiment 108523 PARAMETER Experiment Name: Zm_42deg_Heat_P Parameter: Plant Line Value: 35A19
  misc_feature: MA Experiment 108523 PARAMETER Experiment Name: Zm_42deg_Heat_P Parameter: Temperature (deg C) Value: 42 vs. 22
  misc_feature: MA Experiment 108523 PARAMETER Experiment Name: Zm_42deg_Heat_P Parameter: Timepoint (hr) Value: 6
  misc_feature: MA Experiment 108523 PARAMETER Experiment Name: Zm_42deg_Heat_P Parameter: Tissue Value: Aerial
  misc_feature: MA Experiment ID: 108535 Result: Down-regulated in Transcription
  misc_feature: MA Experiment 108535 PARAMETER Experiment Name: Zm_Meristem_P Parameter: Age (day) Value: 8
  misc_feature: MA Experiment 108535 PARAMETER Experiment Name: Zm_Meristem_P Parameter: Organism Value: Zea mays
  misc_feature: MA Experiment 108535 PARAMETER Experiment Name: Zm_Meristem_P Parameter: Plant Line Value: 35A19
  misc_feature: MA Experiment 108535 PARAMETER Experiment Name: Zm_Meristem_P Parameter: Tissue Value: Root Meristem vs. Above Root Meristem
  misc_feature: MA Experiment ID: 108544 Result: Down-regulated in Transcription
  misc_feature: MA Experiment ID: 108687 Result: Down-regulated in Transcription
  misc_feature: MA Experiment 108687 PARAMETER Experiment Name: Zm_Embryos-Flowers__P Parameter: Tissue Value: Embryo vs. Aerial+
  misc_feature: MA Experiment ID: 108689 Result: Up-regulated in Transcription
  misc_feature: MA Experiment 108689 PARAMETER Experiment Name: Zm_Drought_Roots_P Parameter: Age (day) Value: 9
  misc_feature: MA Experiment 108689 PARAMETER Experiment Name: Zm_Drought_Roots_P Parameter: Organism Value: Zea mays
  misc_feature: MA Experiment 108689 PARAMETER Experiment Name: Zm_Drought_Roots_P Parameter: Plant Line Value: 35A19
  misc_feature: MA Experiment 108689 PARAMETER Experiment Name: Zm_Drought_Roots_P Parameter: Timepoint (hr) Value: 24
  misc_feature: MA Experiment 108689 PARAMETER Experiment Name: Zm_Drought_Roots_P Parameter: Tissue Value: Roots
  misc_feature: MA Experiment 108689 PARAMETER Experiment Name: Zm_Drought_Roots_P Parameter: Treatment Value: Drought vs. No Drought
  misc_feature: MA Experiment ID: 20000477 Result: Down-regulated in Transcription
  misc_feature: MA Experiment 20000477 PARAMETER Experiment Name: Zm_5mM_SA_P Parameter: Age (day) Value: 10
  misc_feature: MA Experiment 20000477 PARAMETER Experiment Name: Zm_5mM_SA_P Parameter: Organism Value: Zea mays
  misc_feature: MA Experiment 20000477 PARAMETER Experiment Name: Zm_5mM_SA_P Parameter: Plant Line Value: 35A19
  misc_feature: MA Experiment 20000477 PARAMETER Experiment Name: Zm_5mM_SA_P Parameter: Timepoint (hr) Value: 48
  misc_feature: MA Experiment 20000477 PARAMETER Experiment Name: Zm_5mM_SA_P Parameter: Tissue Value: Aerial
  misc_feature: MA Experiment 20000477 PARAMETER Experiment Name: Zm_5mM_SA_P Parameter: Treatment Value: 5mM SA vs. No Treatment
  misc_feature: MA Experiment ID: 20000478 Result: Down-regulated in Transcription
  misc_feature: MA Experiment 20000478 PARAMETER Experiment Name: Zm_5mM_SA_P Parameter: Age (day) Value: 11
  misc_feature: MA Experiment 20000478 PARAMETER Experiment Name: Zm_5mM_SA_P Parameter: Organism Value: Zea mays
  misc_feature: MA Experiment 20000478 PARAMETER Experiment Name: Zm_5mM_SA_P Parameter: Plant Line Value: 35A19
  misc_feature: MA Experiment 20000478 PARAMETER Experiment Name: Zm_5mM_SA_P Parameter: Timepoint (hr) Value: 72
  misc_feature: MA Experiment 20000478 PARAMETER Experiment Name: Zm_5mM_SA_P Parameter: Tissue Value: Aerial
  misc_feature: MA Experiment 20000478 PARAMETER Experiment Name: Zm_5mM_SA_P Parameter: Treatment Value: 5mM SA vs. No Treatment
  misc_feature: MA Experiment ID: 20000479 Result: Down-regulated in Transcription
  misc_feature: MA Experiment 20000479 PARAMETER Experiment Name: Zm_Drought_P Parameter: Age (day) Value: 10
  misc_feature: MA Experiment 20000479 PARAMETER Experiment Name: Zm_Drought_P Parameter: Organism Value: Zea mays
  misc_feature: MA Experiment 20000479 PARAMETER Experiment Name: Zm_Drought_P Parameter: Plant Line Value: 35A19
  misc_feature: MA Experiment 20000479 PARAMETER Experiment Name: Zm_Drought_P Parameter: Timepoint (hr) Value: 48
  misc_feature: MA Experiment 20000479 PARAMETER Experiment Name: Zm_Drought_P Parameter: Tissue Value: Aerial
  misc_feature: MA Experiment 20000479 PARAMETER Experiment Name: Zm_Drought_P Parameter: Treatment Value: Drought vs. No Drought
  misc_feature: MA Experiment ID: 20000480 Result: Down-regulated in Transcription
  misc_feature: MA Experiment 20000480 PARAMETER Experiment Name: Zm_Drought_P Parameter: Age (day) Value: 11
  misc_feature: MA Experiment 20000480 PARAMETER Experiment Name: Zm_Drought_P Parameter: Organism Value: Zea mays
  misc_feature: MA Experiment 20000480 PARAMETER Experiment Name: Zm_Drought_P Parameter: Plant Line Value: 35A19
  misc_feature: MA Experiment 20000480 PARAMETER Experiment Name: Zm_Drought_P Parameter: Timepoint (hr) Value: 72
  misc_feature: MA Experiment 20000480 PARAMETER Experiment Name: Zm_Drought_P Parameter: Tissue Value: Aerial
  misc_feature: MA Experiment 20000480 PARAMETER Experiment Name: Zm_Drought_P Parameter: Treatment Value: Drought vs. No Drought
  misc_feature: MA Experiment ID: 20000533 Result: Down-regulated in Transcription
  misc_feature: MA Experiment 20000533 PARAMETER Experiment Name: Zm_0.001percent_MeJA_P Parameter: Age (day) Value: 11
  misc_feature: MA Experiment 20000533 PARAMETER Experiment Name: Zm_0.001percent_MeJA_P Parameter: Organism Value: Zea mays
  misc_feature: MA Experiment 20000533 PARAMETER Experiment Name: Zm_0.001percent_MeJA_P Parameter: Plant Line Value: 35A19
  misc_feature: MA Experiment 20000533 PARAMETER Experiment Name: Zm_0.001percent_MeJA_P Parameter: Timepoint (hr) Value: 72
  misc_feature: MA Experiment 20000533 PARAMETER Experiment Name: Zm_0.001percent_MeJA_P Parameter: Tissue Value: Aerial
  misc_feature: MA Experiment 20000533 PARAMETER Experiment Name: Zm_0.001percent_MeJA_P Parameter: Treatment Value: 0.001percent MeJA vs. No Treatment
  misc_feature: MA Experiment ID: 20000535 Result: Down-regulated in Transcription
  misc_feature: MA Experiment 20000535 PARAMETER Experiment Name: Zm_Hybrid_Seed_Dev_P Parameter: DAP Value: 30 vs. 12
  misc_feature: MA Experiment 20000535 PARAMETER Experiment Name: Zm_Hybrid_Seed_Dev_P Parameter: Organism Value: Zea mays
  misc_feature: MA Experiment 20000535 PARAMETER Experiment Name: Zm_Hybrid_Seed_Dev_P Parameter: Plant Line Value: 35A19
  misc_feature: MA Experiment 20000535 PARAMETER Experiment Name: Zm_Hybrid_Seed_Dev_P Parameter: Tissue Value: Embryo vs. Unfert Floret
aaaagaaagcccagaccaaagcagagctgcttgcttctccacgccttgtgcttccacagagcaaccagttctcagaagcaatgtccgcacccctggtggacgccgagtacatggccgagatcgagagggcacggcgggacctccgcgctctcgtcgccagcaagaactgcgcgccgatcatgctccgcctcgcgtggcacgacgccggcacttacgacgccaagaccaacacaggaggccccaacggctccataaggttcccacaggagtacagccactcttcaaacgcagggatcaagatcgccattgacctcttagagcctgtgaagcagaagcaccccaagatcacatacgcagacctgtatcagctcgccggagttgtcgccgtcgaagtcactggtggaccgaccgttgacttcgtccctgggaggaaggattcttcgatttgtccagaggaaggacgcttgccggatgctagaagaggtgcttcgcatctcagacaagtattctaccggatgggtttatcagacagggacattgtggcgctctccggcggccatactctggggagagcgcatcgagagaggacagggtttgatggcccatggactagggatcctctgaaatttgacaactcttatttccttgagcttctgaaaggcgactctgaagggctcttgaaactccctactgacaaggttcttgtggaagatcctgaattccgtcagcatgtccaactatatgccaaggatgaagatgcatttttcagggactacgcggagtcacacaagaagctgtcagagctaggcttcaccccccctcgctcttgtctctcatccagatctgcgaataaacacaagtcgttgctggtgcaagctgcagctgggctcgcagttgctaccgcagttgtcgcatgggcgtacctgtgcgaatccaacaacaagttcatctaacttacgcttaccgttagtacaaatacaaattggagtcgccaaaatatttcagttctgtgcacatgtatttgcatctacatattgatataataccaagcatgttatgtgttgtg

SEQ ID NO: 11793 - protein, 316 aa, Zea mays subsp. mays
  peptide (1)..(316): Ceres Seq. ID no. 12411761
  misc_feature (43)..(250): Pfam Name: Peroxidase Pfam Description: Peroxidase
  misc_feature (28)..(314): Homolog of NCBI NO: 38344123 NR Description: OSJNBb0072N21.2 [Oryza sativa (japonica
  misc_feature (28)..(314): Homolog of NCBI NO: 37030052 NR Description: putative peroxisome-bound ascorbate peroxidase
  misc_feature (27)..(310): Homolog of NCBI NO: 7484726 NR Description: L-ascorbate peroxidase (EC 1.11.1.11),
  misc_feature (27)..(314): Homolog of NCBI NO: 15080682 NR Description: peroxisome type ascorbate peroxidase [Hordeum
  misc_feature (27)..(314): Homolog of NCBI NO: 5442410 NR Description: ascorbate peroxidase [Zantedeschia aethiopica]
  misc_feature (27)..(310): Homolog of NCBI NO: 15430584 NR Description: peroxisomal ascorbate peroxidase [Cucurbita cv.
  misc_feature (27)..(310): Homolog of NCBI NO: 15236239 NR Description: ascorbate peroxidase, putative (APX); protein id: supported by cDNA: 21896., supported by cDNA: gi_17473760,
  misc_feature (27)..(314): Homolog of NCBI NO: 17066705 NR Description: ascorbate peroxidase [Capsicum annuum]
  misc_feature (27)..(310): Homolog of NCBI NO: 3288066 NR Description: ascorbate peroxidase [Arabidopsis thaliana]
  misc_feature (30)..(310): Homolog of NCBI NO: 4835909 NR Description: cytosolic ascorbate peroxidase [Mesembryanthemum
KKAQTKAELLASPRLVLPQSNQFSEAMSAPLVDAEYMAEIERARRDLRALVASKNCAPIMLRLAWHDAGTYDAKTNTGGPNGSIRFPQEYSHSSNAGIKIAIDLLEPVKQKHPKITYADLYQLAGVVAVEVTGGPTVDFVPGRKDSSICPEEGRLPDARRGASHLRQVFYRMGLSDRDIVALSGGHTLGRAHRERTGFDGPWTRDPLKFDNSYFLELLKGDSEGLLKLPTDKVLVEDPEFRQHVQLYAKDEDAFFRDYAESHKKLSELGFTPPRSCLSSRSANKHKSLLVQAAAGLAVATAVVAWAYLCESNNKFI

SEQ ID NO: 11794 - protein, 290 aa, Zea mays subsp. mays
  peptide (1)..(290): Ceres Seq. ID no. 12411762
  misc_feature (17)..(224): Pfam Name: Peroxidase Pfam Description: Peroxidase
  misc_feature (2)..(288): Homolog of NCBI NO: 38344123 NR Description: OSJNBb0072N21.2 [Oryza sativa (japonica
  misc_feature (2)..(288): Homolog of NCBI NO: 37030052 NR Description: putative peroxisome-bound ascorbate peroxidase
  misc_feature (1)..(284): Homolog of NCBI NO: 7484726 NR Description: L-ascorbate peroxidase (EC 1.11.1.11),
  misc_feature (1)..(288): Homolog of NCBI NO: 15080682 NR Description: peroxisome type ascorbate peroxidase [Hordeum
  misc_feature (1)..(288): Homolog of NCBI NO: 5442410 NR Description: ascorbate peroxidase [Zantedeschia aethiopica]
  misc_feature (1)..(284): Homolog of NCBI NO: 15430584 NR Description: peroxisomal ascorbate peroxidase [Cucurbita cv.
  misc_feature (1)..(284): Homolog of NCBI NO: 15236239 NR Description: ascorbate peroxidase, putative (APX); protein id: supported by cDNA: 21896., supported by cDNA: gi_17473760,
  misc_feature (1)..(288): Homolog of NCBI NO: 17066705 NR Description: ascorbate peroxidase [Capsicum annuum]
  misc_feature (1)..(284): Homolog of NCBI NO: 3288066 NR Description: ascorbate peroxidase [Arabidopsis thaliana]
  misc_feature (4)..(284): Homolog of NCBI NO: 4835909 NR Description: cytosolic ascorbate peroxidase [Mesembryanthemum
MSAPLVDAEYMAEIERARRDLRALVASKNCAPIMLRLAWHDAGTYDAKTNTGGPNGSIRFPQEYSHSSNAGIKIAIDLLEPVKQKHPKITYADLYQLAGVVAVEVTGGPTVDFVPGRKDSSICPEEGRLPDARRGASHLRQVFYRMGLSDRDIVALSGGHTLGRAHRERTGFDGPWTRDPLKFDNSYFLELLKGDSEGLLKLPTDKVLVEDPEFRQHVQLYAKDEDAFFRDYAESHKKLSELGFTPPRSCLSSRSANKHKSLLVQAAAGLAVATAVVAWAYLCESNNKFI

SEQ ID NO: 11795 - protein, 280 aa, Zea mays subsp. mays
  peptide (1)..(280): Ceres Seq. ID no. 12411763
  misc_feature (7)..(214): Pfam Name: Peroxidase Pfam Description: Peroxidase
  misc_feature (1)..(278): Homolog of NCBI NO: 38344123 NR Description: OSJNBb0072N21.2 [Oryza sativa (japonica
  misc_feature (1)..(278): Homolog of NCBI NO: 37030052 NR Description: putative peroxisome-bound ascorbate peroxidase
  misc_feature (1)..(274): Homolog of NCBI NO: 7484726 NR Description: L-ascorbate peroxidase (EC 1.11.1.11),
  misc_feature (1)..(278): Homolog of NCBI NO: 15080682 NR Description: peroxisome type ascorbate peroxidase [Hordeum
  misc_feature (1)..(278): Homolog of NCBI NO: 5442410 NR Description: ascorbate peroxidase [Zantedeschia aethiopica]
  misc_feature (1)..(274): Homolog of NCBI NO: 15430584 NR Description: peroxisomal ascorbate peroxidase [Cucurbita cv.
  misc_feature (1)..(274): Homolog of NCBI NO: 15236239 NR Description: ascorbate peroxidase, putative (APX); protein id: supported by cDNA: 21896., supported by cDNA: gi_17473760,
  misc_feature (1)..(278): Homolog of NCBI NO: 17066705 NR Description: ascorbate peroxidase [Capsicum annuum]
  misc_feature (1)..(274): Homolog of NCBI NO: 3288066 NR Description: ascorbate peroxidase [Arabidopsis thaliana]
  misc_feature (1)..(274): Homolog of NCBI NO: 4835909 NR Description: cytosolic ascorbate peroxidase [Mesembryanthemum
MAEIERARRDLRALVASKNCAPIMLRLAWHDAGTYDAKTNTGGPNGSIRFPQEYSHSSNAGIKIAIDLLEPVKQKHPKITYADLYQLAGVVAVEVTGGPTVDFVPGRKDSSICPEEGRLPDARRGASHLRQVFYRMGLSDRDIVALSGGHTLGRAHRERTGFDGPWTRDPLKFDNSYFLELLKGDSEGLLKLPTDKVLVEDPEFRQHVQLYAKDEDAFFRDYAESHKKLSELGFTPPRSCLSSRSANKHKSLLVQAAAGLAVATAVVAWAYLCESNNKFI

SEQ ID NO: 11796 - DNA, 1479 bp, Zea mays subsp. mays
  misc_feature (1)..(1479): Ceres Seq. ID no. 12364992
  misc_feature: MA Experiment ID: 108522 Result: Down-regulated in Transcription
  misc_feature: MA Experiment 108522 PARAMETER Experiment Name: Zm_42deg_Heat_P Parameter: Age (day) Value: 8
  misc_feature: MA Experiment 108522 PARAMETER Experiment Name: Zm_42deg_Heat_P Parameter: Organism Value: Zea mays
  misc_feature: MA Experiment 108522 PARAMETER Experiment Name: Zm_42deg_Heat_P Parameter: Plant Line Value: 35A19
  misc_feature: MA Experiment 108522 PARAMETER Experiment Name: Zm_42deg_Heat_P Parameter: Temperature (deg C) Value: 42 vs. 22
  misc_feature: MA Experiment 108522 PARAMETER Experiment Name: Zm_42deg_Heat_P Parameter: Timepoint (hr) Value: 1
  misc_feature: MA Experiment 108522 PARAMETER Experiment Name: Zm_42deg_Heat_P Parameter: Tissue Value: Aerial
  misc_feature: MA Experiment ID: 108533 Result: Down-regulated in Transcription
  misc_feature: MA Experiment 108533 PARAMETER Experiment Name: Zm_4deg_Cold_P Parameter: Age (hr) Value: 8
  misc_feature: MA Experiment 108533 PARAMETER Experiment Name: Zm_4deg_Cold_P Parameter: Organism Value: Zea mays
  misc_feature: MA Experiment 108533 PARAMETER Experiment Name: Zm_4deg_Cold_P Parameter: Plant Line Value: 35A19
  misc_feature: MA Experiment 108533 PARAMETER Experiment Name: Zm_4deg_Cold_P Parameter: Temperature (deg C) Value: 4 vs. 22
  misc_feature: MA Experiment 108533 PARAMETER Experiment Name: Zm_4deg_Cold_P Parameter: Timepoint (hr) Value: 1
  misc_feature: MA Experiment 108533 PARAMETER Experiment Name: Zm_4deg_Cold_P Parameter: Tissue Value: Aerial
  misc_feature: MA Experiment ID: 108556 Result: Down-regulated in Transcription
  misc_feature: MA Experiment 108556 PARAMETER Experiment Name: Zm_Drought_P Parameter: Age (day) Value: 9
  misc_feature: MA Experiment 108556 PARAMETER Experiment Name: Zm_Drought_P Parameter: Organism Value: Zea mays
  misc_feature: MA Experiment 108556 PARAMETER Experiment Name: Zm_Drought_P Parameter: Plant Line Value: 35A19
  misc_feature: MA Experiment 108556 PARAMETER Experiment Name: Zm_Drought_P Parameter: Timepoint (hr) Value: 24
  misc_feature: MA Experiment 108556 PARAMETER Experiment Name: Zm_Drought_P Parameter: Tissue Value: Aerial
  misc_feature: MA Experiment 108556 PARAMETER Experiment Name: Zm_Drought_P Parameter: Treatment Value: Drought vs. No Drought
  misc_feature: MA Experiment ID: 108597 Result: Down-regulated in Transcription
  misc_feature: MA Experiment 108597 PARAMETER Experiment Name: Zm_100uM_ABA_P Parameter: Age (day) Value: 9
  misc_feature: MA Experiment 108597 PARAMETER Experiment Name: Zm_100uM_ABA_P Parameter: Organism Value: Zea mays
  misc_feature: MA Experiment 108597 PARAMETER Experiment Name: Zm_100uM_ABA_P Parameter: Plant Line Value: 35A19
  misc_feature: MA Experiment 108597 PARAMETER Experiment Name: Zm_100uM_ABA_P Parameter: Timepoint (hr) Value: 24
  misc_feature: MA Experiment 108597 PARAMETER Experiment Name: Zm_100uM_ABA_P Parameter: Tissue Value: Aerial
  misc_feature: MA Experiment 108597 PARAMETER Experiment Name: Zm_100uM_ABA_P Parameter: Treatment Value: 100uM ABA vs. No Treatment
  misc_feature: MA Experiment ID: 108689 Result: Down-regulated in Transcription
  misc_feature: MA Experiment 108689 PARAMETER Experiment Name: Zm_Drought_Roots_P Parameter: Age (day) Value: 9
  misc_feature: MA Experiment 108689 PARAMETER Experiment Name: Zm_Drought_Roots_P Parameter: Organism Value: Zea mays
  misc_feature: MA Experiment 108689 PARAMETER Experiment Name: Zm_Drought_Roots_P Parameter: Plant Line Value: 35A19
  misc_feature: MA Experiment 108689 PARAMETER Experiment Name: Zm_Drought_Roots_P Parameter: Timepoint (hr) Value: 24
  misc_feature: MA Experiment 108689 PARAMETER Experiment Name: Zm_Drought_Roots_P Parameter: Tissue Value: Roots
  misc_feature: MA Experiment 108689 PARAMETER Experiment Name: Zm_Drought_Roots_P Parameter: Treatment Value: Drought vs. No Drought
  misc_feature: MA Experiment ID: 20000477 Result: Down-regulated in Transcription
  misc_feature: MA Experiment 20000477 PARAMETER Experiment Name: Zm_5mM_SA_P Parameter: Age (day) Value: 10
  misc_feature: MA Experiment 20000477 PARAMETER Experiment Name: Zm_5mM_SA_P Parameter: Organism Value: Zea mays
  misc_feature: MA Experiment 20000477 PARAMETER Experiment Name: Zm_5mM_SA_P Parameter: Plant Line Value: 35A19
  misc_feature: MA Experiment 20000477 PARAMETER Experiment Name: Zm_5mM_SA_P Parameter: Timepoint (hr) Value: 48
  misc_feature: MA Experiment 20000477 PARAMETER Experiment Name: Zm_5mM_SA_P Parameter: Tissue Value: Aerial
  misc_feature: MA Experiment 20000477 PARAMETER Experiment Name: Zm_5mM_SA_P Parameter: Treatment Value: 5mM SA vs. No Treatment
  misc_feature: MA Experiment ID: 20000480 Result: Down-regulated in Transcription
  misc_feature: MA Experiment 20000480 PARAMETER Experiment Name: Zm_Drought_P Parameter: Age (day) Value: 11
  misc_feature: MA Experiment 20000480 PARAMETER Experiment Name: Zm_Drought_P Parameter: Organism Value: Zea mays
  misc_feature: MA Experiment 20000480 PARAMETER Experiment Name: Zm_Drought_P Parameter: Plant Line Value: 35A19
  misc_feature: MA Experiment 20000480 PARAMETER Experiment Name: Zm_Drought_P Parameter: Timepoint (hr) Value: 72
  misc_feature: MA Experiment 20000480 PARAMETER Experiment Name: Zm_Drought_P Parameter: Tissue Value: Aerial
  misc_feature: MA Experiment 20000480 PARAMETER Experiment Name: Zm_Drought_P Parameter: Treatment Value: Drought vs. No Drought
  misc_feature: MA Experiment ID: 20000487 Result: Up-regulated in Transcription
  misc_feature: MA Experiment 20000487 PARAMETER Experiment Name: Zm_50mM_NH4NO3_L_to_H_P Parameter: Organism Value: Zea mays
  misc_feature: MA Experiment 20000487 PARAMETER Experiment Name: Zm_50mM_NH4NO3_L_to_H_P Parameter: Timepoint (hr) Value: 4
  misc_feature: MA Experiment 20000487 PARAMETER Experiment Name: Zm_50mM_NH4NO3_L_to_H_P Parameter: Tissue Value: Leaves
  misc_feature: MA Experiment 20000487 PARAMETER Experiment Name: Zm_50mM_NH4NO3_L_to_H_P Parameter: Treatment Value: 50mM NH4NO3 vs. 100mM Mannitol
  misc_feature: MA Experiment ID: 20000488 Result: Up-regulated in Transcription
  misc_feature: MA Experiment 20000488 PARAMETER Experiment Name: Zm_50mM_NH4NO3_L_to_H_P Parameter: Organism Value: Zea mays
  misc_feature: MA Experiment 20000488 PARAMETER Experiment Name: Zm_50mM_NH4NO3_L_to_H_P Parameter: Timepoint (hr) Value: 8
  misc_feature: MA Experiment 20000488 PARAMETER Experiment Name: Zm_50mM_NH4NO3_L_to_H_P Parameter: Tissue Value: Leaves
  misc_feature: MA Experiment 20000488 PARAMETER Experiment Name: Zm_50mM_NH4NO3_L_to_H_P Parameter: Treatment Value: 50mM NH4NO3 vs. 100mM Mannitol
  misc_feature: MA Experiment ID: 20000626 Result: Up-regulated in Transcription
  misc_feature: MA Experiment 20000626 PARAMETER Experiment Name: Zm_Herbicide-Treatments_P Parameter: Timepoint (hr) Value: 12
  misc_feature: MA Experiment 20000626 PARAMETER Experiment Name: Zm_Herbicide-Treatments_P Parameter: Tissue Value: Aerial
  misc_feature: MA Experiment 20000626 PARAMETER Experiment Name: Zm_Herbicide-Treatments_P Parameter: Treatment Value: Roundup vs. No Treatment
  misc_feature: MA Experiment ID: 20000629 Result: Up-regulated in Transcription
  misc_feature: MA Experiment 20000629 PARAMETER Experiment Name: Zm_Herbicide-Treatments_P Parameter: Timepoint (hr) Value: 12
  misc_feature: MA Experiment 20000629 PARAMETER Experiment Name: Zm_Herbicide-Treatments_P Parameter: Tissue Value: Aerial
  misc_feature: MA Experiment 20000629 PARAMETER Experiment Name: Zm_Herbicide-Treatments_P Parameter: Treatment Value: Trimec vs. No Treatment
  misc_feature: MA Experiment ID: 20001606 Result: Up-regulated in Transcription
  misc_feature: MA Experiment 20001606 PARAMETER Experiment Name: Zm_50ppm_KNO3_L-to-H_P Parameter: Age (day) Value: 19
  misc_feature: MA Experiment 20001606 PARAMETER Experiment Name: Zm_50ppm_KNO3_L-to-H_P Parameter: Organism Value: Zea mays
  misc_feature: MA Experiment 20001606 PARAMETER Experiment Name: Zm_50ppm_KNO3_L-to-H_P Parameter: Plant Line Value: 35A19
  misc_feature: MA Experiment 20001606 PARAMETER Experiment Name: Zm_50ppm_KNO3_L-to-H_P Parameter: Timepoint (hr) Value: 8
  misc_feature: MA Experiment 20001606 PARAMETER Experiment Name: Zm_50ppm_KNO3_L-to-H_P Parameter: Tissue Value: Shoots
  misc_feature: MA Experiment 20001606 PARAMETER Experiment Name: Zm_50ppm_KNO3_L-to-H_P Parameter: Treatment Value: 50ppm KNO3 vs. 50ppm KCl
atccgccgcccgcgcacttcttccttcgggcacacaggacaccaccgtcgacggattcatcgcgacgatggggctcgacgtcatggagatcgggatgggcgccgatttgagcctggatctgaggcacttcgcctccaaggccgtgaggcagagcaaggacgacacgccggcgccggacatggacgcatgcatccgccgcctcgaggaggagcggggtaagatcgagatgttcaagcgggacctcccgctctgcgcgcgcctcctcgccgacgtaattgatgtcatgaaggaggaggcggggaagaagaagacgacgacaaggaggagtgaccgcaggctggcgtctgcggcagctgatgaggaggaggaggaggaggacggcgccaccgcggacaagagcaagtggatgagcacggcgcagctctggacgggcgattccgggcgggaggacggggaatcagagaagcaagacaaggggcggtgctcgccggaggccaggtcccgcggcgctctcttaccgttcaaggctgatgtgggttctggcgcgccggcgttggcgccgctctgcttgagaacggacgacaaggctgcggctgcgcgcgtcggggtgccggatctgtcgtccttgctgtcgccgccggcgaccatgcctcctgcggacgccggcgccgaggagagccgtcgccaggttgtgggatttgcgcaagctgcggccagggcggctgccatggccccgtgtgcccctgcgcttgggctccagtcccagtcgcagcagcagcagcagcagcagcagcaggcaaggaaggctcggcgttgctggtcgacggagctgcatcgcaagttcgtcgccgccttggatcagctcggtggcccccaagttgccacgccgaagcaaatcagggagctgatgaaggtggatgggctgacaaacgacgaagtgaaaagccatcttcagaaataccggctgcacaaccggagggcgcctggatccggcgtggtgcgccagccgatcgtgctcgtgggagggctgtggattccccaggagcaaggcagccctcagtctggatctccccacggccccctccaccacctgtccacctcggtggccgccgtctcgtccgccgccaccgccagctgcgaggaggaagacggccggtccgagagctatggctggcaatgatgtctggctgctgctgctgctgcaccaccaatgtgtgttcactgttcagagaggggaggtttcttggcatggtggggatcgccatgggccatggcggaggccaccagttgcagcttcaggaatcgggaggggaattgagtgtagtgtagctgtctgtacacatacatacatacatacagtgagatgggatgagatgagagcgggccttgagcgctcgagatcagaactgatggtgcttcgtcgtcgggtttgtacatcccaaagagaaagagatactagctacagttttgcggcttgct

SEQ ID NO: 11797 - protein, 392 aa, Zea mays subsp. mays
  peptide (1)..(392): Ceres Seq. ID no. 12364993
  misc_feature (119)..(392): Homolog of NCBI NO: 33146555 NR Description: putative cytoskeletal protein-like protein [Oryza
  misc_feature (119)..(392): Homolog of NCBI NO: 34915398 NR Description: contains ESTs
  misc_feature (34)..(187): Homolog of NCBI NO: 18395562 NR Description: expressed protein; protein id: At2g03500.1, by cDNA: gi_16974543 [Arabidopsis thaliana] At2g03500/T4M8.7 [Arabidopsis thaliana]
  misc_feature (264)..(381): Homolog of NCBI NO: 18395562 NR Description: expressed protein; protein id: At2g03500.1, by cDNA: gi_16974543 [Arabidopsis thaliana] At2g03500/T4M8.7 [Arabidopsis thaliana]
  misc_feature (126)..(370): Homolog of NCBI NO: 34910306 NR Description: P0013F10.12 [Oryza sativa (japonica
  misc_feature (34)..(124): Homolog of NCBI NO: 34910306 NR Description: P0013F10.12 [Oryza sativa (japonica
  misc_feature (30)..(192): Homolog of NCBI NO: 18419989 NR Description: putative cytoskeletal protein; protein id:
  misc_feature (253)..(387): Homolog of NCBI NO: 18419989 NR Description: putative cytoskeletal protein; protein id:
  misc_feature (30)..(192): Homolog of NCBI NO: 14532434 NR Description: AT4g37180/C7A10_180 [Arabidopsis thaliana]
  misc_feature (253)..(387): Homolog of NCBI NO: 14532434 NR Description: AT4g37180/C7A10_180 [Arabidopsis thaliana]
SAARALLPSGTQDTTVDGFIATMGLDVMEIGMGADLSLDLRHFASKAVRQSKDDTPAPDMDACIRRLEEERGKIEMFKRDLPLCARLLADVIDVMKEEAGKKKTTTRRSDRRLASAAADEEEEEEDGATADKSKWMSTAQLWTGDSGREDGESEKQDKGRCSPEARSRGALLPFKADVGSGAPALAPLCLRTDDKAAAARVGVPDLSSLLSPPATMPPADAGAEESRRQVVGFAQAAARAAAMAPCAPALGLQSQSQQQQQQQQQARKARRCWSTELHRKFVAALDQLGGPQVATPKQIRELMKVDGLTNDEVKSHLQKYRLHNRRAPGSGVVRQPIVLVGGLWIPQEQGSPQSGSPHGPLHHLSTSVAAVSSAATASCEEEDGRSESYGWQ

SEQ ID NO: 11798 - protein, 370 aa, Zea mays subsp. mays
  peptide (1)..(370): Ceres Seq. ID no. 12364994
  misc_feature (97)..(370): Homolog of NCBI NO: 33146555 NR Description: putative cytoskeletal protein-like protein [Oryza
  misc_feature (97)..(370): Homolog of NCBI NO: 34915398 NR Description: contains ESTs
  misc_feature (12)..(165): Homolog of NCBI NO: 18395562 NR Description: expressed protein; protein id: At2g03500.1, by cDNA: gi_16974543 [Arabidopsis thaliana] At2g03500/T4M8.7 [Arabidopsis thaliana]
  misc_feature (242)..(359): Homolog of NCBI NO: 18395562 NR Description: expressed protein; protein id: At2g03500.1, by cDNA: gi_16974543 [Arabidopsis thaliana] At2g03500/T4M8.7 [Arabidopsis thaliana]
  misc_feature (104)..(348): Homolog of NCBI NO: 34910306 NR Description: P0013F10.12 [Oryza sativa (japonica
  misc_feature (12)..(102): Homolog of NCBI NO: 34910306 NR Description: P0013F10.12 [Oryza sativa (japonica
  misc_feature (8)..(170): Homolog of NCBI NO: 18419989 NR Description: putative cytoskeletal protein; protein id:
  misc_feature (231)..(365): Homolog of NCBI NO: 18419989 NR Description: putative cytoskeletal protein; protein id:
  misc_feature (8)..(170): Homolog of NCBI NO: 14532434 NR Description: AT4g37180/C7A10_180 [Arabidopsis thaliana]
  misc_feature (231)..(365): Homolog of NCBI NO: 14532434 NR Description: AT4g37180/C7A10_180 [Arabidopsis thaliana]
MGLDVMEIGMGADLSLDLRHFASKAVRQSKDDTPAPDMDACIRRLEEERGKIEMFKRDLPLCARLLADVIDVMKEEAGKKKTTTRRSDRRLASAAADEEEEEEDGATADKSKWMSTAQLWTGDSGREDGESEKQDKGRCSPEARSRGALLPFKADVGSGAPALAPLCLRTDDKAAAARVGVPDLSSLLSPPATMPPADAGAEESRRQVVGFAQAAARAAAMAPCAPALGLQSQSQQQQQQQQQARKARRCWSTELHRKFVAALDQLGGPQVATPKQIRELMKVDGLTNDEVKSHLQKYRLHNRRAPGSGVVRQPIVLVGGLWIPQEQGSPQSGSPHGPLHHLSTSVAAVSSAATASCEEEDGRSESYGWQ

SEQ ID NO: 11799 - protein, 365 aa, Zea mays subsp. mays
  peptide (1)..(365): Ceres Seq. ID no. 12364995
  misc_feature (92)..(365): Homolog of NCBI NO: 33146555 NR Description: putative cytoskeletal protein-like protein [Oryza
  misc_feature (92)..(365): Homolog of NCBI NO: 34915398 NR Description: contains ESTs
  misc_feature (7)..(160): Homolog of NCBI NO: 18395562 NR Description: expressed protein; protein id: At2g03500.1, by cDNA: gi_16974543 [Arabidopsis thaliana] At2g03500/T4M8.7 [Arabidopsis thaliana]
  misc_feature (237)..(354): Homolog of NCBI NO: 18395562 NR Description: expressed protein; protein id: At2g03500.1, by cDNA: gi_16974543 [Arabidopsis thaliana] At2g03500/T4M8.7 [Arabidopsis thaliana]
  misc_feature (99)..(343): Homolog of NCBI NO: 34910306 NR Description: P0013F10.12 [Oryza sativa (japonica
  misc_feature (7)..(97): Homolog of NCBI NO: 34910306 NR Description: P0013F10.12 [Oryza sativa (japonica
  misc_feature (3)..(165): Homolog of NCBI NO: 18419989 NR Description: putative cytoskeletal protein; protein id:
  misc_feature (226)..(360): Homolog of NCBI NO: 18419989 NR Description: putative cytoskeletal protein; protein id:
  misc_feature (3)..(165): Homolog of NCBI NO: 14532434 NR Description: AT4g37180/C7A10_180 [Arabidopsis thaliana]
  misc_feature (226)..(360): Homolog of NCBI NO: 14532434 NR Description: AT4g37180/C7A10_180 [Arabidopsis thaliana]
MEIGMGADLSLDLRHFASKAVRQSKDDTPAPDMDACIRRLEEERGKIEMFKRDLPLCARLLADVIDVMKEEAGKKKTTTRRSDRRLASAAADEEEEEEDGATADKSKWMSTAQLWTGDSGREDGESEKQDKGRCSPEARSRGALLPFKADVGSGAPALAPLCLRTDDKAAAARVGVPDLSSLLSPPATMPPADAGAEESRRQVVGFAQAAARAAAMAPCAPALGLQSQSQQQQQQQQQARKARRCWSTELHRKFVAALDQLGGPQVATPKQIRELMKVDGLTNDEVKSHLQKYRLHNRRAPGSGVVRQPIVLVGGLWIPQEQGSPQSGSPHGPLHHLSTSVAAVSSAATASCEEEDGRSESYGWQ

SEQ ID NO: 11800 - DNA, 1921 bp, Zea mays subsp. mays
  misc_feature (1)..(1921): Ceres Seq. ID no. 12404929
  misc_feature: MA Experiment ID: 108522 Result: Up-regulated in Transcription
  misc_feature: MA Experiment 108522 PARAMETER Experiment Name: Zm_42deg_Heat_P Parameter: Age (day) Value: 8
  misc_feature: MA Experiment 108522 PARAMETER Experiment Name: Zm_42deg_Heat_P Parameter: Organism Value: Zea mays
  misc_feature: MA Experiment 108522 PARAMETER Experiment Name: Zm_42deg_Heat_P Parameter: Plant Line Value: 35A19
  misc_feature: MA Experiment 108522 PARAMETER Experiment Name: Zm_42deg_Heat_P Parameter: Temperature (deg C) Value: 42 vs. 22
  misc_feature: MA Experiment 108522 PARAMETER Experiment Name: Zm_42deg_Heat_P Parameter: Timepoint (hr) Value: 1
  misc_feature: MA Experiment 108522 PARAMETER Experiment Name: Zm_42deg_Heat_P Parameter: Tissue Value: Aerial
  misc_feature: MA Experiment ID: 108527 Result: Up-regulated in Transcription
  misc_feature: MA Experiment 108527 PARAMETER Experiment Name: Zm_5mM_NO_P Parameter: Age (day) Value: 8
  misc_feature: MA Experiment 108527 PARAMETER Experiment Name: Zm_5mM_NO_P Parameter: Organism Value: Zea mays
  misc_feature: MA Experiment 108527 PARAMETER Experiment Name: Zm_5mM_NO_P Parameter: Plant Line Value: 35A19
  misc_feature: MA Experiment 108527 PARAMETER Experiment Name: Zm_5mM_NO_P Parameter: Timepoint (hr) Value: 6
  misc_feature: MA Experiment 108527 PARAMETER Experiment Name: Zm_5mM_NO_P Parameter: Tissue Value: Aerial
  misc_feature: MA Experiment 108527 PARAMETER Experiment Name: Zm_5mM_NO_P Parameter: Treatment Value: 5mM NO vs. No Treatment
  misc_feature: MA Experiment ID: 108535 Result: Down-regulated in Transcription
  misc_feature: MA Experiment 108535 PARAMETER Experiment Name: Zm_Meristem_P Parameter: Age (day) Value: 8
  misc_feature: MA Experiment 108535 PARAMETER Experiment Name: Zm_Meristem_P Parameter: Organism Value: Zea mays
  misc_feature: MA Experiment 108535 PARAMETER Experiment Name: Zm_Meristem_P Parameter: Plant Line Value: 35A19
  misc_feature: MA Experiment 108535 PARAMETER Experiment Name: Zm_Meristem_P Parameter: Tissue Value: Root Meristem vs. Above Root Meristem
  misc_feature: MA Experiment ID: 108559 Result: Up-regulated in Transcription
  misc_feature: MA Experiment 108559 PARAMETER Experiment Name: Zm_5mM_NO_P Parameter: Age (day) Value: 8
  misc_feature: MA Experiment 108559 PARAMETER Experiment Name: Zm_5mM_NO_P Parameter: Organism Value: Zea mays
  misc_feature: MA Experiment 108559 PARAMETER Experiment Name: Zm_5mM_NO_P Parameter: Plant Line Value: 35A19
  misc_feature: MA Experiment 108559 PARAMETER Experiment Name: Zm_5mM_NO_P Parameter: Timepoint (hr) Value: 12
  misc_feature: MA Experiment 108559 PARAMETER Experiment Name: Zm_5mM_NO_P Parameter: Tissue Value: Aerial
  misc_feature: MA Experiment 108559 PARAMETER Experiment Name: Zm_5mM_NO_P Parameter: Treatment Value: 5mM NO vs. No Treatment
  misc_feature: MA Experiment ID: 20001608 Result: Down-regulated in Transcription
  misc_feature: MA Experiment 20001608 PARAMETER Experiment Name: Zm_50ppm_KNO3_L-to-H_P Parameter: Age (day) Value: 21
  misc_feature: MA Experiment 20001608 PARAMETER Experiment Name: Zm_50ppm_KNO3_L-to-H_P Parameter: Organism Value: Zea mays
  misc_feature: MA Experiment 20001608 PARAMETER Experiment Name: Zm_50ppm_KNO3_L-to-H_P Parameter: Plant Line Value: 35A19
  misc_feature: MA Experiment 20001608 PARAMETER Experiment Name: Zm_50ppm_KNO3_L-to-H_P Parameter: Timepoint (hr) Value: 48
  misc_feature: MA Experiment 20001608 PARAMETER Experiment Name: Zm_50ppm_KNO3_L-to-H_P Parameter: Tissue Value: Shoots
  misc_feature: MA Experiment 20001608 PARAMETER Experiment Name: Zm_50ppm_KNO3_L-to-H_P Parameter: Treatment Value: 50ppm KNO3 vs. 50ppm KCl
gacccacttactaatccagccagccaatgagtcccccgtttcatcacgcaacgccaacccacaccaacgccacccggacccacccacccctcccgtccgtcgcataccatcccatcccatccccgtgcgccgagttcacggccgccgccaccaccaccaccacaaccgattacacaaggccacgcggcttctggaagcttcccttgccttgcctctcaacccaaatcgccacggctcctccgcccgcagcgccctcggcacgaccgccggattcgcctctgggtggggttngttttgtctcccccaccaccctacccacccctctcctctcctccaaggcttggcttgcctcgtgtcgtgtgtccctccaccgcccgctatgccgacgaggcttgccccccaccgccgatcgnacacggtcatatgattgcaatgaatcctgacatcgtactactgtcttggaaacaacttccaccaacggtcgatcctgtgaaacactaagacacccgttgccactggaaaggagagagcaaagtgatttgctgtctcctggcgatcgttgctcgtgaggcctagtgatggcagatgctagctcaaggactgacacctcaattgttttagacgacaacgacaagaatcataggatggagaatggaagtggtgcggttgtaccttctaattcttcagataggtccgacaggtctgataaacctttggaccaaaagacaatgcgacggcttgcccaaaatcgtgaggcagcaagaaaaagtcggctgaggaaaaaggcatatgtgcagcagctggagagcagtaagctgaaacttgcacaactggaacaggaactccagaaagctcgccagcagggaatcttcatttctagctctggagaccaaacccatgccatgagtggaaatggagctttgacttttgacatagaatatgctagatggctagaggaccccaaaataagcagataaatgagttgaggactgcagtgaatgctcatgcaagtgacagcgatctacgacttattgtagatggcataatggcacactatgatgaaatattcaaggtcaaaggtgttgctgcaaaggctgatgtgtttcatatactttcaggcatgtggaagacacctgctgaaaggtgcttcctatggcttgggggttttcgtccatctgagcttttaaagctcctagcgaatcacctcgagcctctaactgagcagcaaatgctgggtttgaccaacctccagcaatcttcccaacaagcagaggatgcgttgtcacagggcatggaagcactgcagcaatctttggcagagactttggctggatctctcggtccagcaggttcttcaggaaatgtggcaaactacatgggtcagatggccatggccatgggcaaactcgggacgctagagaattttcttcgccaagccgacaacctgcgacagcagacgttgcatcaaatgcaacgtatcctaacgatccgacaggcttctcgtgctcttcttgcaatccacgactatttttcacgattgcgcgctttaagttctctgtggcttgctaggccacgtgaataacgaagggccgtcagtattttgagttccctctgccttacggtgctgctgcgtcgttcgcagcgatgcatcacagatctttggtggtactgtttttgttgtacaattacttttggccgctgcttggtccaaattgtactcaggtgggtgtacaagtaggtcaatataatcctgtaagttatggtgatttatgggtgtgttagcaatgcaataataattagagagggcaggatcagggtttctgttgtttgtactggttagagatttagtcctaatgtaacttcctgggacatggggggcggaatgggaagagagtaacaagaatcttcctttggttactgt

SEQ ID NO: 11801 - protein, 211 aa, Zea mays subsp. mays
  peptide (1)..(211): Ceres Seq. ID no. 12404930
  misc_feature (6)..(211): Homolog of NCBI NO: 15148924 NR Description: TGA-type basic leucine zipper protein TGA2.1
  misc_feature (7)..(211): Homolog of NCBI NO: 17025922 NR Description: bZIP transcription factor [Oryza sativa]
  misc_feature (7)..(211): Homolog of NCBI NO: 17025924 NR Description: bZIP transcription factor [Oryza sativa]
  misc_feature (7)..(211): Homolog of NCBI NO: 422029 NR Description: transcription factor OBF3.2 - maize
  misc_feature (7)..(211): Homolog of NCBI NO: 34909110 NR Description: putative transcription factor HBP-1b [Oryza
  misc_feature (7)..(211): Homolog of NCBI NO: 122772 NR Description: Transcription factor HBP-1b >gi|100809|pir||S15347
  misc_feature (7)..(211): Homolog of NCBI NO: 34921538 NR Description: Transcription factor HBP-1b(c1)
  misc_feature (6)..(211): Homolog of NCBI NO: 17025920 NR Description: bZIP transcription factor [Oryza sativa]
  misc_feature (6)..(211): Homolog of NCBI NO: 17025918 NR Description: bZIP transcription factor [Oryza sativa]
  misc_feature (6)..(164): Homolog of NCBI NO: 34898092 NR Description: putative bZIP transcription factor [Oryza sativa
MARGPQNKQINELRTAVNAHASDSDLRLIVDGIMAHYDEIFKVKGVAAKADVFHILSGMWKTPAERCFLWLGGFRPSELLKLLANHLEPLTEQQMLGLTNLQQSSQQAEDALSQGMEALQQSLAETLAGSLGPAGSSGNVANYMGQMAMAMGKLGTLENFLRQADNLRQQTLHQMQRILTIRQASRALLAIHDYFSRLRALSSLWLARPRE

SEQ ID NO: 11802 - protein, 178 aa, Zea mays subsp. mays
  peptide (1)..(178): Ceres Seq. ID no. 12404931
  misc_feature (1)..(178): Homolog of NCBI NO: 17025920 NR Description: bZIP transcription factor [Oryza sativa]
  misc_feature (1)..(178): Homolog of NCBI NO: 17025918 NR Description: bZIP transcription factor [Oryza sativa]
  misc_feature (1)..(131): Homolog of NCBI NO: 34898092 NR Description: putative bZIP transcription factor [Oryza sativa
  misc_feature (1)..(178): Homolog of NCBI NO: 15148924 NR Description: TGA-type basic leucine zipper protein TGA2.1
  misc_feature (1)..(178): Homolog of NCBI NO: 17025922 NR Description: bZIP transcription factor [Oryza sativa]
  misc_feature (1)..(178): Homolog of NCBI NO: 17025924 NR Description: bZIP transcription factor [Oryza sativa]
  misc_feature (1)..(178): Homolog of NCBI NO: 422029 NR Description: transcription factor OBF3.2 - maize
  misc_feature (1)..(178): Homolog of NCBI NO: 34909110 NR Description: putative transcription factor HBP-1b [Oryza
  misc_feature (1)..(178): Homolog of NCBI NO: 122772 NR Description: Transcription factor HBP-1b >gi|100809|pir||S15347
  misc_feature (1)..(178): Homolog of NCBI NO: 34921538 NR Description: Transcription factor HBP-1b(c1)
MAHYDEIFKVKGVAAKADVFHILSGMWKTPAERCFLWLGGFRPSELLKLLANHLEPLTEQQMLGLTNLQQSSQQAEDALSQGMEALQQSLAETLAGSLGPAGSSGNVANYMGQMAMAMGKLGTLENFLRQADNLRQQTLHQMQRILTIRQASRALLAIHDYFSRLRALSSLWLARPRE

SEQ ID NO: 11803 - protein, 153 aa, Zea mays subsp. mays
  peptide (1)..(153): Ceres Seq. ID no. 12404932
  misc_feature (1)..(153): Homolog of NCBI NO: 17025920 NR Description: bZIP transcription factor [Oryza sativa]
  misc_feature (1)..(153): Homolog of NCBI NO: 17025918 NR Description: bZIP transcription factor [Oryza sativa]
  misc_feature (1)..(106): Homolog of NCBI NO: 34898092 NR Description: putative bZIP transcription factor [Oryza sativa
  misc_feature (1)..(153): Homolog of NCBI NO: 15148924 NR Description: TGA-type basic leucine zipper protein TGA2.1
  misc_feature (1)..(153): Homolog of NCBI NO: 17025922 NR Description: bZIP transcription factor [Oryza sativa]
  misc_feature (1)..(153): Homolog of NCBI NO: 17025924 NR Description: bZIP transcription factor [Oryza sativa]
  misc_feature (1)..(153): Homolog of NCBI NO: 422029 NR Description: transcription factor OBF3.2 - maize
  misc_feature (1)..(153): Homolog of NCBI NO: 34909110 NR Description: putative transcription factor HBP-1b [Oryza
  misc_feature (1)..(153): Homolog of NCBI NO: 122772 NR Description: Transcription factor HBP-1b >gi|100809|pir||S15347
  misc_feature (1)..(153): Homolog of NCBI NO: 34921538 NR Description: Transcription factor HBP-1b(c1)
MWKTPAERCFLWLGGFRPSELLKLLANHLEPLTEQQMLGLTNLQQSSQQAEDALSQGMEALQQSLAETLAGSLGPAGSSGNVANYMGQMAMAMGKLGTLENFLRQADNLRQQTLHQMQRILTIRQASRALLAIHDYFSRLRALSSLWLARPRE

SEQ ID NO: 11804 - DNA, 1099 bp, Zea mays subsp. mays
  misc_feature (1)..(1099): Ceres Seq. ID no. 13493423
  misc_feature: MA Experiment ID: 108530 Result: Down-regulated in Transcription
  misc_feature: MA Experiment 108530 PARAMETER Experiment Name: Zm_Imbibed_Seeds_P Parameter: Age (day) Value: 6 vs. 2
  misc_feature: MA Experiment 108530 PARAMETER Experiment Name: Zm_Imbibed_Seeds_P Parameter: Organism Value: Zea mays
  misc_feature: MA Experiment 108530 PARAMETER Experiment Name: Zm_Imbibed_Seeds_P Parameter: Plant Line Value: 35A19
  misc_feature: MA Experiment 108530 PARAMETER Experiment Name: Zm_Imbibed_Seeds_P Parameter: Tissue Value: Aerial vs. Embryo
  misc_feature: MA Experiment ID: 108535 Result: Up-regulated in Transcription
  misc_feature: MA Experiment 108535 PARAMETER Experiment Name: Zm_Meristem_P Parameter: Age (day) Value: 8
  misc_feature: MA Experiment 108535 PARAMETER Experiment Name: Zm_Meristem_P Parameter: Organism Value: Zea mays
  misc_feature: MA Experiment 108535 PARAMETER Experiment Name: Zm_Meristem_P Parameter: Plant Line Value: 35A19
  misc_feature: MA Experiment 108535 PARAMETER Experiment Name: Zm_Meristem_P Parameter: Tissue Value: Root Meristem vs. Above Root Meristem
  misc_feature: MA Experiment ID: 108544 Result: Down-regulated in Transcription
  misc_feature: MA Experiment ID: 20000478 Result: Down-regulated in Transcription
  misc_feature: MA Experiment 20000478 PARAMETER Experiment Name: Zm_5mM_SA_P Parameter: Age (day) Value: 11
  misc_feature: MA Experiment 20000478 PARAMETER Experiment Name: Zm_5mM_SA_P Parameter: Organism Value: Zea mays
  misc_feature: MA Experiment 20000478 PARAMETER Experiment Name: Zm_5mM_SA_P Parameter: Plant Line Value: 35A19
  misc_feature: MA Experiment 20000478 PARAMETER Experiment Name: Zm_5mM_SA_P Parameter: Timepoint (hr) Value: 72
  misc_feature: MA Experiment 20000478 PARAMETER Experiment Name: Zm_5mM_SA_P Parameter: Tissue Value: Aerial
  misc_feature: MA Experiment 20000478 PARAMETER Experiment Name: Zm_5mM_SA_P Parameter: Treatment Value: 5mM SA vs. No Treatment
  misc_feature: MA Experiment ID: 20000492 Result: Up-regulated in Transcription
  misc_feature: MA Experiment 20000492 PARAMETER Experiment Name: Zm_Hybrid_Seed_Dev_P Parameter: DAP Value: 12
  misc_feature: MA Experiment 20000492 PARAMETER Experiment Name: Zm_Hybrid_Seed_Dev_P Parameter: Organism Value: Zea mays
  misc_feature: MA Experiment 20000492 PARAMETER Experiment Name: Zm_Hybrid_Seed_Dev_P Parameter: Plant Line Value: 35A19
  misc_feature: MA Experiment 20000492 PARAMETER Experiment Name: Zm_Hybrid_Seed_Dev_P Parameter: Tissue Value: Fert Kernel vs. Unfert Floret
aactgcagccgtcggatactcccacaggagcgttccgaagccctaatgctcgcccttcccataagtactctcctctgaccacgccgccgccatttccttcctcctcccacctcggcggccggcctcctcttctcttcacccacacgctggtcatagagatgtcggctgcagaggcgaaggcggcggcggtcccggagtctgtgctgcggaagcgcaagcgggaggagcaatgggcagcggacaagaaggagaaggcgctcgcggacaggaagaaggcgctcgagagccgcaagatcatcttcgcccgcgccaagcagtacgccgaggagtaccacgcccaggagaaggagcttgtgcagctcaagcgtgaggcccggttgaagggtgggttctatgtgagcccagaggccaagcttctgtttgtggttcgcatccgtggtatcaatgccatgcaccccaagacccgcaagatcttgcagctcctgcgattgaggcagatcttcaacggtgtcttcctcaaggttaacaaggcaaccattaacatgctgcgcagggtggagccatatgttgcgtacggataccccaacctgaagagcgttagggagttgatctacaagagaggttacgggaagctgaacaagcagaggattccacttagcaacaacagtgtcatcgaggagggcctcgggaagcacaatatcatctgcattgaggaccttgtccacgagatcatgacggtgggcccgcacttcaaggaggccaacaacttcctctggccgttcaagctgaaggcacccctcggcggcctcaagaagaagaggaaccactacgtggagggcggtgacgccggaaaccgtgagaactacatcaacgagctcatcaagaggatgaactaggttctctcttgtatcctgtgagaatgcttttctgtgtcagcgtggttgtttttgctctagtaagttgacggataatgatggatatgcaattttttttggtgttcattggctctaatacagccagacttcactaggaactgtgtcgctgtttatgttggcagtagcttctggaggtttttgtgtacttttgttatttttattct

SEQ ID NO: 11805 - protein, 297 aa, Zea mays subsp. mays
  peptide (1)..(297): Ceres Seq. ID no. 13493424
  misc_feature (137)..(189): Pfam Name: Ribosomal protein L30p/L7e Pfam Description: Ribosomal protein L30p/L7e
  misc_feature (53)..(297): Homolog of NCBI NO: 38637548 NR Description: putative 60S ribosomal protein L7 [Oryza sativa
  misc_feature (55)..(297): Homolog of NCBI NO: 38346542 NR Description: OSJNBa0035M09.3 [Oryza sativa (japonica
  misc_feature (53)..(297): Homolog of NCBI NO: 15231288 NR Description: 60S ribosomal protein L7 (RPL7D) [Arabidopsis >gi|11994560|dbj|BAB02600.1| 60S ribosomal protein L7 thaliana] >gi|14532552|gb|AAK64004.1| AT3g13580/K20M4_2
  misc_feature (56)..(297): Homolog of NCBI NO: 30689617 NR Description: 60S ribosomal protein L7 (RPL7C) [Arabidopsis >gi|15450713|gb|AAK96628.1| At2g44120/F6E13.25 [Arabidopsis >gi|17386142|gb|AAL38617.1|AF446884_1 At2g44120/F6E13.25
  misc_feature (56)..(297): Homolog of NCBI NO: 30689623 NR Description: 60S ribosomal protein L7 (RPL7C) [Arabidopsis >gi|6174958|sp|Q42208|RL7_ARATH 60S ribosomal protein L7
  misc_feature (56)..(297): Homolog of NCBI NO: 27311547 NR Description: Unknown protein [Arabidopsis thaliana]
  misc_feature (57)..(297): Homolog of NCBI NO: 15226212 NR Description: 60S ribosomal protein L7 (RPL7B) [Arabidopsis
  misc_feature (63)..(297): Homolog of NCBI NO: 445613 NR Description: ribosomal protein L7
  misc_feature (58)..(296): Homolog of NCBI NO: 28630259 NR Description: ribosomal protein L7 [Branchiostoma lanceolatum]
  misc_feature (59)..(296): Homolog of NCBI NO: 18253049 NR Description: ribosomal protein L7 [Spodoptera frugiperda]
LQPSDTPTGAFRSPNARPSHKYSPLTTPPPFPSSSHLGGRPPLLFTHTLVIEMSAAEAKAAAVPESVLRKRKREEQWAADKKEKALADRKKALESRKIIFARAKQYAEEYHAQEKELVQLKREARLKGGFYVSPEAKLLFVVRIRGINAMHPKTRKILQLLRLRQIFNGVFLKVNKATINMLRRVEPYVAYGYPNLKSVRELIYKRGYGKLNKQRIPLSNNSVIEEGLGKHNIICIEDLVHEIMTVGPHFKEANNFLWPFKLKAPLGGLKKKRNHYVEGGDAGNRENYINELIKRMN

SEQ ID NO: 11806 - protein, 245 aa, Zea mays subsp. mays
  peptide (1)..(245): Ceres Seq. ID no. 13493425
  misc_feature (85)..(137): Pfam Name: Ribosomal protein L30p/L7e Pfam Description: Ribosomal protein L30p/L7e
  misc_feature (1)..(245): Homolog of NCBI NO: 38637548 NR Description: putative 60S ribosomal protein L7 [Oryza sativa
  misc_feature (3)..(245): Homolog of NCBI NO: 38346542 NR Description: OSJNBa0035M09.3 [Oryza sativa (japonica
  misc_feature (1)..(245): Homolog of NCBI NO: 15231288 NR Description: 60S ribosomal protein L7 (RPL7D) [Arabidopsis >gi|11994560|dbj|BAB02600.1| 60S ribosomal protein L7 thaliana] >gi|14532552|gb|AAK64004.1| AT3g13580/K20M4_2
  misc_feature (4)..(245): Homolog of NCBI NO: 30689617 NR Description: 60S ribosomal protein L7 (RPL7C) [Arabidopsis >gi|15450713|gb|AAK96628.1| At2g44120/F6E13.25 [Arabidopsis >gi|17386142|gb|AAL38617.1|AF446884_1 At2g44120/F6E13.25
  misc_feature (4)..(245): Homolog of NCBI NO: 30689623 NR Description: 60S ribosomal protein L7 (RPL7C) [Arabidopsis >gi|6174958|sp|Q42208|RL7_ARATH 60S ribosomal protein L7
  misc_feature (4)..(245): Homolog of NCBI NO: 27311547 NR Description: Unknown protein [Arabidopsis thaliana]
  misc_feature (5)..(245): Homolog of NCBI NO: 15226212 NR Description: 60S ribosomal protein L7 (RPL7B) [Arabidopsis
  misc_feature (11)..(245): Homolog of NCBI NO: 445613 NR Description: ribosomal protein L7
  misc_feature (6)..(244): Homolog of NCBI NO: 28630259 NR Description: ribosomal protein L7 [Branchiostoma lanceolatum]
  misc_feature (7)..(244): Homolog of NCBI NO: 18253049 NR Description: ribosomal protein L7 [Spodoptera frugiperda]
MSAAEAKAAAVPESVLRKRKREEQWAADKKEKALADRKKALESRKIIFARAKQYAEEYHAQEKELVQLKREARLKGGFYVSPEAKLLFVVRIRGINAMHPKTRKILQLLRLRQIFNGVFLKVNKATINMLRRVEPYVAYGYPNLKSVRELIYKRGYGKLNKQRIPLSNNSVIEEGLGKHNIICIEDLVHEIMTVGPHFKEANNFLWPFKLKAPLGGLKKKRNHYVEGGDAGNRENYINELIKRMN

SEQ ID NO: 11807 - protein, 148 aa, Zea mays subsp. mays
  peptide (1)..(148): Ceres Seq. ID no. 13493426
  misc_feature (1)..(40): Pfam Name: Ribosomal protein L30p/L7e Pfam Description: Ribosomal protein L30p/L7e
  misc_feature (1)..(148): Homolog of NCBI NO: 38637548 NR Description: putative 60S ribosomal protein L7 [Oryza sativa
  misc_feature (1)..(148): Homolog of NCBI NO: 38346542 NR Description: OSJNBa0035M09.3 [Oryza sativa (japonica
  misc_feature (1)..(148): Homolog of NCBI NO: 15231288 NR Description: 60S ribosomal protein L7 (RPL7D) [Arabidopsis >gi|11994560|dbj|BAB02600.1| 60S ribosomal protein L7 thaliana] >gi|14532552|gb|AAK64004.1| AT3g13580/K20M4_2
  misc_feature (1)..(148): Homolog of NCBI NO: 30689617 NR Description: 60S ribosomal protein L7 (RPL7C) [Arabidopsis >gi|15450713|gb|AAK96628.1| At2g44120/F6E13.25 [Arabidopsis >gi|17386142|gb|AAL38617.1|AF446884_1 At2g44120/F6E13.25
  misc_feature (1)..(148): Homolog of NCBI NO: 30689623 NR Description: 60S ribosomal protein L7 (RPL7C) [Arabidopsis >gi|6174958|sp|Q42208|RL7_ARATH 60S ribosomal protein L7
  misc_feature (1)..(148): Homolog of NCBI NO: 27311547 NR Description: Unknown protein [Arabidopsis thaliana]
  misc_feature (1)..(148): Homolog of NCBI NO: 15226212 NR Description: 60S ribosomal protein L7 (RPL7B) [Arabidopsis
  misc_feature (1)..(148): Homolog of NCBI NO: 445613 NR Description: ribosomal protein L7
  misc_feature (1)..(147): Homolog of NCBI NO: 28630259 NR Description: ribosomal protein L7 [Branchiostoma lanceolatum]
  misc_feature (1)..(147): Homolog of NCBI NO: 18253049 NR Description: ribosomal protein L7 [Spodoptera frugiperda]
MHPKTRKILQLLRLRQIFNGVFLKVNKATINMLRRVEPYVAYGYPNLKSVRELIYKRGYGKLNKQRIPLSNNSVIEEGLGKHNIICIEDLVHEIMTVGPHFKEANNFLWPFKLKAPLGGLKKKRNHYVEGGDAGNRENYINELIKRMN

SEQ ID NO: 11808 - DNA, 938 bp, Zea mays subsp. mays
  misc_feature (1)..(938): Ceres Seq. ID no. 13580171
  misc_feature: MA Experiment ID: 108543 Result: Up-regulated in Transcription
  misc_feature: MA Experiment ID: 20000535 Result: Down-regulated in Transcription
  misc_feature: MA Experiment 20000535 PARAMETER Experiment Name: Zm_Hybrid_Seed_Dev_P Parameter: DAP Value: 30 vs. 12
  misc_feature: MA Experiment 20000535 PARAMETER Experiment Name: Zm_Hybrid_Seed_Dev_P Parameter: Organism Value: Zea mays
  misc_feature: MA Experiment 20000535 PARAMETER Experiment Name: Zm_Hybrid_Seed_Dev_P Parameter: Plant Line Value: 35A19
  misc_feature: MA Experiment 20000535 PARAMETER Experiment Name: Zm_Hybrid_Seed_Dev_P Parameter: Tissue Value: Embryo vs. Unfert Floret
cccactttactcctatccactgcggcctggacgcgtgcgagaggcttgaccaagcagcagcagcagcagcagcgatggcgcctctgaagctgtacgggatgccgctgtcccccaacgtggtgcgcgtggccaccgtgctcaacgagaagggcctcgacttcgagatcgtccccgtcgacctcaccaccggcgcccacaagcagcccgacttcctcgccctcaaccctttcggccagatcccggctctcgtcgacggagacgaagtcctcttcgagtcccgtgcgatcaaccggtacatcgccagcaagtacgcgtcggagggcacggacctgctccccgcgacggcgtcggcggcgaagctggaggtgtggctggaggtggagtcgcaccacttccacccgaacgcgtcgccgctggtgttccagctgctcgtgaggccgctcctgggcggcgcccccgacgcggcggtggtggagaagcacgcggagcagctcgccaaggtgctcgacgtgtacgaggcgcacctggcccgcaacaagtacctcgccggggacgagttcacgctcgccgacgccaaccacgcgctcctacctgctctcacctcagcaagacccccaaggccgggctgcgtcgccgcccgcccccacgtcaaggcctggtgggaggccatcgccgcccgccccgcgttccagaagaccgtcgccgccatccccttgcccccgccgccctcctcctcggcttgacctcgccttgcgttgcctgggtcgcggatgcgtcggagccctgagtcgaataaaagaggccgcatcctgtcttgcatttgctcgtgcgccatgtgctataacagcctgtgtaataaacactgttgcctttcgtgtgtgttcattgccttttggttggttggtccttgcatatcctactagtgctgatctttttgt

SEQ ID NO: 11809 - protein, 246 aa, Zea mays subsp. mays
  peptide (1)..(246): Ceres Seq. ID no. 13580172
  misc_feature (25)..(246): Homolog of NCBI NO: 1170090 NR Description: GLUTATHIONE S-TRANSFERASE III (GST-III) (GST
  misc_feature (25)..(246): Homolog of NCBI NO: 25287127 NR Description: glutathione transferase (EC 2.5.1.18) III(b) - maize >gi|4468794|emb|CAB38119.1| Glutathione transferase
  misc_feature (25)..(246): Homolog of NCBI NO: 25287128 NR Description: glutathione transferase (EC 2.5.1.18) III(a) - maize >gi|4468792|emb|CAB38118.1| Glutathione transferase
  misc_feature (26)..(242): Homolog of NCBI NO: 3891593 NR Description: Structure Of Glutathione S-Transferase Iii In Apo
  misc_feature (25)..(246): Homolog of NCBI NO: 66616 NR Description: glutathione transferase (EC 2.5.1.18) III
  misc_feature (28)..(240): Homolog of NCBI NO: 34907162 NR Description: putative glutathione S-transferase [Oryza sativa
  misc_feature (28)..(240): Homolog of NCBI NO: 11177843 NR Description: putative glutathione S-transferase OsGSTF4 [Oryza
  misc_feature (25)..(240): Homolog of NCBI NO: 23504745 NR Description: glutathione transferase F5 [Triticum aestivum]
  misc_feature (28)..(232): Homolog of NCBI NO: 18150415 NR Description: glutathione S-transferase [Allium cepa]
  misc_feature (25)..(240): Homolog of NCBI NO: 34909798 NR Description: glutathione S-transferase II [Oryza sativa
HFTPIHCGLDACERLDQAAAAAAAMAPLKLYGMPLSPNVVRVATVLNEKGLDFEIVPVDLTTGAHKQPDFLALNPFGQIPALVDGDEVLFESRAINRYIASKYASEGTDLLPATASAAKLEVWLEVESHHFHPNASPLVFQLLVRPLLGGAPDAAVVEKHAEQLAKVLDVYEAHLARNKYLAGDEFTLADANHALLPALTSARPPRPGCVAARPHVKAWWEAIAARPAFQKTVAAIPLPPPPSSSA

SEQ ID NO: 11810 - protein, 222 aa, Zea mays subsp. mays
  peptide (1)..(222): Ceres Seq. ID no. 13580173
  misc_feature (1)..(222): Homolog of NCBI NO: 1170090 NR Description: GLUTATHIONE S-TRANSFERASE III (GST-III) (GST
  misc_feature (1)..(222): Homolog of NCBI NO: 25287127 NR Description: glutathione transferase (EC 2.5.1.18) III(b) - maize >gi|4468794|emb|CAB38119.1| Glutathione transferase
  misc_feature (1)..(222): Homolog of NCBI NO: 25287128 NR Description: glutathione transferase (EC 2.5.1.18) III(a) - maize >gi|4468792|emb|CAB38118.1| Glutathione transferase
  misc_feature (2)..(218): Homolog of NCBI NO: 3891593 NR Description: Structure Of Glutathione S-Transferase Iii In Apo
  misc_feature (1)..(222): Homolog of NCBI NO: 66616 NR Description: glutathione transferase (EC 2.5.1.18) III
  misc_feature (4)..(216): Homolog of NCBI NO: 34907162 NR Description: putative glutathione S-transferase [Oryza sativa
  misc_feature (4)..(216): Homolog of NCBI NO: 11177843 NR Description: putative glutathione S-transferase OsGSTF4 [Oryza
  misc_feature (1)..(216): Homolog of NCBI NO: 23504745 NR Description: glutathione transferase F5 [Triticum aestivum]
  misc_feature (4)..(208): Homolog of NCBI NO: 18150415 NR Description: glutathione S-transferase [Allium cepa]
  misc_feature (1)..(216): Homolog of NCBI NO: 34909798 NR Description: glutathione S-transferase II [Oryza sativa
MAPLKLYGMPLSPNVVRVATVLNEKGLDFEIVPVDLTTGAHKQPDFLALNPFGQIPALVDGDEVLFESRAINRYIASKYASEGTDLLPATASAAKLEVWLEVESHHFHPNASPLVFQLLVRPLLGGAPDAAVVEKHAEQLAKVLDVYEAHLARNKYLAGDEFTLADANHALLPALTSARPPRPGCVAARPHVKAWWEAIAARPAFQKTVAAIPLPPPPSSSA

SEQ ID NO: 11811 - protein, 214 aa, Zea mays subsp. mays
  peptide (1)..(214): Ceres Seq. ID no. 13580174
  misc_feature (1)..(214): Homolog of NCBI NO: 1170090 NR Description: GLUTATHIONE S-TRANSFERASE III (GST-III) (GST
  misc_feature (1)..(214): Homolog of NCBI NO: 25287127 NR Description: glutathione transferase (EC 2.5.1.18) III(b) - maize >gi|4468794|emb|CAB38119.1| Glutathione transferase
  misc_feature (1)..(214): Homolog of NCBI NO: 25287128 NR Description: glutathione transferase (EC 2.5.1.18) III(a) - maize >gi|4468792|emb|CAB38118.1| Glutathione transferase
  misc_feature (1)..(210): Homolog of NCBI NO: 3891593 NR Description: Structure Of Glutathione S-Transferase Iii In Apo
  misc_feature (1)..(214): Homolog of NCBI NO: 66616 NR Description: glutathione transferase (EC 2.5.1.18) III
  misc_feature (1)..(208): Homolog of NCBI NO: 34907162 NR Description: putative glutathione S-transferase [Oryza sativa
  misc_feature (1)..(208): Homolog of NCBI NO: 11177843 NR Description: putative glutathione S-transferase OsGSTF4 [Oryza
  misc_feature (1)..(208): Homolog of NCBI NO: 23504745 NR Description: glutathione transferase F5 [Triticum aestivum]
  misc_feature (1)..(200): Homolog of NCBI NO: 18150415 NR Description: glutathione S-transferase [Allium cepa]
  misc_feature (1)..(208): Homolog of NCBI NO: 34909798 NR Description: glutathione S-transferase II [Oryza sativa
MPLSPNVVRVATVLNEKGLDFEIVPVDLTTGAHKQPDFLALNPFGQIPALVDGDEVLFESRAINRYIASKYASEGTDLLPATASAAKLEVWLEVESHHFHPNASPLVFQLLVRPLLGGAPDAAVVEKHAEQLAKVLDVYEAHLARNKYLAGDEFTLADANHALLPALTSARPPRPGCVAARPHVKAWWEAIAARPAFQKTVAAIPLPPPPSSSA

SEQ ID NO: 11812 - DNA, 880 bp, Zea mays subsp. mays
  misc_feature (1)..(880): Ceres Seq. ID no. 12343712
  misc_feature: MA Experiment ID: 108527 Result: Up-regulated in Transcription
  misc_feature: MA Experiment 108527 PARAMETER Experiment Name: Zm_5mM_NO_P Parameter: Age (day) Value: 8
  misc_feature: MA Experiment 108527 PARAMETER Experiment Name: Zm_5mM_NO_P Parameter: Organism Value: Zea mays
  misc_feature: MA Experiment 108527 PARAMETER Experiment Name: Zm_5mM_NO_P Parameter: Plant Line Value: 35A19
  misc_feature: MA Experiment 108527 PARAMETER Experiment Name: Zm_5mM_NO_P Parameter: Timepoint (hr) Value: 6
  misc_feature: MA Experiment 108527 PARAMETER Experiment Name: Zm_5mM_NO_P Parameter: Tissue Value: Aerial
  misc_feature: MA Experiment 108527 PARAMETER Experiment Name: Zm_5mM_NO_P Parameter: Treatment Value: 5mM NO vs. No Treatment
aaaaaaccccgaaggttcggactgaatgaagcgaaagcccaaatccccttccccttcccctcttcgtctccgtcggcggcgtcggaccgaacccgatcccgcagccctaactaaccctaggaggcaggcggcggcggggatggtgtactacgcgctgttggtgggcgcggagctggatggcctcaccaacctgcagccccgccacggctgcgacgaccccagcttcccctactacctcaagctcaagtgcgagaactgcggggaggtcaccgccaagtccacctacgtcaccctcagcgagcaagtcgacctgcccagaggacacggtgccgctcacctcgtccagaagtgcaagctttgtgggagagatggaacaattgtgatgattcctggtcaggggacaccacttactattgagcagagccagaaagaggagaagacttgtttgatggtgtttgactgcagaggctatgaacctgttgagttttcctttggcactggctggaaggctgaatctgtgcatgggactccttttgaaattgactgctctgaaggtgaattttctgagtatgatgagaagggagaatgccccgttgagctaggcaagctgcagtcaacattcaaagtggtgaagaagcatgagaagggtgggaagactagatttgtctagatcgagtgacttggaatctggcagatattggagttggcggtgtgtataaatggtagatttgggctgaaggtcatgcgtgatccgacctcctttttcttctatctgttgattctgtggatgcagtgaaccatgcgaagctttcggtgatagtgtccacaggggcattaccctgtaccgaaactgatctttataacttaccaccaatgctcg

SEQ ID NO: 11813 - protein, 214 aa, Zea mays subsp. mays
  peptide (1)..(214): Ceres Seq. ID no. 12343713
  misc_feature (39)..(202): Pfam Name: Eukaryotic protein of unknown function (DUF866) Pfam Description: Eukaryotic protein of unknown function (DUF866)
  misc_feature (1)..(212): Homolog of NCBI NO: 34914208 NR Description: OSJNBb0049O23.17 [Oryza sativa (japonica
  misc_feature (39)..(203): Homolog of NCBI NO: 18418118 NR Description: putative protein; protein id: At4g32930.1, by cDNA: 8739. [Arabidopsis thaliana] >gi|21617910|gb|AAM66960.1| [Arabidopsis thaliana] >gi|27754522|gb|AAO22708.1| unknown
  misc_feature (39)..(203): Homolog of NCBI NO: 7486215 NR Description: hypothetical protein F26P21.50 - Arabidopsis >gi|3688174|emb|CAA21202.1| putative protein [Arabidopsis >gi|7270240|emb|CAB80010.1| putative protein [Arabidopsis
  misc_feature (2)..(207): Homolog of NCBI NO: 7503539 NR Description: hypothetical protein F46B6.3 - Caenorhabditis
  misc_feature (43)..(203): Homolog of NCBI NO: 8923541 NR Description: hypothetical protein FLJ20580 [Homo sapiens] unnamed protein product [Homo sapiens]
  misc_feature (71)..(207): Homolog of NCBI NO: 17561054 NR Description: Putative protein of eukaryotic origin elegans] >gi|13548373|emb|CAC35815.1| Hypothetical protein
  misc_feature (43)..(203): Homolog of NCBI NO: 27715611 NR Description: similar to hypothetical protein FLJ20580 [Homo
  misc_feature (43)..(203): Homolog of NCBI NO: 21539639 NR Description: RIKEN cDNA 0610037L13 [Mus musculus] unnamed protein product [Mus musculus]
  misc_feature (43)..(203): Homolog of NCBI NO: 26328397 NR Description: unnamed protein product [Mus musculus]
  misc_feature (71)..(207): Homolog of NCBI NO: 39594673 NR Description: Hypothetical protein CBG19371 [Caenorhabditis
MKRKPKSPSPSPLRLRRRRRTEPDPAALTNPRRQAAAGMVYYALLVGAELDGLTNLQPRHGCDDPSFPYYLKLKCENCGEVTAKSTYVTLSEQVDLPRGHGAAHLVQKCKLCGRDGTIVMIPGQGTPLTIEQSQKEEKTCLMVFDCRGYEPVEFSFGTGWKAESVHGTPFEIDCSEGEFSEYDEKGECPVELGKLQSTFKVVKKHEKGGKTRFV

SEQ ID NO: 11814 - protein, 176 aa, Zea mays subsp. mays
  peptide (1)..(176): Ceres Seq. ID no. 12343714
  misc_feature (1)..(164): Pfam Name: Eukaryotic protein of unknown function (DUF866) Pfam Description: Eukaryotic protein of unknown function (DUF866)
  misc_feature (1)..(174): Homolog of NCBI NO: 34914208 NR Description: OSJNBb0049O23.17 [Oryza sativa (japonica
  misc_feature (1)..(165): Homolog of NCBI NO: 18418118 NR Description: putative protein; protein id: At4g32930.1, by cDNA: 8739. [Arabidopsis thaliana] >gi|21617910|gb|AAM66960.1| [Arabidopsis thaliana] >gi|27754522|gb|AAO22708.1| unknown
  misc_feature (1)..(165): Homolog of NCBI NO: 7486215 NR Description: hypothetical protein F26P21.50 - Arabidopsis >gi|3688174|emb|CAA21202.1| putative protein [Arabidopsis >gi|7270240|emb|CAB80010.1| putative protein [Arabidopsis
  misc_feature (1)..(169): Homolog of NCBI NO: 7503539 NR Description: hypothetical protein F46B6.3 - Caenorhabditis
  misc_feature (5)..(165): Homolog of NCBI NO: 8923541 NR Description: hypothetical protein FLJ20580 [Homo sapiens] unnamed protein product [Homo sapiens]
  misc_feature (33)..(169): Homolog of NCBI NO: 17561054 NR Description: Putative protein of eukaryotic origin elegans] >gi|13548373|emb|CAC35815.1| Hypothetical protein
  misc_feature (5)..(165): Homolog of NCBI NO: 27715611 NR Description: similar to hypothetical protein FLJ20580 [Homo
  misc_feature (5)..(165): Homolog of NCBI NO: 21539639 NR Description: RIKEN cDNA 0610037L13 [Mus musculus] unnamed protein product [Mus musculus]
  misc_feature (5)..(165): Homolog of NCBI NO: 26328397 NR Description: unnamed protein product [Mus musculus]
  misc_feature (33)..(169): Homolog of NCBI NO: 39594673 NR Description: Hypothetical protein CBG19371 [Caenorhabditis
MVYYALLVGAELDGLTNLQPRHGCDDPSFPYYLKLKCENCGEVTAKSTYVTLSEQVDLPRGHGAAHLVQKCKLCGRDGTIVMIPGQGTPLTIEQSQKEEKTCLMVFDCRGYEPVEFSFGTGWKAESVHGTPFEIDCSEGEFSEYDEKGECPVELGKLQSTFKVVKKHEKGGKTRFV

SEQ ID NO: 11815 - DNA, 711 bp, Zea mays subsp. mays; identical to SEQ ID NO: 2360
  misc_feature (1)..(711): Ceres Seq. ID no. 12588472
  misc_feature: MA Experiment ID: 108535 Result: Up-regulated in Transcription
  misc_feature: MA Experiment 108535 PARAMETER Experiment Name: Zm_Meristem_P Parameter: Age (day) Value: 8
  misc_feature: MA Experiment 108535 PARAMETER Experiment Name: Zm_Meristem_P Parameter: Organism Value: Zea mays
  misc_feature: MA Experiment 108535 PARAMETER Experiment Name: Zm_Meristem_P Parameter: Plant Line Value: 35A19
  misc_feature: MA Experiment 108535 PARAMETER Experiment Name: Zm_Meristem_P Parameter: Tissue Value: Root Meristem vs. Above Root Meristem
  misc_feature: MA Experiment ID: 108544 Result: Down-regulated in Transcription
  misc_feature: MA Experiment ID: 20000492 Result: Up-regulated in Transcription
  misc_feature: MA Experiment 20000492 PARAMETER Experiment Name: Zm_Hybrid_Seed_Dev_P Parameter: DAP Value: 12
  misc_feature: MA Experiment 20000492 PARAMETER Experiment Name: Zm_Hybrid_Seed_Dev_P Parameter: Organism Value: Zea mays
  misc_feature: MA Experiment 20000492 PARAMETER Experiment Name: Zm_Hybrid_Seed_Dev_P Parameter: Plant Line Value: 35A19
  misc_feature: MA Experiment 20000492 PARAMETER Experiment Name: Zm_Hybrid_Seed_Dev_P Parameter: Tissue Value: Fert Kernel vs. Unfert Floret
  misc_feature: MA Experiment ID: 20000632 Result: Down-regulated in Transcription
  misc_feature: MA Experiment 20000632 PARAMETER Experiment Name: Zm_Herbicide-Treatments_P Parameter: Timepoint (hr) Value: 4
  misc_feature: MA Experiment 20000632 PARAMETER Experiment Name: Zm_Herbicide-Treatments_P Parameter: Tissue Value: Aerial
  misc_feature: MA Experiment 20000632 PARAMETER Experiment Name: Zm_Herbicide-Treatments_P Parameter: Treatment Value: Glean vs. No Treatment

SEQ ID NO: 11816 - protein, 149 aa, Zea mays subsp. mays; identical to SEQ ID NO: 2361
  peptide (1)..(149): Ceres Seq. ID no. 12588473
  misc_feature (21)..(149): Pfam Name: Core histone H2A/H2B/H3/H4 Pfam Description: Core histone H2A/H2B/H3/H4
  misc_feature (2)..(146): Homolog of NCBI NO: 15223150 NR Description: histone H2B, putative; protein id: At1g08170.1 thaliana] >gi|6579213|gb|AAF18256.1|AC011438_18 T23G18.3 thaliana] >gi|8778831|gb|AAF79830.1|AC026875_10 T6D22.26
  misc_feature (1)..(149): Homolog of NCBI NO: 122022 NR Description: Histone H2B >gi|283025|pir||S22323 histone H2B -
  misc_feature (1)..(149): Homolog of NCBI NO: 1708107 NR Description: Histone H2B >gi|7439752|pir||T02077 histone H2B -
  misc_feature (1)..(149): Homolog of NCBI NO: 399853 NR Description: Histone H2B.1 >gi|283041|pir||S28048 histone H2B
  misc_feature (1)..(149): Homolog of NCBI NO: 122041 NR Description: Histone H2B-IV >gi|99439|pir||JQ0797 histone
  misc_feature (4)..(149): Homolog of NCBI NO: 34876159 NR Description: similar to Histone H2B 291B [Rattus norvegicus]
  misc_feature (1)..(149): Homolog of NCBI NO: 34895838 NR Description: putative histone H2B [Oryza sativa (japonica group)] >gi|13872901|dbj|BAB44008.1| putative histone H2B [Oryza
  misc_feature (1)..(149): Homolog of NCBI NO: 3913804 NR Description: Histone H2B.3 >gi|577825|emb|CAA49584.1| H2B
  misc_feature (1)..(149): Homolog of NCBI NO: 399854 NR Description: Histone H2B.2 >gi|283042|pir||S28049 histone H2B
  misc_feature (1)..(145): Homolog of NCBI NO: 18596433 NR Description: similar to dJ839M11.2 (Core histone

SEQ ID NO: 11817 - protein, 99 aa, Zea mays subsp. mays; identical to SEQ ID NO: 2362
  peptide (1)..(99): Ceres Seq. ID no. 12588474
  misc_feature (31)..(91): Pfam Name: TT viral orf 1 Pfam Description: TT viral orf 1
  misc_feature (8)..(99): Homolog of NCBI NO: 5032119 NR Description: Ser/Arg-related nuclear matrix protein (plenty of
  misc_feature (3)..(99): Homolog of NCBI NO: 9843651 NR Description: SRM102 [Arabidopsis thaliana]
  misc_feature (3)..(99): Homolog of NCBI NO: 30684163 NR Description: proline-rich protein -related [Arabidopsis >gi|21928131|gb|AAM78093.1| At2g29210/F16P2.41 [Arabidopsis >gi|23308459|gb|AAN18199.1| At2g29210/F16P2.41 [Arabidopsis
  misc_feature (3)..(99): Homolog of NCBI NO: 25408026 NR Description: probable proline-rich protein [imported] -
  misc_feature (8)..(99): Homolog of NCBI NO: 7949115 NR Description: Ser/Arg-related nuclear matrix protein;
  misc_feature (3)..(99): Homolog of NCBI NO: 28972153 NR Description: mKIAA0324 protein [Mus musculus]
  misc_feature (3)..(99): Homolog of NCBI NO: 30424862 NR Description: RIKEN cDNA 5033413A03 [Mus musculus]
  misc_feature (8)..(99): Homolog of NCBI NO: 23274133 NR Description: Similar to serine/arginine repetitive matrix 1

SEQ ID NO: 11818 - DNA, 761 bp, Zea mays subsp. mays
  misc_feature (1)..(761): Ceres Seq. ID no. 12345679
  misc_feature: MA Experiment ID: 108534 Result: Up-regulated in Transcription
  misc_feature: MA Experiment 108534 PARAMETER Experiment Name: Zm_4deg_Cold_P Parameter: Age (hr) Value: 8
  misc_feature: MA Experiment 108534 PARAMETER Experiment Name: Zm_4deg_Cold_P Parameter: Organism Value: Zea mays
  misc_feature: MA Experiment 108534 PARAMETER Experiment Name: Zm_4deg_Cold_P Parameter: Plant Line Value: 35A19
  misc_feature: MA Experiment 108534 PARAMETER Experiment Name: Zm_4deg_Cold_P Parameter: Temperature (deg C) Value: 4 vs. 22
  misc_feature: MA Experiment 108534 PARAMETER Experiment Name: Zm_4deg_Cold_P Parameter: Timepoint (hr) Value: 6
  misc_feature: MA Experiment 108534 PARAMETER Experiment Name: Zm_4deg_Cold_P Parameter: Tissue Value: Aerial
  misc_feature: MA Experiment ID: 108535 Result: Down-regulated in Transcription
  misc_feature: MA Experiment 108535 PARAMETER Experiment Name: Zm_Meristem_P Parameter: Age (day) Value: 8
  misc_feature: MA Experiment 108535 PARAMETER Experiment Name: Zm_Meristem_P Parameter: Organism Value: Zea mays
  misc_feature: MA Experiment 108535 PARAMETER Experiment Name: Zm_Meristem_P Parameter: Plant Line Value: 35A19
  misc_feature: MA Experiment 108535 PARAMETER Experiment Name: Zm_Meristem_P Parameter: Tissue Value: Root Meristem vs. Above Root Meristem
  misc_feature: MA Experiment ID: 108543 Result: Down-regulated in Transcription
  misc_feature: MA Experiment ID: 108556 Result: Down-regulated in Transcription
  misc_feature: MA Experiment 108556 PARAMETER Experiment Name: Zm_Drought_P Parameter: Age (day) Value: 9
  misc_feature: MA Experiment 108556 PARAMETER Experiment Name: Zm_Drought_P Parameter: Organism Value: Zea mays
  misc_feature: MA Experiment 108556 PARAMETER Experiment Name: Zm_Drought_P Parameter: Plant Line Value: 35A19
  misc_feature: MA Experiment 108556 PARAMETER Experiment Name: Zm_Drought_P Parameter: Timepoint (hr) Value: 24
  misc_feature: MA Experiment 108556 PARAMETER Experiment Name: Zm_Drought_P Parameter: Tissue Value: Aerial
  misc_feature: MA Experiment 108556 PARAMETER Experiment Name: Zm_Drought_P Parameter: Treatment Value: Drought vs. No Drought
  misc_feature: MA Experiment ID: 108689 Result: Down-regulated in Transcription
  misc_feature: MA Experiment 108689 PARAMETER Experiment Name: Zm_Drought_Roots_P Parameter: Age (day) Value: 9
  misc_feature: MA Experiment 108689 PARAMETER Experiment Name: Zm_Drought_Roots_P Parameter: Organism Value: Zea mays
  misc_feature: MA Experiment 108689 PARAMETER Experiment Name: Zm_Drought_Roots_P Parameter: Plant Line Value: 35A19
  misc_feature: MA Experiment 108689 PARAMETER Experiment Name: Zm_Drought_Roots_P Parameter: Timepoint (hr) Value: 24
  misc_feature: MA Experiment 108689 PARAMETER Experiment Name: Zm_Drought_Roots_P Parameter: Tissue Value: Roots
  misc_feature: MA Experiment 108689 PARAMETER Experiment Name: Zm_Drought_Roots_P Parameter: Treatment Value: Drought vs. No Drought
aattgccttaccttgccttgccttcccctccattccacctccacctcgccgcccgaatccccccacccaacaatcccccatggggtcgcaggccatcgaggcgcaccgcgcgggcgcggaggtgtaccgcggcgcggcgctgtgcgcggagaagtcgacggagctgctggcagaggcgcacctcccgctgggcctgctgccgctggccgacatggaggaggtcggctacaaccgcgccacgggcttcgtgtggctgcgccagaggaaggcgctcacgcacacgttccgcccgatcgcgcgccaggtctcgtacgccgccgaggtcaccgcgttcgtggaggaccggcggatgaagcgcatgaccggggtcaagaccaaggagctcctcatctgggtcaccctctccgacatgttcgtcgacagggacgacccgtccaagatcaccttcaagacgcccaccgggctcggcaggacctaccccgtctccgccttcgccaaggaaggcgccggtgacgacggcgcggcggccaagcacaaggatgatgcccccgccccgaccgccgccggtaaggctgctgccagcaagtgaggtggcggcgtccggagctttttaccttgccgtagtcgccatacttgcctcctcaataatggcgtttgtaccccctctacctgcttcaaattagtgtgttttatgaatggaaacgaccatccaactttccatccgtccttgcaatgccaatgtgtcacggggtgtttttact

SEQ ID NO: 11819 - protein, 195 aa, Zea mays subsp. mays
  peptide (1)..(195): Ceres Seq. ID no. 12345680
  misc_feature (30)..(173): Pfam Name: Protein of unknown function, DUF538 Pfam Description: Protein of unknown function, DUF538
  misc_feature (27)..(193): Homolog of NCBI NO: 34903866 NR Description: unnamed protein product [Oryza sativa (japonica group)] >gi|8096574|dbj|BAA96147.1| unnamed protein product
  misc_feature (27)..(165): Homolog of NCBI NO: 34915410 NR Description: hypothetical protein~similar to Arabidopsis
  misc_feature (27)..(165): Homolog of NCBI NO: 34915422 NR Description: hypothetical protein~similar to Arabidopsis
  misc_feature (27)..(165): Homolog of NCBI NO: 33146557 NR Description: unknown protein [Oryza sativa (japonica
  misc_feature (27)..(165): Homolog of NCBI NO: 34915418 NR Description: hypothetical protein~similar to Arabidopsis
  misc_feature (27)..(165): Homolog of NCBI NO: 34915426 NR Description: hypothetical protein~similar to Arabidopsis
  misc_feature (27)..(167): Homolog of NCBI NO: 18422648 NR Description: expressed protein; protein id: At5g46230.1, by cDNA: 15495. [Arabidopsis thaliana] gene_id:MPL12.1~unknown protein [Arabidopsis thaliana]
  misc_feature (33)..(195): Homolog of NCBI NO: 18391006 NR Description: expressed protein; protein id: At1g09310.1, by cDNA: 11073., supported by cDNA: gi_13194795, supported by gi_15028182, supported by cDNA: gi_19310812 [Arabidopsis
  misc_feature (32)..(165): Homolog of NCBI NO: 34915430 NR Description: hypothetical protein~similar to Arabidopsis
IALPCLAFPSIPPPPRRPNPPTQQSPMGSQAIEAHRAGAEVYRGAALCAEKSTELLAEAHLPLGLLPLADMEEVGYNRATGFVWLRQRKALTHTFRPIARQVSYAAEVTAFVEDRRMKRMTGVKTKELLIWVTLSDMFVDRDDPSKITFKTPTGLGRTYPVSAFAKEGAGDDGAAAKHKDDAPAPTAAGKAAASK

SEQ ID NO: 11820 - protein, 170 aa, Zea mays subsp. mays
  peptide (1)..(170): Ceres Seq. ID no. 12345681
NCLTLPCLPLHSTSTSPPESPHPTIPHGVAGHRGAPRGRGGVPRRGAVRGEVDGAAGRGAPPAGPAAAGRHGGGRLQPRHGLRVAAPEEGAHAHVPPDRAPGLVRRRGHRVRGGPADEAHDRGQDQGAPHLGHPLRHVRRQGRPVQDHLQDAHRARQDLPRLRLRQGRRR

SEQ ID NO: 11821 - protein, 169 aa, Zea mays subsp. mays
  peptide (1)..(169): Ceres Seq. ID no. 12345682
  misc_feature (4)..(147): Pfam Name: Protein of unknown function, DUF538 Pfam Description: Protein of unknown function, DUF538
  misc_feature (1)..(167): Homolog of NCBI NO: 34903866 NR Description: unnamed protein product [Oryza sativa (japonica group)] >gi|8096574|dbj|BAA96147.1| unnamed protein product
  misc_feature (1)..(139): Homolog of NCBI NO: 34915410 NR Description: hypothetical protein~similar to Arabidopsis
  misc_feature (1)..(139): Homolog of NCBI NO: 34915422 NR Description: hypothetical protein~similar to Arabidopsis
  misc_feature (1)..(139): Homolog of NCBI NO: 33146557 NR Description: unknown protein [Oryza sativa (japonica
  misc_feature (1)..(139): Homolog of NCBI NO: 34915418 NR Description: hypothetical protein~similar to Arabidopsis
  misc_feature (1)..(139): Homolog of NCBI NO: 34915426 NR Description: hypothetical protein~similar to Arabidopsis
  misc_feature (1)..(141): Homolog of NCBI NO: 18422648 NR Description: expressed protein; protein id: At5g46230.1, by cDNA: 15495. [Arabidopsis thaliana] gene_id:MPL12.1~unknown protein [Arabidopsis thaliana]
  misc_feature (7)..(169): Homolog of NCBI NO: 18391006 NR Description: expressed protein; protein id: At1g09310.1, by cDNA: 11073., supported by cDNA: gi_13194795, supported by gi_15028182, supported by cDNA: gi_19310812 [Arabidopsis
  misc_feature (6)..(139): Homolog of NCBI NO: 34915430 NR Description: hypothetical protein~similar to Arabidopsis
MGSQAIEAHRAGAEVYRGAALCAEKSTELLAEAHLPLGLLPLADMEEVGYNRATGFVWLRQRKALTHTFRPIARQVSYAAEVTAFVEDRRMKRMTGVKTKELLIWVTLSDMFVDRDDPSKITFKTPTGLGRTYPVSAFAKEGAGDDGAAAKHKDDAPAPTAAGKAAASK

SEQ ID NO: 11822 - DNA, 929 bp, Zea mays subsp. mays
  misc_feature (1)..(929): Ceres Seq. ID no. 12361956
  misc_feature: MA Experiment ID: 108504 Result: Up-regulated in Transcription
  misc_feature: MA Experiment 108504 PARAMETER Experiment Name: Zm_Drought_P Parameter: Age (day) Value: 8
  misc_feature: MA Experiment 108504 PARAMETER Experiment Name: Zm_Drought_P Parameter: Organism Value: Zea mays
  misc_feature: MA Experiment 108504 PARAMETER Experiment Name: Zm_Drought_P Parameter: Plant Line Value: 35A19
  misc_feature: MA Experiment 108504 PARAMETER Experiment Name: Zm_Drought_P Parameter: Timepoint (hr) Value: 12
  misc_feature: MA Experiment 108504 PARAMETER Experiment Name: Zm_Drought_P Parameter: Tissue Value: Aerial
  misc_feature: MA Experiment 108504 PARAMETER Experiment Name: Zm_Drought_P Parameter: Treatment Value: Drought vs. No Drought
  misc_feature: MA Experiment ID: 108526 Result: Up-regulated in Transcription
  misc_feature: MA Experiment 108526 PARAMETER Experiment Name: Zm_5mM_NO_P Parameter: Age (day) Value: 8
  misc_feature: MA Experiment 108526 PARAMETER Experiment Name: Zm_5mM_NO_P Parameter: Organism Value: Zea mays
  misc_feature: MA Experiment 108526 PARAMETER Experiment Name: Zm_5mM_NO_P Parameter: Plant Line Value: 35A19
  misc_feature: MA Experiment 108526 PARAMETER Experiment Name: Zm_5mM_NO_P Parameter: Timepoint (hr) Value: 1
  misc_feature: MA Experiment 108526 PARAMETER Experiment Name: Zm_5mM_NO_P Parameter: Tissue Value: Aerial
  misc_feature: MA Experiment 108526 PARAMETER Experiment Name: Zm_5mM_NO_P Parameter: Treatment Value: 5mM NO vs. No Treatment
  misc_feature: MA Experiment ID: 108533 Result: Up-regulated in Transcription
  misc_feature: MA Experiment 108533 PARAMETER Experiment Name: Zm_4deg_Cold_P Parameter: Age (hr) Value: 8
  misc_feature: MA Experiment 108533 PARAMETER Experiment Name: Zm_4deg_Cold_P Parameter: Organism Value: Zea mays
  misc_feature: MA Experiment 108533 PARAMETER Experiment Name: Zm_4deg_Cold_P Parameter: Plant Line Value: 35A19
  misc_feature: MA Experiment 108533 PARAMETER Experiment Name: Zm_4deg_Cold_P Parameter: Temperature (deg C) Value: 4 vs. 22
  misc_feature: MA Experiment 108533 PARAMETER Experiment Name: Zm_4deg_Cold_P Parameter: Timepoint (hr) Value: 1
  misc_feature: MA Experiment 108533 PARAMETER Experiment Name: Zm_4deg_Cold_P Parameter: Tissue Value: Aerial
  misc_feature: MA Experiment ID: 108534 Result: Up-regulated in Transcription
  misc_feature: MA Experiment 108534 PARAMETER Experiment Name: Zm_4deg_Cold_P Parameter: Age (hr) Value: 8
  misc_feature: MA Experiment 108534 PARAMETER Experiment Name: Zm_4deg_Cold_P Parameter: Organism Value: Zea mays
  misc_feature: MA Experiment 108534 PARAMETER Experiment Name: Zm_4deg_Cold_P Parameter: Plant Line Value: 35A19
  misc_feature: MA Experiment 108534 PARAMETER Experiment Name: Zm_4deg_Cold_P Parameter: Temperature (deg C) Value: 4 vs. 22
  misc_feature: MA Experiment 108534 PARAMETER Experiment Name: Zm_4deg_Cold_P Parameter: Timepoint (hr) Value: 6
  misc_feature: MA Experiment 108534 PARAMETER Experiment Name: Zm_4deg_Cold_P Parameter: Tissue Value: Aerial
  misc_feature: MA Experiment ID: 108535 Result: Down-regulated in Transcription
  misc_feature: MA Experiment 108535 PARAMETER Experiment Name: Zm_Meristem_P Parameter: Age (day) Value: 8
  misc_feature: MA Experiment 108535 PARAMETER Experiment Name: Zm_Meristem_P Parameter: Organism Value: Zea mays
  misc_feature: MA Experiment 108535 PARAMETER Experiment Name: Zm_Meristem_P Parameter: Plant Line Value: 35A19
  misc_feature: MA Experiment 108535 PARAMETER Experiment Name: Zm_Meristem_P Parameter: Tissue Value: Root Meristem vs. Above Root Meristem
  misc_feature: MA Experiment ID: 108536 Result: Up-regulated in Transcription
  misc_feature: MA Experiment 108536 PARAMETER Experiment Name: Zm_Meristem_P Parameter: Age (day) Value: 8
  misc_feature: MA Experiment 108536 PARAMETER Experiment Name: Zm_Meristem_P Parameter: Organism Value: Zea mays
  misc_feature: MA Experiment 108536 PARAMETER Experiment Name: Zm_Meristem_P Parameter: Plant Line Value: 35A19
  misc_feature: MA Experiment 108536 PARAMETER Experiment Name: Zm_Meristem_P Parameter: Tissue Value: Shoot Meristem vs. Above Shoot Meristem
  misc_feature: MA Experiment ID: 108543 Result: Up-regulated in Transcription
  misc_feature: MA Experiment ID: 108597 Result: Up-regulated in Transcription
  misc_feature: MA Experiment 108597 PARAMETER Experiment Name: Zm_100uM_ABA_P Parameter: Age (day) Value: 9
  misc_feature: MA Experiment 108597 PARAMETER Experiment Name: Zm_100uM_ABA_P Parameter: Organism Value: Zea mays
  misc_feature: MA Experiment 108597 PARAMETER Experiment Name: Zm_100uM_ABA_P Parameter: Plant Line Value: 35A19
  misc_feature: MA Experiment 108597 PARAMETER Experiment Name: Zm_100uM_ABA_P Parameter: Timepoint (hr) Value: 24
  misc_feature: MA Experiment 108597 PARAMETER Experiment Name: Zm_100uM_ABA_P Parameter: Tissue Value: Aerial
  misc_feature: MA Experiment 108597 PARAMETER Experiment Name: Zm_100uM_ABA_P Parameter: Treatment Value: 100uM ABA vs. No Treatment
  misc_feature: MA Experiment ID: 20000492 Result: Down-regulated in Transcription
  misc_feature: MA Experiment 20000492 PARAMETER Experiment Name: Zm_Hybrid_Seed_Dev_P Parameter: DAP Value: 12
  misc_feature: MA Experiment 20000492 PARAMETER Experiment Name: Zm_Hybrid_Seed_Dev_P Parameter: Organism Value: Zea mays
  misc_feature: MA Experiment 20000492 PARAMETER Experiment Name: Zm_Hybrid_Seed_Dev_P Parameter: Plant Line Value: 35A19
  misc_feature: MA Experiment 20000492 PARAMETER Experiment Name: Zm_Hybrid_Seed_Dev_P Parameter: Tissue Value: Fert Kernel vs. Unfert Floret
  misc_feature: MA Experiment ID: 20000629 Result: Down-regulated in Transcription
  misc_feature: MA Experiment 20000629 PARAMETER Experiment Name: Zm_Herbicide-Treatments_P Parameter: Timepoint (hr) Value: 12
  misc_feature: MA Experiment 20000629 PARAMETER Experiment Name: Zm_Herbicide-Treatments_P Parameter: Tissue Value: Aerial
  misc_feature: MA Experiment 20000629 PARAMETER Experiment Name: Zm_Herbicide-Treatments_P Parameter: Treatment Value: Trimec vs. No Treatment
aaggccattctttgtggaatttgataataacattttctcgtctagtcatcttcgtcgctcgagtactcgagctgaaaggggaagaccaagctccctttttgaagaaagtcctcgacaaatgttccatagtctcatgggggagagggacagacatagacacataaccatggaaggaattacagaggttttggctgcattggagaggattgaacagcaagcagagctgacctatgatcaattgctaatgctggaggctaatctattttttggcgcctttgcctcctatgatcggcatagagacatgcggatggatattgatgatatgtcctatgaggaattattggccctggaggagagaataggctctgtgagcacagctctttcagaggagcagttcacaaaatgcctcaaaagaagcatatatagtcaggtcgctctagaagtgaacaaatcaaccgttgatgacatgaaatgcagcatctgtcaggaagagtacgcggagggcgaagaggttgggaggctgccatgcgagcaccggtaccatgtgtgctgcataggccagtggcttgggcagaagaactggtgtccagtatgcaaagcgtctgccgtgccttccaagggctgaagcattggggatgctggaaaccccgntccggattacaaaccatccttgcttttgtctacgtacattgttcttttccctatatgcattagatatagatcatgtctagatgtatgacgctagaacagcttgcgatttgggaggaagctaagagagtaatagttagctggttaataatagttcatagctaatatttgctagataactattacttggctacctattagctgtgcctttcacattgtggtacaggacaaatgcttgtcagatcgtgaacaaccttataacttgatgaatggcctaagtc

SEQ ID NO: 11823 - protein, 207 aa, Zea mays subsp. mays
  peptide (1)..(207): Ceres Seq. ID no. 12361957
  misc_feature (158)..(198): Pfam Name: Zinc finger, C3HC4 type (RING finger) Pfam Description: Zinc finger, C3HC4 type (RING finger)
  misc_feature (24)..(202): Homolog of NCBI NO: 30689641 NR Description: RING finger-related protein [Arabidopsis thaliana]
  misc_feature (12)..(206): Homolog of NCBI NO: 10129643 NR Description: Pspzf zinc finger protein-like [Arabidopsis
  misc_feature (12)..(206): Homolog of NCBI NO: 20466428 NR Description: Pspzf zinc finger protein-like [Arabidopsis
  misc_feature (12)..(206): Homolog of NCBI NO: 22326712 NR Description: Pspzf zinc finger protein - like; protein id:
  misc_feature (13)..(205): Homolog of NCBI NO: 7486381 NR Description: hypothetical protein F3L17.20 - Arabidopsis >gi|5262756|emb|CAB45904.1| putative protein [Arabidopsis >gi|7270048|emb|CAB79863.1| putative protein [Arabidopsis
  misc_feature (13)..(205): Homolog of NCBI NO: 18417809 NR Description: putative protein; protein id: At4g31450.1, by cDNA: gi_15983461 [Arabidopsis thaliana] AT4g31450/F3L17_20 [Arabidopsis thaliana]
  misc_feature (59)..(205): Homolog of NCBI NO: 38345496 NR Description: OSJNBa0010D21.9 [Oryza sativa (japonica
  misc_feature (92)..(203): Homolog of NCBI NO: 38344153 NR Description: OSJNBa0041A02.20 [Oryza sativa (japonica
  misc_feature (42)..(203): Homolog of NCBI NO: 15220067 NR Description: hypothetical protein; protein id: At1g45180.1 thaliana] >gi|7767667|gb|AAF69164.1|AC007915_16 F27F5.26
  misc_feature (93)..(206): Homolog of NCBI NO: 40253261 NR Description: DNA binding zinc finger protein-like [Oryza
RPFFVEFDNNIFSSSHLRRSSTRAERGRPSSLFEESPRQMFHSLMGERDRHRHITMEGITEVLAALERIEQQAELTYDQLLMLEANLFFGAFASYDRHRDMRMDIDDMSYEELLALEERIGSVSTALSEEQFTKCLKRSIYSQVALEVNKSTVDDMKCSICQEEYAEGEEVGRLPCEHRYHVCCIGQWLGQKNWCPVCKASAVPSKG

SEQ ID NO: 11824 - protein, 168 aa, Zea mays subsp. mays
  peptide (1)..(168): Ceres Seq. ID no. 12361958
  misc_feature (119)..(159): Pfam Name: Zinc finger, C3HC4 type (RING finger) Pfam Description: Zinc finger, C3HC4 type (RING finger)
  misc_feature (1)..(163): Homolog of NCBI NO: 30689641 NR Description: RING finger-related protein [Arabidopsis thaliana]
  misc_feature (1)..(167): Homolog of NCBI NO: 10129643 NR Description: Pspzf zinc finger protein-like [Arabidopsis
  misc_feature (1)..(167): Homolog of NCBI NO: 22326712 NR Description: Pspzf zinc finger protein - like; protein id:
  misc_feature (1)..(167): Homolog of NCBI NO: 20466428 NR Description: Pspzf zinc finger protein-like [Arabidopsis
  misc_feature (1)..(166): Homolog of NCBI NO: 7486381 NR Description: hypothetical protein F3L17.20 - Arabidopsis >gi|5262756|emb|CAB45904.1| putative protein [Arabidopsis >gi|7270048|emb|CAB79863.1| putative protein [Arabidopsis
  misc_feature (1)..(166): Homolog of NCBI NO: 18417809 NR Description: putative protein; protein id: At4g31450.1, by cDNA: gi_15983461 [Arabidopsis thaliana] AT4g31450/F3L17_20 [Arabidopsis thaliana]
  misc_feature (20)..(166): Homolog of NCBI NO: 38345496 NR Description: OSJNBa0010D21.9 [Oryza sativa (japonica
  misc_feature (53)..(164): Homolog of NCBI NO: 38344153 NR Description: OSJNBa0041A02.20 [Oryza sativa (japonica
  misc_feature (3)..(164): Homolog of NCBI NO: 15220067 NR Description: hypothetical protein; protein id: At1g45180.1 thaliana] >gi|7767667|gb|AAF69164.1|AC007915_16 F27F5.26
  misc_feature (54)..(167): Homolog of NCBI NO: 40253261 NR Description: DNA binding zinc finger protein-like [Oryza
MFHSLMGERDRHRHITMEGITEVLAALERIEQQAELTYDQLLMLEANLFFGAFASYDRHRDMRMDIDDMSYEELLALEERIGSVSTALSEEQFTKCLKRSIYSQVALEVNKSTVDDMKCSICQEEYAEGEEVGRLPCEHRYHVCCIGQWLGQKNWCPVCKASAVPSKG

SEQ ID NO: 11825 - protein, 163 aa, Zea mays subsp. mays
  peptide (1)..(163): Ceres Seq. ID no. 12361959
  misc_feature (114)..(154): Pfam Name: Zinc finger, C3HC4 type (RING finger) Pfam Description: Zinc finger, C3HC4 type (RING finger)
  misc_feature (1)..(158): Homolog of NCBI NO: 30689641 NR Description: RING finger-related protein [Arabidopsis thaliana]
  misc_feature (1)..(162): Homolog of NCBI NO: 10129643 NR Description: Pspzf zinc finger protein-like [Arabidopsis
  misc_feature (1)..(162): Homolog of NCBI NO: 20466428 NR Description: Pspzf zinc finger protein-like [Arabidopsis
  misc_feature (1)..(162): Homolog of NCBI NO: 22326712 NR Description: Pspzf zinc finger protein - like; protein id:
  misc_feature (1)..(161): Homolog of NCBI NO: 7486381 NR Description: hypothetical protein F3L17.20 - Arabidopsis >gi|5262756|emb|CAB45904.1| putative protein [Arabidopsis >gi|7270048|emb|CAB79863.1| putative protein [Arabidopsis
  misc_feature (1)..(161): Homolog of NCBI NO: 18417809 NR Description: putative protein; protein id: At4g31450.1, by cDNA: gi_15983461 [Arabidopsis thaliana] AT4g31450/F3L17_20 [Arabidopsis thaliana]
  misc_feature (15)..(161): Homolog of NCBI NO: 38345496 NR Description: OSJNBa0010D21.9 [Oryza sativa (japonica
  misc_feature (48)..(159): Homolog of NCBI NO: 38344153 NR Description: OSJNBa0041A02.20 [Oryza sativa (japonica
  misc_feature (1)..(159): Homolog of NCBI NO: 15220067 NR Description: hypothetical protein; protein id: At1g45180.1 thaliana] >gi|7767667|gb|AAF69164.1|AC007915_16 F27F5.26
  misc_feature (49)..(162): Homolog of NCBI NO: 40253261 NR Description: DNA binding zinc finger protein-like [Oryza
MGERDRHRHITMEGITEVLAALERIEQQAELTYDQLLMLEANLFFGAFASYDRHRDMRMDIDDMSYEELLALEERIGSVSTALSEEQFTKCLKRSIYSQVALEVNKSTVDDMKCSICQEEYAEGEEVGRLPCEHRYHVCCIGQWLGQKNWCPVCKASAVPSKG

SEQ ID NO: 11826 - DNA, 1577 bp, Zea mays subsp. mays
  misc_feature (1)..(1577): Ceres Seq. ID no. 12413088
  misc_feature: MA Experiment ID: 108535 Result: Up-regulated in Transcription
  misc_feature: MA Experiment 108535 PARAMETER Experiment Name: Zm_Meristem_P Parameter: Age (day) Value: 8
  misc_feature: MA Experiment 108535 PARAMETER Experiment Name: Zm_Meristem_P Parameter: Organism Value: Zea mays
  misc_feature: MA Experiment 108535 PARAMETER Experiment Name: Zm_Meristem_P Parameter: Plant Line Value: 35A19
  misc_feature: MA Experiment 108535 PARAMETER Experiment Name: Zm_Meristem_P Parameter: Tissue Value: Root Meristem vs. Above Root Meristem
  misc_feature: MA Experiment ID: 20000108 Result: Up-regulated in Transcription
  misc_feature: MA Experiment 20000108 PARAMETER Experiment Name: Zm_Root-Tips_P Parameter: Age (day) Value: 12
  misc_feature: MA Experiment 20000108 PARAMETER Experiment Name: Zm_Root-Tips_P Parameter: Organism Value: Zea mays
  misc_feature: MA Experiment 20000108 PARAMETER Experiment Name: Zm_Root-Tips_P Parameter: Tissue Value: Root tips vs. Root mid region    35
  misc_feature: MA Experiment 20000108 PARAMETER Experiment Name: Zm_Root-Tips_P Parameter: Tissue Value: Root tips vs. Root mid region   Sequence Listing-Misc Features (4)
  misc_feature: MA Experiment ID: 20000487 Result: Up-regulated in Transcription
  misc_feature: MA Experiment 20000487 PARAMETER Experiment Name: Zm_50mM_NH4NO3_L_to_H_P Parameter: Organism Value: Zea mays
  misc_feature: MA Experiment 20000487 PARAMETER Experiment Name: Zm_50mM_NH4NO3_L_to_H_P Parameter: Timepoint (hr) Value: 4
  misc_feature: MA Experiment 20000487 PARAMETER Experiment Name: Zm_50mM_NH4NO3_L_to_H_P Parameter: Tissue Value: Leaves
  misc_feature: MA Experiment 20000487 PARAMETER Experiment Name: Zm_50mM_NH4NO3_L_to_H_P Parameter: Treatment Value: 50mM NH4NO3 vs. 100mM Mannitol
  misc_feature: MA Experiment ID: 20000492 Result: Up-regulated in Transcription
  misc_feature: MA Experiment 20000492 PARAMETER Experiment Name: Zm_Hybrid_Seed_Dev_P Parameter: DAP Value: 12
  misc_feature: MA Experiment 20000492 PARAMETER Experiment Name: Zm_Hybrid_Seed_Dev_P Parameter: Organism Value: Zea mays
  misc_feature: MA Experiment 20000492 PARAMETER Experiment Name: Zm_Hybrid_Seed_Dev_P Parameter: Plant Line Value: 35A19
  misc_feature: MA Experiment 20000492 PARAMETER Experiment Name: Zm_Hybrid_Seed_Dev_P Parameter: Tissue Value: Fert Kernel vs. Unfert Floret
attgggggtgttaaaccgcatcgcatcgtcttctagggtttcctcctcccgccgccacttgctgccccacgagcccattcccctcagcccttcaccatctccggcggtcgcagtggcatcagcagctccggctcacgcgcagcaaaggaacgacaatatggcgaccatcgtaaacacgacggaggaggagccgatgctggccgtggtccgcttcaccgctgagctcgcctgggccgacgcgggcccggaagtcgccgaccccgaggtcgcccgcctatgtctcgaggcgcaggagcatatcctcgcggggcggtggctcgacatggcctcccttatgctcgcctccgccgacctcctcctcacctccccgtcgcgcgtctcggacaaagacctggagtgcgttctctccgtcatctgcagcctcgtcaccaaggccggatccgaggaccaggcgctgcagatcaccgaactcatctgcgctaagctcacccagcaacacggtgacaagccagcgctgcgcctcaaagttcttttcagcttgtacaatctgctcccgagcccgtacggcaaggcatttgtttacaagaaggctcttgagctcgccacggctggaaaggctgctgagtacatcatcccatctttcaagaacattgacagttttgtcagtgagtggggaattgacaatttggagaagagggagctataccttgctatcactaccatcctcaaagaccacaagggcatggctaaggagtactttaactttctcaataagtaccttgccacattcaaagggtcagatgatgaatcaggtataattggtgatgcgaaggaagaggctgttgcggcaatcatcgagtttgttaaatcgcctaatctctttcagtgtgatttgctcaacatgccagctgtttcacagcttgagaaggacggaaagtatcagttggtgtatgaactactaaagatattccttactaagaagcttgattcctacttggagtttcaaagtgcaaactctgacttgctgaaagattatggtctcgttcatgaggaatgtgtaaccaaaatgcgcctcatgtctttgctcgatctgagcagccgatgctctggtgaaatcccttattctgcaatcactgttgaactcaggatcaatgatgacgaggtggagcaatggattgtgaaggcaattgcatccaagatattggattgcaaggttgaccagcttaaccagactgtcattgtcagtcggcacacagagaggatctttgggatggaacattggcatgctctgcgcacaaagctcggagcttggaggggaaacattgccagagctatcaacacaatacaagctaacaaagtcaccgaagagggggcacaagggatgcaaggcttggcgatccactgattcggggcgggtcagcgggttcgtgaattgagattatagcgtgggagattagaagggcaaccttttttgtatgagacaagttgtaatggtttatttacttagatcccgtaaccatgcctggttattccttgtatttggtcagacacgccgcgcagtgcaaggcagttgttac

SEQ ID NO: 11827 - protein, 467 aa, Zea mays subsp. mays
  peptide (1)..(467): Ceres Seq. ID no. 12413089
  misc_feature (316)..(414): Pfam Name: PCI domain Pfam Description: PCI domain
  misc_feature (53)..(466): Homolog of NCBI NO: 30685439 NR Description: expressed protein [Arabidopsis thaliana]
  misc_feature (53)..(414): Homolog of NCBI NO: 15242346 NR Description: putative protein; protein id: At5g15610.1, by cDNA: gi_20466755 [Arabidopsis thaliana]
  misc_feature (414)..(466): Homolog of NCBI NO: 15242346 NR Description: putative protein; protein id: At5g15610.1, by cDNA: gi_20466755 [Arabidopsis thaliana]
  misc_feature (53)..(465): Homolog of NCBI NO: 22330807 NR Description: unknown protein; protein id: At3g02200.1, by cDNA: gi_17065291, supported by cDNA: gi_20259989 [Arabidopsis >gi|17065292|gb|AAL32800.1| Unknown protein [Arabidopsis
  misc_feature (120)..(466): Homolog of NCBI NO: 32489165 NR Description: OSJNBa0094O15.2 [Oryza sativa (japonica
  misc_feature (53)..(414): Homolog of NCBI NO: 30678503 NR Description: expressed protein [Arabidopsis thaliana]
  misc_feature (53)..(409): Homolog of NCBI NO: 6041797 NR Description: unknown protein [Arabidopsis thaliana]
  misc_feature (53)..(177): Homolog of NCBI NO: 32489165 NR Description: OSJNBa0094O15.2 [Oryza sativa (japonica
  misc_feature (96)..(448): Homolog of NCBI NO: 3152660 NR Description: GA17 protein [Homo sapiens]
  misc_feature (96)..(448): Homolog of NCBI NO: 23397429 NR Description: dendritic cell protein [Homo sapiens] dJ69B10.1 (GA17 protein) [Homo sapiens]
LGVLNRIASSSRVSSSRRHLLPHEPIPLSPSPSPAVAVASAAPAHAQQRNDNMATIVNTTEEEPMLAVVRFTAELAWADAGPEVADPEVARLCLEAQEHILAGRWLDMASLMLASADLLLTSPSRVSDKDLECVLSVICSLVTKAGSEDQALQITELICAKLTQQHGDKPALRLKVLFSLYNLLPSPYGKAFVYKKALELATAGKAAEYIIPSFKNIDSFVSEWGIDNLEKRELYLAITTILKDHKGMAKEYFNFLNKYLATFKGSDDESGIIGDAKEEAVAAIIEFVKSPNLFQCDLLNMPAVSQLEKDGKYQLVYELLKIFLTKKLDSYLEFQSANSDLLKDYGLVHEECVTKMRLMSLLDLSSRCSGEIPYSAITVELRINDDEVEQWIVKAIASKILDCKVDQLNQTVIVSRHTERIFGMEHWHALRTKLGAWRGNIARAINTIQANKVTEEGAQGMQGLAIH

SEQ ID NO: 11828 - protein, 415 aa, Zea mays subsp. mays
  peptide (1)..(415): Ceres Seq. ID no. 12413090
  misc_feature (264)..(362): Pfam Name: PCI domain Pfam Description: PCI domain
  misc_feature (1)..(414): Homolog of NCBI NO: 30685439 NR Description: expressed protein [Arabidopsis thaliana]
  misc_feature (1)..(362): Homolog of NCBI NO: 15242346 NR Description: putative protein; protein id: At5g15610.1, by cDNA: gi_20466755 [Arabidopsis thaliana]
  misc_feature (362)..(414): Homolog of NCBI NO: 15242346 NR Description: putative protein; protein id: At5g15610.1, by cDNA: gi_20466755 [Arabidopsis thaliana]
  misc_feature (1)..(413): Homolog of NCBI NO: 22330807 NR Description: unknown protein; protein id: At3g02200.1, by cDNA: gi_17065291, supported by cDNA: gi_20259989 [Arabidopsis >gi|17065292|gb|AAL32800.1| Unknown protein [Arabidopsis
  misc_feature (68)..(414): Homolog of NCBI NO: 32489165 NR Description: OSJNBa0094O15.2 [Oryza sativa (japonica
  misc_feature (1)..(362): Homolog of NCBI NO: 30678503 NR Description: expressed protein [Arabidopsis thaliana]
  misc_feature (1)..(357): Homolog of NCBI NO: 6041797 NR Description: unknown protein [Arabidopsis thaliana]
  misc_feature (1)..(125): Homolog of NCBI NO: 32489165 NR Description: OSJNBa0094O15.2 [Oryza sativa (japonica
  misc_feature (44)..(396): Homolog of NCBI NO: 3152660 NR Description: GA17 protein [Homo sapiens]
  misc_feature (44)..(396): Homolog of NCBI NO: 23397429 NR Description: dendritic cell protein [Homo sapiens] dJ69B10.1 (GA17 protein) [Homo sapiens]
MATIVNTTEEEPMLAVVRFTAELAWADAGPEVADPEVARLCLEAQEHILAGRWLDMASLMLASADLLLTSPSRVSDKDLECVLSVICSLVTKAGSEDQALQITELICAKLTQQHGDKPALRLKVLFSLYNLLPSPYGKAFVYKKALELATAGKAAEYIIPSFKNIDSFVSEWGIDNLEKRELYLAITTILKDHKGMAKEYFNFLNKYLATFKGSDDESGIIGDAKEEAVAAIIEFVKSPNLFQCDLLNMPAVSQLEKDGKYQLVYELLKIFLTKKLDSYLEFQSANSDLLKDYGLVHEECVTKMRLMSLLDLSSRCSGEIPYSAITVELRINDDEVEQWIVKAIASKILDCKVDQLNQTVIVSRHTERIFGMEHWHALRTKLGAWRGNIARAINTIQANKVTEEGAQGMQGLAIH

SEQ ID NO: 11829 - protein, 403 aa, Zea mays subsp. mays
  peptide (1)..(403): Ceres Seq. ID no. 12413091
  misc_feature (252)..(350): Pfam Name: PCI domain Pfam Description: PCI domain
  misc_feature (1)..(402): Homolog of NCBI NO: 30685439 NR Description: expressed protein [Arabidopsis thaliana]
  misc_feature (1)..(350): Homolog of NCBI NO: 15242346 NR Description: putative protein; protein id: At5g15610.1, by cDNA: gi_20466755 [Arabidopsis thaliana]
  misc_feature (350)..(402): Homolog of NCBI NO: 15242346 NR Description: putative protein; protein id: At5g15610.1, by cDNA: gi_20466755 [Arabidopsis thaliana]
  misc_feature (1)..(401): Homolog of NCBI NO: 22330807 NR Description: unknown protein; protein id: At3g02200.1, by cDNA: gi_17065291, supported by cDNA: gi_20259989 [Arabidopsis >gi|17065292|gb|AAL32800.1| Unknown protein [Arabidopsis
  misc_feature (56)..(402): Homolog of NCBI NO: 32489165 NR Description: OSJNBa0094O15.2 [Oryza sativa (japonica
  misc_feature (1)..(350): Homolog of NCBI NO: 30678503 NR Description: expressed protein [Arabidopsis thaliana]
  misc_feature (1)..(345): Homolog of NCBI NO: 6041797 NR Description: unknown protein [Arabidopsis thaliana]
  misc_feature (1)..(113): Homolog of NCBI NO: 32489165 NR Description: OSJNBa0094O15.2 [Oryza sativa (japonica
  misc_feature (32)..(384): Homolog of NCBI NO: 3152660 NR Description: GA17 protein [Homo sapiens]
  misc_feature (32)..(384): Homolog of NCBI NO: 23397429 NR Description: dendritic cell protein [Homo sapiens] dJ69B10.1 (GA17 protein) [Homo sapiens]
MLAVVRFTAELAWADAGPEVADPEVARLCLEAQEHILAGRWLDMASLMLASADLLLTSPSRVSDKDLECVLSVICSLVTKAGSEDQALQITELICAKLTQQHGDKPALRLKVLFSLYNLLPSPYGKAFVYKKALELATAGKAAEYIIPSFKNIDSFVSEWGIDNLEKRELYLAITTILKDHKGMAKEYFNFLNKYLATFKGSDDESGIIGDAKEEAVAAIIEFVKSPNLFQCDLLNMPAVSQLEKDGKYQLVYELLKIFLTKKLDSYLEFQSANSDLLKDYGLVHEECVTKMRLMSLLDLSSRCSGEIPYSAITVELRINDDEVEQWIVKAIASKILDCKVDQLNQTVIVSRHTERIFGMEHWHALRTKLGAWRGNIARAINTIQANKVTEEGAQGMQGLAIH

SEQ ID NO: 11830 - DNA, 679 bp, Zea mays subsp. mays
  misc_feature (1)..(679): Ceres Seq. ID no. 12403782
  misc_feature: MA Experiment ID: 108543 Result: Down-regulated in Transcription
aaatcgcaattcgcaattcccagccccattccccgtcgcccggtcggaagcaccaccagctaccagggatgtctggcgaggaggaggagaacgccgcggagctcaagatcggcgaagagttcctcaaggccaagtgcctgatgaactgcgaggtggcgatcatcctggagcacaagtacgagcagatccagcagcacgcgtcgtcggagtcggacccgtcgtcgcaggtgtcgcaggtgttcgagaagtcgctgcagtacgtgaagcgcttcagccgctacaagaaccccgacgccgtgcgccaggtccgcgagacgctgagccgctacggcctcgccgagttcgagctctgcacgctcggcaacctctgccccgacaccagcggcgaggccaccgcgctcgtcccctccctcaagtccggcggcaggttcgtcggcgaccccggggacgagaagatcgagaagatgctcaacgacctctccctcatcaagaagttcgagtagagcgggagcccccagggtccgtatctcccccctcttctcttcttttctcttggagtagcgagcatccagagaggaggggaattcaacatcaagacgatgtactgctaaaattttacttgccttactactatcgttgaggtttgcgtctgcgtattgattagaaccttgtttgatcg

SEQ ID NO: 11831 - protein, 212 aa, Zea mays subsp. mays
  peptide (1)..(212): Ceres Seq. ID no. 12403783
NRNSQFPAPFPVARSEAPPATRDVWRGGGERRGAQDRRRVPQGQVPDELRGGDHPGAQVRADPAARVVGVGPVVAGVAGVREVAAVREALQPLQEPRRRAPGPRDAEPLRPRRVRALHARQPLPRHQRRGHRARPLPQVRRQVRRRPRGREDREDAQRPLPHQEVRVEREPPGSVSPPSSLLFSWSSEHPERRGIQHQDDVLLKFYLPYYYR

SEQ ID NO: 11832 - protein, 166 aa, Zea mays subsp. mays
  peptide (1)..(166): Ceres Seq. ID no. 12403784
  misc_feature (41)..(165): Pfam Name: RNA polymerase Rpb4 Pfam Description: RNA polymerase Rpb4
  misc_feature (23)..(166): Homolog of NCBI NO: 15242547 NR Description: 15.9 kDa subunit of RNA polymerase II protein id: At5g09920.1, supported by cDNA: 21208. [Arabidopsis >gi|2760362|gb|AAB95261.1| 15.9 kDa subunit of RNA polymerase II
  misc_feature (24)..(166): Homolog of NCBI NO: 4758574 NR Description: DNA directed RNA polymerase II polypeptide D; DNA RNA polymerase II 16 kda polypeptide [Homo sapiens] RIKEN cDNA 2610028L19 [Mus musculus] subunit hsRPB4 [Homo
  misc_feature (24)..(166): Homolog of NCBI NO: 34878674 NR Description: similar to RIKEN cDNA 2610028L19 [Rattus
  misc_feature (25)..(166): Homolog of NCBI NO: 17533967 NR Description: RNA polymerase Rpb4 family member [Caenorhabditis >gi|14589816|gb|AAC71124.2| Hypothetical protein F43E2.2
  misc_feature (25)..(166): Homolog of NCBI NO: 39582357 NR Description: Hypothetical protein CBG13151 [Caenorhabditis
  misc_feature (25)..(139): Homolog of NCBI NO: 7503310 NR Description: hypothetical protein F43E2.1 - Caenorhabditis
  misc_feature (28)..(159): Homolog of NCBI NO: 27263229 NR Description: RNA polymerase II accessory factor rpb4 melanogaster] >gi|27263231|gb|AAN88032.1| RNA polymerase II
  misc_feature (53)..(166): Homolog of NCBI NO: 28076931 NR Description: RIKEN cDNA 2610028L19 [Mus musculus]
  misc_feature (39)..(159): Homolog of NCBI NO: 24647897 NR Description: CG31237-PA [Drosophila melanogaster]
IAIRNSQPHSPSPGRKHHQLPGMSGEEEENAAELKIGEEFLKAKCLMNCEVAIILEHKYEQIQQHASSESDPSSQVSQVFEKSLQYVKRFSRYKNPDAVRQVRETLSRYGLAEFELCTLGNLCPDTSGEATALVPSLKSGGRFVGDPGDEKIEKMLNDLSLIKKFE

SEQ ID NO: 11833 - protein, 144 aa, Zea mays subsp. mays
  peptide (1)..(144): Ceres Seq. ID no. 12403785
  misc_feature (19)..(143): Pfam Name: RNA polymerase Rpb4 Pfam Description: RNA polymerase Rpb4
  misc_feature (2)..(144): Homolog of NCBI NO: 4758574 NR Description: DNA directed RNA polymerase II polypeptide D; DNA RNA polymerase II 16 kda polypeptide [Homo sapiens] RIKEN cDNA 2610028L19 [Mus musculus] subunit hsRPB4 [Homo
  misc_feature (2)..(144): Homolog of NCBI NO: 34878674 NR Description: similar to RIKEN cDNA 2610028L19 [Rattus
  misc_feature (3)..(144): Homolog of NCBI NO: 17533967 NR Description: RNA polymerase Rpb4 family member [Caenorhabditis >gi|14589816|gb|AAC71124.2| Hypothetical protein F43E2.2
  misc_feature (3)..(144): Homolog of NCBI NO: 39582357 NR Description: Hypothetical protein CBG13151 [Caenorhabditis
  misc_feature (1)..(144): Homolog of NCBI NO: 15242547 NR Description: 15.9 kDa subunit of RNA polymerase II protein id: At5g09920.1, supported by cDNA: 21208. [Arabidopsis >gi|2760362|gb|AAB95261.1| 15.9 kDa subunit of RNA polymerase II
  misc_feature (3)..(117): Homolog of NCBI NO: 7503310 NR Description: hypothetical protein F43E2.1 - Caenorhabditis
  misc_feature (6)..(137): Homolog of NCBI NO: 27263229 NR Description: RNA polymerase II accessory factor rpb4 melanogaster] >gi|27263231|gb|AAN88032.1| RNA polymerase II
  misc_feature (31)..(144): Homolog of NCBI NO: 28076931 NR Description: RIKEN cDNA 2610028L19 [Mus musculus]
  misc_feature (17)..(137): Homolog of NCBI NO: 24647897 NR Description: CG31237-PA [Drosophila melanogaster]
MSGEEEENAAELKIGEEFLKAKCLMNCEVAIILEHKYEQIQQHASSESDPSSQVSQVFEKSLQYVKRFSRYKNPDAVRQVRETLSRYGLAEFELCTLGNLCPDTSGEATALVPSLKSGGRFVGDPGDEKIEKMLNDLSLIKKFE

SEQ ID NO: 11834 - DNA, 1439 bp, Zea mays subsp. mays
  misc_feature (1)..(1439): Ceres Seq. ID no. 12411752
  misc_feature: MA Experiment ID: 108522 Result: Down-regulated in Transcription
  misc_feature: MA Experiment 108522 PARAMETER Experiment Name: Zm_42deg_Heat_P Parameter: Age (day) Value: 8
  misc_feature: MA Experiment 108522 PARAMETER Experiment Name: Zm_42deg_Heat_P Parameter: Organism Value: Zea mays
  misc_feature: MA Experiment 108522 PARAMETER Experiment Name: Zm_42deg_Heat_P Parameter: Plant Line Value: 35A19
  misc_feature: MA Experiment 108522 PARAMETER Experiment Name: Zm_42deg_Heat_P Parameter: Temperature (deg C) Value: 42 vs. 22
  misc_feature: MA Experiment 108522 PARAMETER Experiment Name: Zm_42deg_Heat_P Parameter: Timepoint (hr) Value: 1
  misc_feature: MA Experiment 108522 PARAMETER Experiment Name: Zm_42deg_Heat_P Parameter: Tissue Value: Aerial
  misc_feature: MA Experiment ID: 108528 Result: Down-regulated in Transcription
  misc_feature: MA Experiment 108528 PARAMETER Experiment Name: Zm_Imbibed_Seeds_P Parameter: Age (day) Value: 5 vs. 2
  misc_feature: MA Experiment 108528 PARAMETER Experiment Name: Zm_Imbibed_Seeds_P Parameter: Organism Value: Zea mays
  misc_feature: MA Experiment 108528 PARAMETER Experiment Name: Zm_Imbibed_Seeds_P Parameter: Plant Line Value: 35A19
  misc_feature: MA Experiment 108528 PARAMETER Experiment Name: Zm_Imbibed_Seeds_P Parameter: Tissue Value: Aerial vs. Embryo
  misc_feature: MA Experiment ID: 108530 Result: Down-regulated in Transcription
  misc_feature: MA Experiment 108530 PARAMETER Experiment Name: Zm_Imbibed_Seeds_P Parameter: Age (day) Value: 6 vs. 2
  misc_feature: MA Experiment 108530 PARAMETER Experiment Name: Zm_Imbibed_Seeds_P Parameter: Organism Value: Zea mays
  misc_feature: MA Experiment 108530 PARAMETER Experiment Name: Zm_Imbibed_Seeds_P Parameter: Plant Line Value: 35A19
  misc_feature: MA Experiment 108530 PARAMETER Experiment Name: Zm_Imbibed_Seeds_P Parameter: Tissue Value: Aerial vs. Embryo
  misc_feature: MA Experiment ID: 108535 Result: Up-regulated in Transcription
  misc_feature: MA Experiment 108535 PARAMETER Experiment Name: Zm_Meristem_P Parameter: Age (day) Value: 8
  misc_feature: MA Experiment 108535 PARAMETER Experiment Name: Zm_Meristem_P Parameter: Organism Value: Zea mays
  misc_feature: MA Experiment 108535 PARAMETER Experiment Name: Zm_Meristem_P Parameter: Plant Line Value: 35A19
  misc_feature: MA Experiment 108535 PARAMETER Experiment Name: Zm_Meristem_P Parameter: Tissue Value: Root Meristem vs. Above Root Meristem
  misc_feature: MA Experiment ID: 108544 Result: Down-regulated in Transcription
  misc_feature: MA Experiment ID: 108547 Result: Down-regulated in Transcription
  misc_feature: MA Experiment 108547 PARAMETER Experiment Name: Zm_Imbibed_Seeds_P Parameter: Age (day) Value: 4 vs. 2
  misc_feature: MA Experiment 108547 PARAMETER Experiment Name: Zm_Imbibed_Seeds_P Parameter: Organism Value: Zea mays
  misc_feature: MA Experiment 108547 PARAMETER Experiment Name: Zm_Imbibed_Seeds_P Parameter: Plant Line Value: 35A19
  misc_feature: MA Experiment 108547 PARAMETER Experiment Name: Zm_Imbibed_Seeds_P Parameter: Tissue Value: Aerial vs. Embryo
  misc_feature: MA Experiment ID: 108687 Result: Down-regulated in Transcription
  misc_feature: MA Experiment 108687 PARAMETER Experiment Name: Zm_Embryos-Flowers__P Parameter: Tissue Value: Embryo vs. Aerial+
  misc_feature: MA Experiment ID: 20000535 Result: Down-regulated in Transcription
  misc_feature: MA Experiment 20000535 PARAMETER Experiment Name: Zm_Hybrid_Seed_Dev_P Parameter: DAP Value: 30 vs. 12
  misc_feature: MA Experiment 20000535 PARAMETER Experiment Name: Zm_Hybrid_Seed_Dev_P Parameter: Organism Value: Zea mays
  misc_feature: MA Experiment 20000535 PARAMETER Experiment Name: Zm_Hybrid_Seed_Dev_P Parameter: Plant Line Value: 35A19
  misc_feature: MA Experiment 20000535 PARAMETER Experiment Name: Zm_Hybrid_Seed_Dev_P Parameter: Tissue Value: Embryo vs. Unfert Floret
  misc_feature: MA Experiment ID: 20000632 Result: Down-regulated in Transcription
  misc_feature: MA Experiment 20000632 PARAMETER Experiment Name: Zm_Herbicide-Treatments_P Parameter: Timepoint (hr) Value: 4
  misc_feature: MA Experiment 20000632 PARAMETER Experiment Name: Zm_Herbicide-Treatments_P Parameter: Tissue Value: Aerial
  misc_feature: MA Experiment 20000632 PARAMETER Experiment Name: Zm_Herbicide-Treatments_P Parameter: Treatment Value: Glean vs. No Treatment
gatcaagaactgctgctcatgtgcgcagcgcgaggctcgagccgccaaagcagggaagcagagagcaagctaataagcaaccgcgtttcccagattccttggcactgcagcagctgcgtccaagcttgctaggtggtggcggcagcagcagcctgcgcctatgtacactgcaatggcagcgcgaccgctgcttcttccccctccggtcctcctcctcctggtggtgctggctgcttcgtcggccgcccatggctatggcgcctacggctacggcgacgctgctgctgagctcagggtcgggttctacaaggactcgtgcccggacgccgaggccgtcgtccgcaggatcgtcgccaaggccgtccgcgaggaccccacggccaacgcgccgctgctcaggctccacttccacgactgcttcgtccggggctgcgacggctccgtgctcgtcaactccaccagggggaacacggcggagaaggacgccaagcccaaccacacgctggacgccttcgacgtcatcgacgacatcaaggaggcgctggagaagcgctgcccggggaccgtctcctgcgccgacatccttgccatcgccgccagggacgccgtctcgctggccaccaaggtggtgaccaagggcggctggagcagggacggcaacctctaccaggtggagaccggcaggcgggacggccgcgtgtccagagccaaggaggcggtcaagaacttgccggactccatggatggcatccgcaagctcatcaggaggttcgcttccaagaacctcagcgtcaaggatctcgctgttctctcaggcgcccacgcgatcggcaaatcgcactgcccgtcgatcgccaagcggctgcgcaacttcacggcgcaccgggacagcgacccgaccctggacgccgcgtacgcggcggagctgaggcggcagtgccggagccgcagggacaacacgacggagctggagatggtgccggggggctccaccgcgttcggcacggcctactacggcctggtcgcggagcggagggcgctcttccactccgacgaggcgctgctcaggaacggggagaccagggcgctcgtctaccgctacagggacgcgccgtcggaggcggcgttccttgcggacttcggagcgtccatgctcaacatgggcagggtgggcgtgctcaccggcgcccagggggagatcaggaagaggtgcgcctttgtcaactagctagcgatgctgtgttgtactttgtaccctctcgccttaattaaaatttaaatgctggagtttcacctagtctcgagagaatcttccatttttactcctacatagatttaggaacgtttctaggtttcatatgattgtgaaacgtttgggctgagctcatctgtaactgtaaactctgatggaatgcgataacgtgttccatattgtgtgc

SEQ ID NO: 11835 - protein, 355 aa, Zea mays subsp. mays
  peptide (1)..(355): Ceres Seq. ID no. 12411753
  misc_feature (60)..(314): Pfam Name: Peroxidase Pfam Description: Peroxidase
  misc_feature (5)..(355): Homolog of NCBI NO: 14702035 NR Description: putative peroxidase [Oryza sativa (japonica
  misc_feature (18)..(355): Homolog of NCBI NO: 27261041 NR Description: putative peroxidase [Oryza sativa (japonica
  misc_feature (40)..(355): Homolog of NCBI NO: 585661 NR Description: Peroxidase 1 precursor >gi|7433074|pir||T03928
  misc_feature (44)..(355): Homolog of NCBI NO: 15232058 NR Description: peroxidase, putative; protein id: At3g01190.1, by cDNA: 37597., supported by cDNA: gi_17065467, supported by gi_20148488 [Arabidopsis thaliana]
  misc_feature (44)..(355): Homolog of NCBI NO: 15242237 NR Description: peroxidase, putative; protein id: At5g15180.1, by cDNA: gi_18176158 [Arabidopsis thaliana] Peroxidase 56 precursor (Atperox P56) (ATP33)
  misc_feature (42)..(355): Homolog of NCBI NO: 1546692 NR Description: peroxidase; peroxidase ATP19a [Arabidopsis
  misc_feature (42)..(355): Homolog of NCBI NO: 15237128 NR Description: peroxidase, putative; protein id: At4g11290.1 thaliana] >gi|26397917|sp|Q9SUT2|PE39_ARATH Peroxidase 39 (Atperox P39) (ATP19a) >gi|7433054|pir||T13020 peroxidase (EC
  misc_feature (42)..(355): Homolog of NCBI NO: 34915480 NR Description: putative peroxidase [Oryza sativa (japonica
  misc_feature (38)..(355): Homolog of NCBI NO: 15220463 NR Description: peroxidase, putative; protein id: At1g05260.1, by cDNA: 114862., supported by cDNA: gi_2738253 [Arabidopsis >gi|25453190|sp|O23044|PER3_ARATH Peroxidase 3 precursor (Atperox
  misc_feature (38)..(355): Homolog of NCBI NO: 21536908 NR Description: putative peroxidase [Arabidopsis thaliana]
MYTAMAARPLLLPPPVLLLLVVLAASSAAHGYGAYGYGDAAAELRVGFYKDSCPDAEAVVRRIVAKAVREDPTANAPLLRLHFHDCFVRGCDGSVLVNSTRGNTAEKDAKPNHTLDAFDVIDDIKEALEKRCPGTVSCADILAIAARDAVSLATKVVTKGGWSRDGNLYQVETGRRDGRVSRAKEAVKNLPDSMDGIRKLIRRFASKNLSVKDLAVLSGAHAIGKSHCPSIAKRLRNFTAHRDSDPTLDAAYAAELRRQCRSRRDNTTELEMVPGGSTAFGTAYYGLVAERRALFHSDEALLRNGETRALVYRYRDAPSEAAFLADFGASMLNMGRVGVLTGAQGEIRKRCAFVN

SEQ ID NO: 11836 - protein, 351 aa, Zea mays subsp. mays
  peptide (1)..(351): Ceres Seq. ID no. 12411754
  misc_feature (56)..(310): Pfam Name: Peroxidase Pfam Description: Peroxidase
  misc_feature (1)..(351): Homolog of NCBI NO: 14702035 NR Description: putative peroxidase [Oryza sativa (japonica
  misc_feature (14)..(351): Homolog of NCBI NO: 27261041 NR Description: putative peroxidase [Oryza sativa (japonica
  misc_feature (36)..(351): Homolog of NCBI NO: 585661 NR Description: Peroxidase 1 precursor >gi|7433074|pir||T03928
  misc_feature (40)..(351): Homolog of NCBI NO: 15232058 NR Description: peroxidase, putative; protein id: At3g01190.1, by cDNA: 37597., supported by cDNA: gi_17065467, supported by gi_20148488 [Arabidopsis thaliana]
  misc_feature (40)..(351): Homolog of NCBI NO: 15242237 NR Description: peroxidase, putative; protein id: At5g15180.1, by cDNA: gi_18176158 [Arabidopsis thaliana] Peroxidase 56 precursor (Atperox P56) (ATP33)
  misc_feature (38)..(351): Homolog of NCBI NO: 1546692 NR Description: peroxidase; peroxidase ATP19a [Arabidopsis
  misc_feature (38)..(351): Homolog of NCBI NO: 15237128 NR Description: peroxidase, putative; protein id: At4g11290.1 thaliana] >gi|26397917|sp|Q9SUT2|PE39_ARATH Peroxidase 39 (Atperox P39) (ATP19a) >gi|7433054|pir||T13020 peroxidase (EC
  misc_feature (38)..(351): Homolog of NCBI NO: 34915480 NR Description: putative peroxidase [Oryza sativa (japonica
  misc_feature (34)..(351): Homolog of NCBI NO: 15220463 NR Description: peroxidase, putative; protein id: At1g05260.1, by cDNA: 114862., supported by cDNA: gi_2738253 [Arabidopsis >gi|25453190|sp|O23044|PER3_ARATH Peroxidase 3 precursor (Atperox
  misc_feature (34)..(351): Homolog of NCBI NO: 21536908 NR Description: putative peroxidase [Arabidopsis thaliana]
MAARPLLLPPPVLLLLVVLAASSAAHGYGAYGYGDAAAELRVGFYKDSCPDAEAVVRRIVAKAVREDPTANAPLLRLHFHDCFVRGCDGSVLVNSTRGNTAEKDAKPNHTLDAFDVIDDIKEALEKRCPGTVSCADILAIAARDAVSLATKVVTKGGWSRDGNLYQVETGRRDGRVSRAKEAVKNLPDSMDGIRKLIRRFASKNLSVKDLAVLSGAHAIGKSHCPSIAKRLRNFTAHRDSDPTLDAAYAAELRRQCRSRRDNTTELEMVPGGSTAFGTAYYGLVAERRALFHSDEALLRNGETRALVYRYRDAPSEAAFLADFGASMLNMGRVGVLTGAQGEIRKRCAFVN

SEQ ID NO: 11837 - protein, 209 aa, Zea mays subsp. mays
  peptide (1)..(209): Ceres Seq. ID no. 12411755
  misc_feature (81)..(209): Pfam Name: Herpes virus major outer envelope glycoprotein (BLLF1) Pfam Description: Herpes virus major outer envelope glycoprotein
  misc_feature (79)..(209): Homolog of NCBI NO: 5821151 NR Description: RNA binding protein [Homo sapiens]
  misc_feature (82)..(209): Homolog of NCBI NO: 28574039 NR Description: Salivary gland secretion 1 CG3047-PA
  misc_feature (82)..(209): Homolog of NCBI NO: 28574039 NR Description: Salivary gland secretion 1 CG3047-PA
  misc_feature (79)..(209): Homolog of NCBI NO: 6634015 NR Description: KIAA0324 protein [Homo sapiens]
  misc_feature (79)..(209): Homolog of NCBI NO: 7512967 NR Description: hypothetical protein KIAA0324 - human (fragment)
  misc_feature (79)..(209): Homolog of NCBI NO: 6649242 NR Description: splicing coactivator subunit SRm300 [Homo sapiens]
  misc_feature (82)..(209): Homolog of NCBI NO: 28574039 NR Description: Salivary gland secretion 1 CG3047-PA
  misc_feature (79)..(209): Homolog of NCBI NO: 19923466 NR Description: splicing coactivator subunit SRm300; RNA binding
  misc_feature (82)..(209): Homolog of NCBI NO: 28574039 NR Description: Salivary gland secretion 1 CG3047-PA
  misc_feature (82)..(209): Homolog of NCBI NO: 28574039 NR Description: Salivary gland secretion 1 CG3047-PA
SRTAAHVRSARLEPPKQGSREQANKQPRFPDSLALQQLRPSLLGGGGSSSLRLCTLQWQRDRCFFPLRSSSSWWCWLLRRPPMAMAPTATATLLLSSGSGSTRTRARTPRPSSAGSSPRPSARTPRPTRRCSGSTSTTASSGAATAPCSSTPPGGTRRRRTPSPTTRWTPSTSSTTSRRRWRSAARGPSPAPTSLPSPPGTPSRWPPRW

SEQ ID NO: 11838 - DNA, 1400 bp, Zea mays subsp. mays
  misc_feature (1)..(1400): Ceres Seq. ID no. 12411748
  misc_feature: MA Experiment ID: 108543 Result: Up-regulated in Transcription
  misc_feature: MA Experiment ID: 108544 Result: Down-regulated in Transcription
  misc_feature: MA Experiment ID: 20000477 Result: Down-regulated in Transcription
  misc_feature: MA Experiment 20000477 PARAMETER Experiment Name: Zm_5mM_SA_P Parameter: Age (day) Value: 10
  misc_feature: MA Experiment 20000477 PARAMETER Experiment Name: Zm_5mM_SA_P Parameter: Organism Value: Zea mays
  misc_feature: MA Experiment 20000477 PARAMETER Experiment Name: Zm_5mM_SA_P Parameter: Plant Line Value: 35A19
  misc_feature: MA Experiment 20000477 PARAMETER Experiment Name: Zm_5mM_SA_P Parameter: Timepoint (hr) Value: 48
  misc_feature: MA Experiment 20000477 PARAMETER Experiment Name: Zm_5mM_SA_P Parameter: Tissue Value: Aerial
  misc_feature: MA Experiment 20000477 PARAMETER Experiment Name: Zm_5mM_SA_P Parameter: Treatment Value: 5mM SA vs. No Treatment
  misc_feature: MA Experiment ID: 20000478 Result: Down-regulated in Transcription
  misc_feature: MA Experiment 20000478 PARAMETER Experiment Name: Zm_5mM_SA_P Parameter: Age (day) Value: 11
  misc_feature: MA Experiment 20000478 PARAMETER Experiment Name: Zm_5mM_SA_P Parameter: Organism Value: Zea mays
  misc_feature: MA Experiment 20000478 PARAMETER Experiment Name: Zm_5mM_SA_P Parameter: Plant Line Value: 35A19
  misc_feature: MA Experiment 20000478 PARAMETER Experiment Name: Zm_5mM_SA_P Parameter: Timepoint (hr) Value: 72
  misc_feature: MA Experiment 20000478 PARAMETER Experiment Name: Zm_5mM_SA_P Parameter: Tissue Value: Aerial
  misc_feature: MA Experiment 20000478 PARAMETER Experiment Name: Zm_5mM_SA_P Parameter: Treatment Value: 5mM SA vs. No Treatment
  misc_feature: MA Experiment ID: 20000479 Result: Down-regulated in Transcription
  misc_feature: MA Experiment 20000479 PARAMETER Experiment Name: Zm_Drought_P Parameter: Age (day) Value: 10
  misc_feature: MA Experiment 20000479 PARAMETER Experiment Name: Zm_Drought_P Parameter: Organism Value: Zea mays
  misc_feature: MA Experiment 20000479 PARAMETER Experiment Name: Zm_Drought_P Parameter: Plant Line Value: 35A19
  misc_feature: MA Experiment 20000479 PARAMETER Experiment Name: Zm_Drought_P Parameter: Timepoint (hr) Value: 48
  misc_feature: MA Experiment 20000479 PARAMETER Experiment Name: Zm_Drought_P Parameter: Tissue Value: Aerial
  misc_feature: MA Experiment 20000479 PARAMETER Experiment Name: Zm_Drought_P Parameter: Treatment Value: Drought vs. No Drought
  misc_feature: MA Experiment ID: 20000480 Result: Down-regulated in Transcription
  misc_feature: MA Experiment 20000480 PARAMETER Experiment Name: Zm_Drought_P Parameter: Age (day) Value: 11
  misc_feature: MA Experiment 20000480 PARAMETER Experiment Name: Zm_Drought_P Parameter: Organism Value: Zea mays
  misc_feature: MA Experiment 20000480 PARAMETER Experiment Name: Zm_Drought_P Parameter: Plant Line Value: 35A19
  misc_feature: MA Experiment 20000480 PARAMETER Experiment Name: Zm_Drought_P Parameter: Timepoint (hr) Value: 72
  misc_feature: MA Experiment 20000480 PARAMETER Experiment Name: Zm_Drought_P Parameter: Tissue Value: Aerial
  misc_feature: MA Experiment 20000480 PARAMETER Experiment Name: Zm_Drought_P Parameter: Treatment Value: Drought vs. No Drought
atcctatgatatgagccaaagctccgaactccatcccagttcttctccacctcgtcctcctcctgctcctgcattctcgcccgtcccccaaattcacctcggccaccctccaccacctcgtcggcgcgggcagcagttcgcctcatcgtcctcccacctgacgacgtcgcggttcgcgctctcgcggcgtgccgcgcacccattcctcgcccacgtctccccgagttccacgccttctgtgccacgcgccacccggagccactgtttgccgcgccctccgcatctctgacctctacatctccatccgcggaagcagaccacctcgaatccttctctttcacgcagtcattgcttgcctccttagcccaactgttggtaccagaggttcatgtttcatcataaggaatgaacagtagtcgacaaatggaactccactacataaacactggatttccatacacaatcaccgagagcttcatggatttctttgagggtctcacttatgctcatgctgactttgctctcacggatggctttcaggatcagggtaatccatactgggcaatgatgcatacaaactcgtacaaatatggatactctggtcctgggaactattacagttatgctgatgtctatgacatagacgattacatgcatagagccaatggtgagcgcagaatatgggataacactacacctgtaaacaatgtcgattctgccaatgttgtcctgcagggtggtgaagctccccgcacaacggcaaatactattaacaaggaatgcatccaacaggtacaccaaagtccaggtagtcctcaggttgtttggcaagataacattgagcctgataatatgacatatgaggaactgttggatttgggtgaggcagttggaacccagagccgtggtctctcccaagaacgcatttcatcgcttcctgtcacgaagtataagtgtggttttttttcaaggaagaaaacatgccgtgagaggtgtgtgatttgccaaatggagtacaggagaggaaatttgcagatgacacttccatgcaagcatgtataccatgccagctgcgtgacaagatggcttggcataaacaaggtatgccctgtttgctttgctgaagttcctggcgaggatcctgaggcaatgagtcaacagttatgaggccactgggaagttgttgcactttgaagctgagtactgcccccaatgaacgcatgatgtttgcttgaaggcagcttattgtccccactttataattgtgtattagcaccgtattaccaaatataggttattgttagatcagatgtatttagtgtttggttcagcgttttgtaacgtaatcaaatcaggaacagagagataccgttacttgcgtttggttgaacgaggcccat

SEQ ID NO: 11839 - protein, 253 aa, Zea mays subsp. mays
  peptide (1)..(253): Ceres Seq. ID no. 12411749
  misc_feature (197)..(237): Pfam Name: Zinc finger, C3HC4 type (RING finger) Pfam Description: Zinc finger, C3HC4 type (RING finger)
  misc_feature (1)..(244): Homolog of NCBI NO: 22331928 NR Description: putative protein; protein id: At3g63530.1 thaliana] >gi|21104275|emb|CAD32249.1| putative protein
  misc_feature (5)..(243): Homolog of NCBI NO: 38567912 NR Description: OSJNBa0088I22.8 [Oryza sativa (japonica
  misc_feature (119)..(241): Homolog of NCBI NO: 18402411 NR Description: expressed protein; protein id: At3g19910.1, by cDNA: 108568., supported by cDNA: gi_15010577, supported by gi_15028362, supported by cDNA: gi_19310706 [Arabidopsis
  misc_feature (119)..(241): Homolog of NCBI NO: 21536693 NR Description: unknown [Arabidopsis thaliana]
  misc_feature (121)..(241): Homolog of NCBI NO: 10334499 NR Description: hypothetical protein [Cicer arietinum]
  misc_feature (2)..(243): Homolog of NCBI NO: 34898016 NR Description: ESTs C26000(C11448),AU082130(C11448) correspond
  misc_feature (142)..(240): Homolog of NCBI NO: 15232746 NR Description: zinc-finger protein-like protein; protein id:
  misc_feature (145)..(237): Homolog of NCBI NO: 11358785 NR Description: RING-H2 finger protein RHG1a [imported] -
  misc_feature (145)..(237): Homolog of NCBI NO: 10129643 NR Description: Pspzf zinc finger protein-like [Arabidopsis
MNSSRQMELHYINTGFPYTITESFMDFFEGLTYAHADFALTDGFQDQGNPYWAMMHTNSYKYGYSGPGNYYSYADVYDIDDYMHRANGERRIWDNTTPVNNVDSANVVLQGGEAPRTTANTINKECIQQVHQSPGSPQVVWQDNIEPDNMTYEELLDLGEAVGTQSRGLSQERISSLPVTKYKCGFFSRKKTCRERCVICQMEYRRGNLQMTLPCKHVYHASCVTRWLGINKVCPVCFAEVPGEDPEAMSQQL

SEQ ID NO: 11840 - protein, 247 aa, Zea mays subsp. mays
  peptide (1)..(247): Ceres Seq. ID no. 12411750
  misc_feature (191)..(231): Pfam Name: Zinc finger, C3HC4 type (RING finger) Pfam Description: Zinc finger, C3HC4 type (RING finger)
  misc_feature (1)..(238): Homolog of NCBI NO: 22331928 NR Description: putative protein; protein id: At3g63530.1 thaliana] >gi|21104275|emb|CAD32249.1| putative protein
  misc_feature (1)..(237): Homolog of NCBI NO: 38567912 NR Description: OSJNBa0088I22.8 [Oryza sativa (japonica
  misc_feature (113)..(235): Homolog of NCBI NO: 18402411 NR Description: expressed protein; protein id: At3g19910.1, by cDNA: 108568., supported by cDNA: gi_15010577, supported by gi_15028362, supported by cDNA: gi_19310706 [Arabidopsis
  misc_feature (113)..(235): Homolog of NCBI NO: 21536693 NR Description: unknown [Arabidopsis thaliana]
  misc_feature (115)..(235): Homolog of NCBI NO: 10334499 NR Description: hypothetical protein [Cicer arietinum]
  misc_feature (1)..(237): Homolog of NCBI NO: 34898016 NR Description: ESTs C26000(C11448),AU082130(C11448) correspond
  misc_feature (136)..(234): Homolog of NCBI NO: 15232746 NR Description: zinc-finger protein-like protein; protein id:
  misc_feature (139)..(231): Homolog of NCBI NO: 11358785 NR Description: RING-H2 finger protein RHG1a [imported] -
  misc_feature (139)..(231): Homolog of NCBI NO: 10129643 NR Description: Pspzf zinc finger protein-like [Arabidopsis
MELHYINTGFPYTITESFMDFFEGLTYAHADFALTDGFQDQGNPYWAMMHTNSYKYGYSGPGNYYSYADVYDIDDYMHRANGERRIWDNTTPVNNVDSANVVLQGGEAPRTTANTINKECIQQVHQSPGSPQVVWQDNIEPDNMTYEELLDLGEAVGTQSRGLSQERISSLPVTKYKCGFFSRKKTCRERCVICQMEYRRGNLQMTLPCKHVYHASCVTRWLGINKVCPVCFAEVPGEDPEAMSQQL

SEQ ID NO: 11841 - protein, 229 aa, Zea mays subsp. mays
  peptide (1)..(229): Ceres Seq. ID no. 12411751
  misc_feature (173)..(213): Pfam Name: Zinc finger, C3HC4 type (RING finger) Pfam Description: Zinc finger, C3HC4 type (RING finger)
  misc_feature (1)..(220): Homolog of NCBI NO: 22331928 NR Description: putative protein; protein id: At3g63530.1 thaliana] >gi|21104275|emb|CAD32249.1| putative protein
  misc_feature (1)..(219): Homolog of NCBI NO: 38567912 NR Description: OSJNBa0088I22.8 [Oryza sativa (japonica
  misc_feature (95)..(217): Homolog of NCBI NO: 18402411 NR Description: expressed protein; protein id: At3g19910.1, by cDNA: 108568., supported by cDNA: gi_15010577, supported by gi_15028362, supported by cDNA: gi_19310706 [Arabidopsis
  misc_feature (95)..(217): Homolog of NCBI NO: 21536693 NR Description: unknown [Arabidopsis thaliana]
  misc_feature (97)..(217): Homolog of NCBI NO: 10334499 NR Description: hypothetical protein [Cicer arietinum]
  misc_feature (1)..(219): Homolog of NCBI NO: 34898016 NR Description: ESTs C26000(C11448),AU082130(C11448) correspond
  misc_feature (118)..(216): Homolog of NCBI NO: 15232746 NR Description: zinc-finger protein-like protein; protein id:
  misc_feature (121)..(213): Homolog of NCBI NO: 11358785 NR Description: RING-H2 finger protein RHG1a [imported] -
  misc_feature (121)..(213): Homolog of NCBI NO: 10129643 NR Description: Pspzf zinc finger protein-like [Arabidopsis
MDFFEGLTYAHADFALTDGFQDQGNPYWAMMHTNSYKYGYSGPGNYYSYADVYDIDDYMHRANGERRIWDNTTPVNNVDSANVVLQGGEAPRTTANTINKECIQQVHQSPGSPQVVWQDNIEPDNMTYEELLDLGEAVGTQSRGLSQERISSLPVTKYKCGFFSRKKTCRERCVICQMEYRRGNLQMTLPCKHVYHASCVTRWLGINKVCPVCFAEVPGEDPEAMSQQL

SEQ ID NO: 11842 - DNA, 1558 bp, Zea mays subsp. mays
  misc_feature (1)..(1558): Ceres Seq. ID no. 12343899
  misc_feature: MA Experiment ID: 108527 Result: Up-regulated in Transcription
  misc_feature: MA Experiment 108527 PARAMETER Experiment Name: Zm_5mM_NO_P Parameter: Age (day) Value: 8
  misc_feature: MA Experiment 108527 PARAMETER Experiment Name: Zm_5mM_NO_P Parameter: Organism Value: Zea mays
  misc_feature: MA Experiment 108527 PARAMETER Experiment Name: Zm_5mM_NO_P Parameter: Plant Line Value: 35A19
  misc_feature: MA Experiment 108527 PARAMETER Experiment Name: Zm_5mM_NO_P Parameter: Timepoint (hr) Value: 6
  misc_feature: MA Experiment 108527 PARAMETER Experiment Name: Zm_5mM_NO_P Parameter: Tissue Value: Aerial
  misc_feature: MA Experiment 108527 PARAMETER Experiment Name: Zm_5mM_NO_P Parameter: Treatment Value: 5mM NO vs. No Treatment
  misc_feature: MA Experiment ID: 108529 Result: Up-regulated in Transcription
  misc_feature: MA Experiment 108529 PARAMETER Experiment Name: Zm_Imbibed_Seeds_P Parameter: Age (day) Value: 5 vs. 2
  misc_feature: MA Experiment 108529 PARAMETER Experiment Name: Zm_Imbibed_Seeds_P Parameter: Organism Value: Zea mays
  misc_feature: MA Experiment 108529 PARAMETER Experiment Name: Zm_Imbibed_Seeds_P Parameter: Plant Line Value: 35A19
  misc_feature: MA Experiment 108529 PARAMETER Experiment Name: Zm_Imbibed_Seeds_P Parameter: Tissue Value: Roots vs. Embryo
  misc_feature: MA Experiment ID: 108535 Result: Down-regulated in Transcription
  misc_feature: MA Experiment 108535 PARAMETER Experiment Name: Zm_Meristem_P Parameter: Age (day) Value: 8
  misc_feature: MA Experiment 108535 PARAMETER Experiment Name: Zm_Meristem_P Parameter: Organism Value: Zea mays
  misc_feature: MA Experiment 108535 PARAMETER Experiment Name: Zm_Meristem_P Parameter: Plant Line Value: 35A19
  misc_feature: MA Experiment 108535 PARAMETER Experiment Name: Zm_Meristem_P Parameter: Tissue Value: Root Meristem vs. Above Root Meristem
  misc_feature: MA Experiment ID: 108559 Result: Up-regulated in Transcription
  misc_feature: MA Experiment 108559 PARAMETER Experiment Name: Zm_5mM_NO_P Parameter: Age (day) Value: 8
  misc_feature: MA Experiment 108559 PARAMETER Experiment Name: Zm_5mM_NO_P Parameter: Organism Value: Zea mays
  misc_feature: MA Experiment 108559 PARAMETER Experiment Name: Zm_5mM_NO_P Parameter: Plant Line Value: 35A19
  misc_feature: MA Experiment 108559 PARAMETER Experiment Name: Zm_5mM_NO_P Parameter: Timepoint (hr) Value: 12
  misc_feature: MA Experiment 108559 PARAMETER Experiment Name: Zm_5mM_NO_P Parameter: Tissue Value: Aerial
  misc_feature: MA Experiment 108559 PARAMETER Experiment Name: Zm_5mM_NO_P Parameter: Treatment Value: 5mM NO vs. No Treatment
aagcaaccggggccgagagagacgagatgaggcctgcctcttctccctccgtcacacgcgagacggagacgcgtctgaagctgaggcctgtataaaagcgctaaagatccctcgctctcttcccccccgtgcgctgtgtcccgtctctgcagcaagttctgtcttcgtccatccatccgtccccgtctcactgcctgtggcccgtgggtagcggttgtcgatcagcttacccacgccggcgtgttctccctgacatggtcggccggatggagcggcagaccgcgtcgtcgtcagcgtcatgctcccccgccgccgccgccaccacctcctcctcgtcctgcggcggcaagaagcggcctgatatcctcaacatgatccggaatgcatcctgtcttaattcgtcgtctgctgataccggcaagggaaggagtaaattgtcgaccaacaaagttacacatggattccacctggtggaaggcaagtccggccatgacatggaagactaccatgtggcagagtacaagtatgtgaagaatcatgagcttggtctctttgccatttttgatggccatttaggagataaggtgccaagttacttgaaagctaacctttttagcaacataatgaaagagcctctcttctggtctagccctcaagaagcaataaagaatgcatactgctctacaaacaagtatattctagaaaataccaaacaacttggaccaggtggttcgacagcagttactgctattgtagttgatggtaaggacatgtggatagcaaatgtaggcgactctagagctgttgtgtgtgaaagaggctctgctaagcagctcactgttgaccatgagccccatgaaactaatgaaagacagaggattgaaaagcacggtggctttgtgacgacatttcctggtgatgttcctcgggtgaatggtcagctcgctgttgctagggcatttggtgaccaaagcctcaaggcccacttgagctctgaacctgatattagtcatgtaccaataaactcaagtatagagtttgtcatacttgccagtgatggattgtggaaggtaatgaagaaccaggaagccgtcgatctcgtgaagtcaatcaaggatccacaggcagcagcgaaacgattgaccactgaagcgttggcaaggaagagcaaggatgatatctcttgcattgtcatccgtttccgctgctgagttaccctctctccacggcactgatatccagtcttcacctcatgatttagattgagacaatttgtctttgccgaattttctgatagaatatgctgtacctatcatagctgtcgacaggcctggaactaattagggtagtgaagacttgagagctggttggtgagtgtgtgcagggtgcctattcgcctgtgcatatgttgactctgcatccgttgatccggacttgggcgactgtcaggaccttagtgcttgtgtgcttgtgatggtaatggacctaatggctaatggtggtaagggaacttgttgataccaaatttggttaatttagttttttttcatggctcgcc

SEQ ID NO: 11843 - protein, 318 aa, Zea mays subsp. mays
  peptide (1)..(318): Ceres Seq. ID no. 12343900
  misc_feature (47)..(309): Pfam Name: Protein phosphatase 2C Pfam Description: Protein phosphatase 2C
  misc_feature (5)..(318): Homolog of NCBI NO: 32488822 NR Description: OSJNBa0085I10.2 [Oryza sativa (japonica
  misc_feature (81)..(318): Homolog of NCBI NO: 38567903 NR Description: OSJNBa0060N03.23 [Oryza sativa (japonica
  misc_feature (36)..(316): Homolog of NCBI NO: 18417190 NR Description: protein phosphatase 2C (PP2C); protein id: supported by cDNA: gi_16604584, supported by cDNA: gi_20258990 thaliana] >gi|16604585|gb|AAL24149.1| putative protein putative
  misc_feature (48)..(318): Homolog of NCBI NO: 23307574 NR Description: putative protein phosphatase 2C homolog [Oryza
  misc_feature (36)..(317): Homolog of NCBI NO: 4336436 NR Description: protein phosphatase type 2C [Lotus japonicus]
  misc_feature (36)..(317): Homolog of NCBI NO: 18399423 NR Description: protein phosphatase 2C (PP2C); protein id: supported by cDNA: 22316., supported by cDNA: gi_15724169, by cDNA: gi_18652944, supported by cDNA: gi_20147398 [Arabidopsis
  misc_feature (48)..(317): Homolog of NCBI NO: 15232538 NR Description: protein phosphatase 2C (PP2C); protein id: [Arabidopsis thaliana] >gi|9294253|dbj|BAB02155.1| protein type 2C [Arabidopsis thaliana] >gi|26450048|dbj|BAC42144.1|
  misc_feature (48)..(317): Homolog of NCBI NO: 21539551 NR Description: putative protein phosphatase type 2C [Arabidopsis
  misc_feature (50)..(317): Homolog of NCBI NO: 18395099 NR Description: protein phosphatase 2C (PP2C), putative; protein At1g22280.1, supported by cDNA: 119977., supported by cDNA:
  misc_feature (36)..(317): Homolog of NCBI NO: 25411985 NR Description: probable protein phosphatase 2C [imported] -
MVGRMERQTASSSASCSPAAAATTSSSSCGGKKRPDILNMIRNASCLNSSSADTGKGRSKLSTNKVTHGFHLVEGKSGHDMEDYHVAEYKYVKNHELGLFAIFDGHLGDKVPSYLKANLFSNIMKEPLFWSSPQEAIKNAYCSTNKYILENTKQLGPGGSTAVTAIVVDGKDMWIANVGDSRAVVCERGSAKQLTVDHEPHETNERQRIEKHGGFVTTFPGDVPRVNGQLAVARAFGDQSLKAHLSSEPDISHVPINSSIEFVILASDGLWKVMKNQEAVDLVKSIKDPQAAAKRLTTEALARKSKDDISCIVIRFRC

SEQ ID NO: 11844 - protein, 314 aa, Zea mays subsp. mays
  peptide (1)..(314): Ceres Seq. ID no. 12343901
  misc_feature (43)..(305): Pfam Name: Protein phosphatase 2C Pfam Description: Protein phosphatase 2C
  misc_feature (1)..(314): Homolog of NCBI NO: 32488822 NR Description: OSJNBa0085I10.2 [Oryza sativa (japonica
  misc_feature (77)..(314): Homolog of NCBI NO: 38567903 NR Description: OSJNBa0060N03.23 [Oryza sativa (japonica
  misc_feature (32)..(312): Homolog of NCBI NO: 18417190 NR Description: protein phosphatase 2C (PP2C); protein id: supported by cDNA: gi_16604584, supported by cDNA: gi_20258990 thaliana] >gi|16604585|gb|AAL24149.1| putative protein putative
  misc_feature (44)..(314): Homolog of NCBI NO: 23307574 NR Description: putative protein phosphatase 2C homolog [Oryza
  misc_feature (32)..(313): Homolog of NCBI NO: 4336436 NR Description: protein phosphatase type 2C [Lotus japonicus]
  misc_feature (32)..(313): Homolog of NCBI NO: 18399423 NR Description: protein phosphatase 2C (PP2C); protein id: supported by cDNA: 22316., supported by cDNA: gi_15724169, by cDNA: gi_18652944, supported by cDNA: gi_20147398 [Arabidopsis
  misc_feature (44)..(313): Homolog of NCBI NO: 15232538 NR Description: protein phosphatase 2C (PP2C); protein id: [Arabidopsis thaliana] >gi|9294253|dbj|BAB02155.1| protein type 2C [Arabidopsis thaliana] >gi|26450048|dbj|BAC42144.1|
  misc_feature (44)..(313): Homolog of NCBI NO: 21539551 NR Description: putative protein phosphatase type 2C [Arabidopsis
  misc_feature (46)..(313): Homolog of NCBI NO: 18395099 NR Description: protein phosphatase 2C (PP2C), putative; protein At1g22280.1, supported by cDNA: 119977., supported by cDNA:
  misc_feature (32)..(313): Homolog of NCBI NO: 25411985 NR Description: probable protein phosphatase 2C [imported] -
MERQTASSSASCSPAAAATTSSSSCGGKKRPDILNMIRNASCLNSSSADTGKGRSKLSTNKVTHGFHLVEGKSGHDMEDYHVAEYKYVKNHELGLFAIFDGHLGDKVPSYLKANLFSNIMKEPLFWSSPQEAIKNAYCSTNKYILENTKQLGPGGSTAVTAIVVDGKDMWIANVGDSRAVVCERGSAKQLTVDHEPHETNERQRIEKHGGFVTTFPGDVPRVNGQLAVARAFGDQSLKAHLSSEPDISHVPINSSIEFVILASDGLWKVMKNQEAVDLVKSIKDPQAAAKRLTTEALARKSKDDISCIVIRFRC

SEQ ID NO: 11845 - protein, 279 aa, Zea mays subsp. mays
  peptide (1)..(279): Ceres Seq. ID no. 12343902
  misc_feature (8)..(270): Pfam Name: Protein phosphatase 2C Pfam Description: Protein phosphatase 2C
  misc_feature (1)..(279): Homolog of NCBI NO: 32488822 NR Description: OSJNBa0085I10.2 [Oryza sativa (japonica
  misc_feature (42)..(279): Homolog of NCBI NO: 38567903 NR Description: OSJNBa0060N03.23 [Oryza sativa (japonica
  misc_feature (1)..(277): Homolog of NCBI NO: 18417190 NR Description: protein phosphatase 2C (PP2C); protein id: supported by cDNA: gi_16604584, supported by cDNA: gi_20258990 thaliana] >gi|16604585|gb|AAL24149.1| putative protein putative
  misc_feature (9)..(279): Homolog of NCBI NO: 23307574 NR Description: putative protein phosphatase 2C homolog [Oryza
  misc_feature (1)..(278): Homolog of NCBI NO: 4336436 NR Description: protein phosphatase type 2C [Lotus japonicus]
  misc_feature (1)..(278): Homolog of NCBI NO: 18399423 NR Description: protein phosphatase 2C (PP2C); protein id: supported by cDNA: 22316., supported by cDNA: gi_15724169, by cDNA: gi_18652944, supported by cDNA: gi_20147398 [Arabidopsis
  misc_feature (9)..(278): Homolog of NCBI NO: 15232538 NR Description: protein phosphatase 2C (PP2C); protein id: [Arabidopsis thaliana] >gi|9294253|dbj|BAB02155.1| protein type 2C [Arabidopsis thaliana] >gi|26450048|dbj|BAC42144.1|
  misc_feature (9)..(278): Homolog of NCBI NO: 21539551 NR Description: putative protein phosphatase type 2C [Arabidopsis
  misc_feature (11)..(278): Homolog of NCBI NO: 18395099 NR Description: protein phosphatase 2C (PP2C), putative; protein At1g22280.1, supported by cDNA: 119977., supported by cDNA:
  misc_feature (1)..(278): Homolog of NCBI NO: 25411985 NR Description: probable protein phosphatase 2C [imported] -
MIRNASCLNSSSADTGKGRSKLSTNKVTHGFHLVEGKSGHDMEDYHVAEYKYVKNHELGLFAIFDGHLGDKVPSYLKANLFSNIMKEPLFWSSPQEAIKNAYCSTNKYILENTKQLGPGGSTAVTAIVVDGKDMWIANVGDSRAVVCERGSAKQLTVDHEPHETNERQRIEKHGGFVTTFPGDVPRVNGQLAVARAFGDQSLKAHLSSEPDISHVPINSSIEFVILASDGLWKVMKNQEAVDLVKSIKDPQAAAKRLTTEALARKSKDDISCIVIRFRC

SEQ ID NO: 11846 - DNA, 1164 bp, Zea mays subsp. mays
  misc_feature (1)..(1164): Ceres Seq. ID no. 12411745
  misc_feature: MA Experiment ID: 108522 Result: Up-regulated in Transcription
  misc_feature: MA Experiment 108522 PARAMETER Experiment Name: Zm_42deg_Heat_P Parameter: Age (day) Value: 8
  misc_feature: MA Experiment 108522 PARAMETER Experiment Name: Zm_42deg_Heat_P Parameter: Organism Value: Zea mays
  misc_feature: MA Experiment 108522 PARAMETER Experiment Name: Zm_42deg_Heat_P Parameter: Plant Line Value: 35A19
  misc_feature: MA Experiment 108522 PARAMETER Experiment Name: Zm_42deg_Heat_P Parameter: Temperature (deg C) Value: 42 vs. 22
  misc_feature: MA Experiment 108522 PARAMETER Experiment Name: Zm_42deg_Heat_P Parameter: Timepoint (hr) Value: 1
  misc_feature: MA Experiment 108522 PARAMETER Experiment Name: Zm_42deg_Heat_P Parameter: Tissue Value: Aerial
  misc_feature: MA Experiment ID: 108523 Result: Up-regulated in Transcription
  misc_feature: MA Experiment 108523 PARAMETER Experiment Name: Zm_42deg_Heat_P Parameter: Age (day) Value: 8
  misc_feature: MA Experiment 108523 PARAMETER Experiment Name: Zm_42deg_Heat_P Parameter: Organism Value: Zea mays
  misc_feature: MA Experiment 108523 PARAMETER Experiment Name: Zm_42deg_Heat_P Parameter: Plant Line Value: 35A19
  misc_feature: MA Experiment 108523 PARAMETER Experiment Name: Zm_42deg_Heat_P Parameter: Temperature (deg C) Value: 42 vs. 22
  misc_feature: MA Experiment 108523 PARAMETER Experiment Name: Zm_42deg_Heat_P Parameter: Timepoint (hr) Value: 6
  misc_feature: MA Experiment 108523 PARAMETER Experiment Name: Zm_42deg_Heat_P Parameter: Tissue Value: Aerial
  misc_feature: MA Experiment ID: 108535 Result: Up-regulated in Transcription
  misc_feature: MA Experiment 108535 PARAMETER Experiment Name: Zm_Meristem_P Parameter: Age (day) Value: 8
  misc_feature: MA Experiment 108535 PARAMETER Experiment Name: Zm_Meristem_P Parameter: Organism Value: Zea mays
  misc_feature: MA Experiment 108535 PARAMETER Experiment Name: Zm_Meristem_P Parameter: Plant Line Value: 35A19
  misc_feature: MA Experiment 108535 PARAMETER Experiment Name: Zm_Meristem_P Parameter: Tissue Value: Root Meristem vs. Above Root Meristem
tcatttcttaaatttaagatttagagagttgtttagagaactattgaagttgctcttagaggcccttgttgtcttgttgaagagttgaagacaccgcagttccggaaacttctgtagcagctgaaatagtacggacgtgtttgaacatgtacaggatctcgaggccacatctgtaaaacgaccacccctcacgcggaagcggagactggaaatcgggagggagaccggtagacgagaccgccggagatggagccgagatctgcaatctacagatccggcgccttccttctcctcgccgccatccttgcggaggtcgtcatccctgcatccgccatcggagacaagtgcgccgcctgcaaggccgttgctgcggagctagagattggaatttcgagtgagaagccgagaaatcacttggacttgcgcaaccgcttaaattctaaaggccagagggaggggaaggtcattgattatagggtcagtgagcttcgggttgtggaacttctggatggcctatgcgataagatgcaagattataccttaaagaagttggaatcaggcgaaaagggatgggttaaagtaacagactggaatagctttcaaactgaaaataaggcagcagcaagagctcactccaaaaaattgtccaccttctgtggaaggctactggaggaaacggaggatgagctctctgagtggatcaaaacaacctccacagaatcagaatatgtaagcaaggccctttgtgaagatattagcaaacactgccgatctacaagtgctaccatccagattgatgatgagctatgacatgccgggggcaggtcgttgtttcgcaaaaagcaaaacaggcgacaggttggaaaatgttaaagaacacagctctagtagtccctgacaccatttagagagacatgcagctgccaattctgattgtttgtgttgcactcatatttcctgtaaacaaaagcttagactgatctgtagagaaagcaactggacatcaatttttgcataccgatgaactacagtttaaaacggccggttgaattatcatgtcaggggctataggaaatttgaatgcttctattctaaggtcttgttgttgagtactgagtatagtttgatgactgcatgttggtcaatgacagcatcaaagattac

SEQ ID NO: 11847 - protein, 187 aa, Zea mays subsp. mays
  peptide (1)..(187): Ceres Seq. ID no. 12411746
  misc_feature (14)..(186): Homolog of NCBI NO: 18400653 NR Description: expressed protein; protein id: At1g42480.1,
  misc_feature (14)..(186): Homolog of NCBI NO: 21593763 NR Description: unknown [Arabidopsis thaliana]
  misc_feature (123)..(186): Homolog of NCBI NO: 25373216 NR Description: unknown protein [imported] - Arabidopsis thaliana
  misc_feature (14)..(73): Homolog of NCBI NO: 25373216 NR Description: unknown protein [imported] - Arabidopsis thaliana
  misc_feature (82)..(117): Homolog of NCBI NO: 25373216 NR Description: unknown protein [imported] - Arabidopsis thaliana
MEPRSAIYRSGAFLLLAAILAEVVIPASAIGDKCAACKAVAAELEIGISSEKPRNHLDLRNRLNSKGQREGKVIDYRVSELRVVELLDGLCDKMQDYTLKKLESGEKGWVKVTDWNSFQTENKAAARAHSKKLSTFCGRLLEETEDELSEWIKTTSTESEYVSKALCEDISKHCRSTSATIQIDDEL

SEQ ID NO: 11848 - protein, 94 aa, Zea mays subsp. mays
  peptide (1)..(94): Ceres Seq. ID no. 12411747
  misc_feature (1)..(93): Homolog of NCBI NO: 18400653 NR Description: expressed protein; protein id: At1g42480.1,
  misc_feature (1)..(93): Homolog of NCBI NO: 21593763 NR Description: unknown [Arabidopsis thaliana]
  misc_feature (30)..(93): Homolog of NCBI NO: 25373216 NR Description: unknown protein [imported] - Arabidopsis thaliana
  misc_feature (1)..(24): Homolog of NCBI NO: 25373216 NR Description: unknown protein [imported] - Arabidopsis thaliana
MQDYTLKKLESGEKGWVKVTDWNSFQTENKAAARAHSKKLSTFCGRLLEETEDELSEWIKTTSTESEYVSKALCEDISKHCRSTSATIQIDDEL

SEQ ID NO: 11849 - DNA, 1085 bp, Zea mays subsp. mays
  misc_feature (1)..(1085): Ceres Seq. ID no. 12340630
  misc_feature: MA Experiment ID: 108687 Result: Down-regulated in Transcription
  misc_feature: MA Experiment 108687 PARAMETER Experiment Name: Zm_Embryos-Flowers__P Parameter: Tissue Value: Embryo vs. Aerial+
  misc_feature: MA Experiment ID: 20000477 Result: Down-regulated in Transcription
  misc_feature: MA Experiment 20000477 PARAMETER Experiment Name: Zm_5mM_SA_P Parameter: Age (day) Value: 10
  misc_feature: MA Experiment 20000477 PARAMETER Experiment Name: Zm_5mM_SA_P Parameter: Organism Value: Zea mays
  misc_feature: MA Experiment 20000477 PARAMETER Experiment Name: Zm_5mM_SA_P Parameter: Plant Line Value: 35A19
  misc_feature: MA Experiment 20000477 PARAMETER Experiment Name: Zm_5mM_SA_P Parameter: Timepoint (hr) Value: 48
  misc_feature: MA Experiment 20000477 PARAMETER Experiment Name: Zm_5mM_SA_P Parameter: Tissue Value: Aerial
  misc_feature: MA Experiment 20000477 PARAMETER Experiment Name: Zm_5mM_SA_P Parameter: Treatment Value: 5mM SA vs. No Treatment
  misc_feature: MA Experiment ID: 20000492 Result: Up-regulated in Transcription
  misc_feature: MA Experiment 20000492 PARAMETER Experiment Name: Zm_Hybrid_Seed_Dev_P Parameter: DAP Value: 12
  misc_feature: MA Experiment 20000492 PARAMETER Experiment Name: Zm_Hybrid_Seed_Dev_P Parameter: Organism Value: Zea mays
  misc_feature: MA Experiment 20000492 PARAMETER Experiment Name: Zm_Hybrid_Seed_Dev_P Parameter: Plant Line Value: 35A19
  misc_feature: MA Experiment 20000492 PARAMETER Experiment Name: Zm_Hybrid_Seed_Dev_P Parameter: Tissue Value: Fert Kernel vs. Unfert Floret
  misc_feature: MA Experiment ID: 20000535 Result: Down-regulated in Transcription
  misc_feature: MA Experiment 20000535 PARAMETER Experiment Name: Zm_Hybrid_Seed_Dev_P Parameter: DAP Value: 30 vs. 12
  misc_feature: MA Experiment 20000535 PARAMETER Experiment Name: Zm_Hybrid_Seed_Dev_P Parameter: Organism Value: Zea mays
  misc_feature: MA Experiment 20000535 PARAMETER Experiment Name: Zm_Hybrid_Seed_Dev_P Parameter: Plant Line Value: 35A19
  misc_feature: MA Experiment 20000535 PARAMETER Experiment Name: Zm_Hybrid_Seed_Dev_P Parameter: Tissue Value: Embryo vs. Unfert Floret
  misc_feature: Phenotype: ROSETTE LEAVES Shape-Lanceolate
  misc_feature: Phenotype: ROSETTE LEAVES Other
  misc_feature: Phenotype: ROSETTE LEAVES Shape-Lanceolate
  misc_feature: Phenotype: SILIQUES Shape-Bulging
  misc_feature: Phenotype: SILIQUES Shape-Clubbed
  misc_feature: Phenotype: FERTILITY Fertility-Reduced
  misc_feature: Phenotype: ROSETTE LEAVES Shape-Lanceolate
  misc_feature: Phenotype: SILIQUES Shape-Bulging
  misc_feature: Phenotype: SILIQUES Shape-Clubbed
  misc_feature: Phenotype: FERTILITY Fertility-Reduced
  misc_feature: Phenotype: ROSETTE LEAVES Shape-Lanceolate
  misc_feature: Phenotype: ROSETTE LEAVES Other
  misc_feature: Phenotype: SILIQUES Shape-Bulging
  misc_feature: Phenotype: SILIQUES Shape-Clubbed
  misc_feature: Phenotype: FERTILITY Fertility-Reduced
  misc_feature: Phenotype: ROSETTE LEAVES Shape-Lanceolate
  misc_feature: Phenotype: ROSETTE LEAVES Other
  misc_feature: Phenotype: SILIQUES Shape-Bulging
  misc_feature: Phenotype: SILIQUES Shape-Clubbed
  misc_feature: Phenotype: FERTILITY Fertility-Reduced
  misc_feature: Phenotype: ROSETTE LEAVES Shape-Lanceolate
  misc_feature: Phenotype: ROSETTE LEAVES Other
  misc_feature: Phenotype: SILIQUES Shape-Bulging
  misc_feature: Phenotype: SILIQUES Shape-Clubbed
  misc_feature: Phenotype: FERTILITY Fertility-Reduced
  misc_feature: Phenotype: ROSETTE LEAVES Shape-Lanceolate
  misc_feature: Phenotype: ROSETTE LEAVES Other
  misc_feature: Phenotype: SILIQUES Shape-Bulging
  misc_feature: Phenotype: SILIQUES Shape-Clubbed
  misc_feature: Phenotype: FERTILITY Fertility-Reduced
  misc_feature: Phenotype: ROSETTE LEAVES Shape-Lanceolate
  misc_feature: Phenotype: ROSETTE LEAVES Other
  misc_feature: Phenotype: SILIQUES Shape-Bulging
  misc_feature: Phenotype: SILIQUES Shape-Clubbed
  misc_feature: Phenotype: FERTILITY Fertility-Reduced
aactctctctctctctctctctatctgtctgcccgtggcgtgctccactgattcttcttcttcttctacctcccggcctcctcccccttcttctttgcctgccttattagtatctcgcctcacaccacacagctagcagacagccagacacgcgctgctttctgatctctccccggatcggaggctcctcccaacataccaccctgccagccgcgccgccacgtccacgccggccggccaccaagcaagcatggatatggtttcgcagtccgagcacctgtgctacgtccgctgcacctactgcaacaccgtgctcgcggttggggttccatgcaagaggctgatggacacggtgactgtcaagtgcggccactgcaacaacctctcctacctcagtccacggccccccatggtgcagccgctctcgccgactgatcaccctttggggccattccagtgtcagggaccctgcaacgactgcaggaggaaccaaccgctgccgctggcttcgccgtcatcaactgagctaagcccgagaatgcccttcgtagtcaagcccccggagaagaaacaccgcctcccatctgcttataatcgcttcatgagggaggagattcagcgcatcaaagctgcgaagccagatatccctcacagggaggccttcagcatggctgccaagaattgggcaaagtgtgacccgcgctgctcgacggctgcctctaccgaaacttctaacagcgctcctgctgagcctagagttgtgcccactccccagttaactgagccacgctttgacctggaggatagggccaaggggcaagtcattgagagcttcgacatcttcaagcatattgagcgcagcatctagaggtcgttcgatgccgctgttgtagcccagtatcgatcgagtaccatcagctatatgtataacctatcccgtatcgccgtcgtcgcctcgcaatcatgcatccccatcctgtacttttacccccgtacgtgttactgttgctgttattctcgttatggttggattgtacgcaccatttaattatgaacagctgctacctatatatataatatttgcc

SEQ ID NO: 11850 - protein, 205 aa, Zea mays subsp. mays
  peptide (1)..(205): Ceres Seq. ID no. 12340631
  misc_feature (6)..(155): Pfam Name: YABBY protein Pfam Description: YABBY protein
  misc_feature (1)..(204): Homolog of NCBI NO: 40362873 NR Description: drooping leaf [Oryza sativa (japonica
  misc_feature (1)..(204): Homolog of NCBI NO: 33333529 NR Description: CRC-related protein [Triticum aestivum]
  misc_feature (1)..(164): Homolog of NCBI NO: 37542843 NR Description: crabs claw [Nicotiana langsdorffii x Nicotiana
  misc_feature (6)..(162): Homolog of NCBI NO: 15222228 NR Description: transcription factor CRC; protein id: supported by cDNA: 9132., supported by cDNA: gi_4836697
  misc_feature (6)..(162): Homolog of NCBI NO: 21617944 NR Description: transcription factor CRC [Arabidopsis thaliana]
  misc_feature (82)..(146): Homolog of NCBI NO: 32330677 NR Description: yabby15 protein [Zea mays]
  misc_feature (5)..(60): Homolog of NCBI NO: 32330677 NR Description: yabby15 protein [Zea mays]
  misc_feature (1)..(146): Homolog of NCBI NO: 27804377 NR Description: MADS-box transcription factor CDM51
  misc_feature (4)..(146): Homolog of NCBI NO: 30683176 NR Description: expressed protein [Arabidopsis thaliana] expressed protein [Arabidopsis thaliana] unknown protein [Arabidopsis thaliana]
  misc_feature (1)..(146): Homolog of NCBI NO: 4928751 NR Description: YABBY2 [Arabidopsis thaliana]
MDMVSQSEHLCYVRCTYCNTVLAVGVPCKRLMDTVTVKCGHCNNLSYLSPRPPMVQPLSPTDHPLGPFQCQGPCNDCRRNQPLPLASPSSTELSPRMPFVVKPPEKKHRLPSAYNRFMREEIQRIKAAKPDIPHREAFSMAAKNWAKCDPRCSTAASTETSNSAPAEPRVVPTPQLTEPRFDLEDRAKGQVIESFDIFKHIERSI

SEQ ID NO: 11851 - protein, 203 aa, Zea mays subsp. mays
  peptide (1)..(203): Ceres Seq. ID no. 12340632
  misc_feature (4)..(153): Pfam Name: YABBY protein Pfam Description: YABBY protein
  misc_feature (1)..(202): Homolog of NCBI NO: 40362873 NR Description: drooping leaf [Oryza sativa (japonica
  misc_feature (1)..(202): Homolog of NCBI NO: 33333529 NR Description: CRC-related protein [Triticum aestivum]
  misc_feature (1)..(162): Homolog of NCBI NO: 37542843 NR Description: crabs claw [Nicotiana langsdorffii x Nicotiana
  misc_feature (4)..(160): Homolog of NCBI NO: 15222228 NR Description: transcription factor CRC; protein id: supported by cDNA: 9132., supported by cDNA: gi_4836697
  misc_feature (4)..(160): Homolog of NCBI NO: 21617944 NR Description: transcription factor CRC [Arabidopsis thaliana]
  misc_feature (80)..(144): Homolog of NCBI NO: 32330677 NR Description: yabby15 protein [Zea mays]
  misc_feature (3)..(58): Homolog of NCBI NO: 32330677 NR Description: yabby15 protein [Zea mays]
  misc_feature (1)..(144): Homolog of NCBI NO: 27804377 NR Description: MADS-box transcription factor CDM51
  misc_feature (2)..(144): Homolog of NCBI NO: 30683176 NR Description: expressed protein [Arabidopsis thaliana] expressed protein [Arabidopsis thaliana] unknown protein [Arabidopsis thaliana]
  misc_feature (1)..(144): Homolog of NCBI NO: 4928751 NR Description: YABBY2 [Arabidopsis thaliana]
MVSQSEHLCYVRCTYCNTVLAVGVPCKRLMDTVTVKCGHCNNLSYLSPRPPMVQPLSPTDHPLGPFQCQGPCNDCRRNQPLPLASPSSTELSPRMPFVVKPPEKKHRLPSAYNRFMREEIQRIKAAKPDIPHREAFSMAAKNWAKCDPRCSTAASTETSNSAPAEPRVVPTPQLTEPRFDLEDRAKGQVIESFDIFKHIERSI

SEQ ID NO: 11852 - protein, 174 aa, Zea mays subsp. mays
  peptide (1)..(174): Ceres Seq. ID no. 12340633
  misc_feature (1)..(124): Pfam Name: YABBY protein Pfam Description: YABBY protein
  misc_feature (1)..(173): Homolog of NCBI NO: 40362873 NR Description: drooping leaf [Oryza sativa (japonica
  misc_feature (1)..(173): Homolog of NCBI NO: 33333529 NR Description: CRC-related protein [Triticum aestivum]
  misc_feature (1)..(133): Homolog of NCBI NO: 37542843 NR Description: crabs claw [Nicotiana langsdorffii x Nicotiana
  misc_feature (1)..(131): Homolog of NCBI NO: 15222228 NR Description: transcription factor CRC; protein id: supported by cDNA: 9132., supported by cDNA: gi_4836697
  misc_feature (1)..(131): Homolog of NCBI NO: 21617944 NR Description: transcription factor CRC [Arabidopsis thaliana]
  misc_feature (51)..(115): Homolog of NCBI NO: 32330677 NR Description: yabby15 protein [Zea mays]
  misc_feature (1)..(29): Homolog of NCBI NO: 32330677 NR Description: yabby15 protein [Zea mays]
  misc_feature (1)..(115): Homolog of NCBI NO: 27804377 NR Description: MADS-box transcription factor CDM51
  misc_feature (1)..(115): Homolog of NCBI NO: 30683176 NR Description: expressed protein [Arabidopsis thaliana] expressed protein [Arabidopsis thaliana] unknown protein [Arabidopsis thaliana]
  misc_feature (1)..(115): Homolog of NCBI NO: 4928751 NR Description: YABBY2 [Arabidopsis thaliana]
MDTVTVKCGHCNNLSYLSPRPPMVQPLSPTDHPLGPFQCQGPCNDCRRNQPLPLASPSSTELSPRMPFVVKPPEKKHRLPSAYNRFMREEIQRIKAAKPDIPHREAFSMAAKNWAKCDPRCSTAASTETSNSAPAEPRVVPTPQLTEPRFDLEDRAKGQVIESFDIFKHIERSI

SEQ ID NO: 11853 - DNA, 832 bp, Zea mays subsp. mays; identical to SEQ ID NO: 4008
  misc_feature (1)..(832): Ceres Seq. ID no. 12366950
  misc_feature: MA Experiment ID: 108528 Result: Down-regulated in Transcription
  misc_feature: MA Experiment 108528 PARAMETER Experiment Name: Zm_Imbibed_Seeds_P Parameter: Age (day) Value: 5 vs. 2
  misc_feature: MA Experiment 108528 PARAMETER Experiment Name: Zm_Imbibed_Seeds_P Parameter: Organism Value: Zea mays
  misc_feature: MA Experiment 108528 PARAMETER Experiment Name: Zm_Imbibed_Seeds_P Parameter: Plant Line Value: 35A19
  misc_feature: MA Experiment 108528 PARAMETER Experiment Name: Zm_Imbibed_Seeds_P Parameter: Tissue Value: Aerial vs. Embryo
  misc_feature: MA Experiment ID: 108530 Result: Down-regulated in Transcription
  misc_feature: MA Experiment 108530 PARAMETER Experiment Name: Zm_Imbibed_Seeds_P Parameter: Age (day) Value: 6 vs. 2
  misc_feature: MA Experiment 108530 PARAMETER Experiment Name: Zm_Imbibed_Seeds_P Parameter: Organism Value: Zea mays
  misc_feature: MA Experiment 108530 PARAMETER Experiment Name: Zm_Imbibed_Seeds_P Parameter: Plant Line Value: 35A19
  misc_feature: MA Experiment 108530 PARAMETER Experiment Name: Zm_Imbibed_Seeds_P Parameter: Tissue Value: Aerial vs. Embryo
  misc_feature: MA Experiment ID: 108535 Result: Up-regulated in Transcription
  misc_feature: MA Experiment 108535 PARAMETER Experiment Name: Zm_Meristem_P Parameter: Age (day) Value: 8
  misc_feature: MA Experiment 108535 PARAMETER Experiment Name: Zm_Meristem_P Parameter: Organism Value: Zea mays
  misc_feature: MA Experiment 108535 PARAMETER Experiment Name: Zm_Meristem_P Parameter: Plant Line Value: 35A19
  misc_feature: MA Experiment 108535 PARAMETER Experiment Name: Zm_Meristem_P Parameter: Tissue Value: Root Meristem vs. Above Root Meristem
  misc_feature: MA Experiment ID: 20000488 Result: Up-regulated in Transcription
  misc_feature: MA Experiment 20000488 PARAMETER Experiment Name: Zm_50mM_NH4NO3_L_to_H_P Parameter: Organism Value: Zea mays
  misc_feature: MA Experiment 20000488 PARAMETER Experiment Name: Zm_50mM_NH4NO3_L_to_H_P Parameter: Timepoint (hr) Value: 8
  misc_feature: MA Experiment 20000488 PARAMETER Experiment Name: Zm_50mM_NH4NO3_L_to_H_P Parameter: Tissue Value: Leaves
  misc_feature: MA Experiment 20000488 PARAMETER Experiment Name: Zm_50mM_NH4NO3_L_to_H_P Parameter: Treatment Value: 50mM NH4NO3 vs. 100mM Mannitol
  misc_feature: MA Experiment ID: 20001606 Result: Up-regulated in Transcription
  misc_feature: MA Experiment 20001606 PARAMETER Experiment Name: Zm_50ppm_KNO3_L-to-H_P Parameter: Age (day) Value: 19
  misc_feature: MA Experiment 20001606 PARAMETER Experiment Name: Zm_50ppm_KNO3_L-to-H_P Parameter: Organism Value: Zea mays
  misc_feature: MA Experiment 20001606 PARAMETER Experiment Name: Zm_50ppm_KNO3_L-to-H_P Parameter: Plant Line Value: 35A19
  misc_feature: MA Experiment 20001606 PARAMETER Experiment Name: Zm_50ppm_KNO3_L-to-H_P Parameter: Timepoint (hr) Value: 8
  misc_feature: MA Experiment 20001606 PARAMETER Experiment Name: Zm_50ppm_KNO3_L-to-H_P Parameter: Tissue Value: Shoots
  misc_feature: MA Experiment 20001606 PARAMETER Experiment Name: Zm_50ppm_KNO3_L-to-H_P Parameter: Treatment Value: 50ppm KNO3 vs. 50ppm KCl
  misc_feature: MA Experiment ID: 20001612 Result: Up-regulated in Transcription
  misc_feature: MA Experiment 20001612 PARAMETER Experiment Name: Zm_50ppm_KNO3_L-to-H_P Parameter: Age (day) Value: 19
  misc_feature: MA Experiment 20001612 PARAMETER Experiment Name: Zm_50ppm_KNO3_L-to-H_P Parameter: Organism Value: Zea mays
  misc_feature: MA Experiment 20001612 PARAMETER Experiment Name: Zm_50ppm_KNO3_L-to-H_P Parameter: Plant Line Value: 35A19
  misc_feature: MA Experiment 20001612 PARAMETER Experiment Name: Zm_50ppm_KNO3_L-to-H_P Parameter: Timepoint (hr) Value: 8
  misc_feature: MA Experiment 20001612 PARAMETER Experiment Name: Zm_50ppm_KNO3_L-to-H_P Parameter: Tissue Value: Roots
  misc_feature: MA Experiment 20001612 PARAMETER Experiment Name: Zm_50ppm_KNO3_L-to-H_P Parameter: Treatment Value: 50ppm KNO3 vs. 50ppm KCl

SEQ ID NO: 11854 - protein, 161 aa, Zea mays subsp. mays; identical to SEQ ID NO: 1700
  peptide (1)..(161): Ceres Seq. ID no. 12366951
  misc_feature (3)..(73): Pfam Name: Ribosomal protein L24e Pfam Description: Ribosomal protein L24e
  misc_feature (3)..(73): Pfam Name: Ribosomal protein L24e Pfam Description: Ribosomal protein L24e
  misc_feature (1)..(161): Homolog of NCBI NO: 1710521 NR Description: 60S RIBOSOMAL PROTEIN L24 >gi|7440778|pir||T06178
  misc_feature (4)..(161): Homolog of NCBI NO: 34900364 NR Description: putative 60S ribosomal protein L24 [Oryza sativa
  misc_feature (1)..(160): Homolog of NCBI NO: 6094040 NR Description: 60S ribosomal protein L24
  misc_feature (1)..(156): Homolog of NCBI NO: 10180025 NR Description: 60S ribosomal protein L24 [Prunus avium]
  misc_feature (1)..(161): Homolog of NCBI NO: 18404176 NR Description: 60S ribosomal protein L24; protein id: supported by cDNA: 14564., supported by cDNA: gi_16604375, by cDNA: gi_18252830 [Arabidopsis thaliana]
  misc_feature (4)..(161): Homolog of NCBI NO: 34900364 NR Description: putative 60S ribosomal protein L24 [Oryza sativa
  misc_feature (1)..(156): Homolog of NCBI NO: 10180025 NR Description: 60S ribosomal protein L24 [Prunus avium]
  misc_feature (10)..(154): Homolog of NCBI NO: 40741063 NR Description: conserved hypothetical protein [Aspergillus
  misc_feature (3)..(150): Homolog of NCBI NO: 19115030 NR Description: 60S ribosomal protein L24 [Schizosaccharomyces
  misc_feature (3)..(150): Homolog of NCBI NO: 19075214 NR Description: 60s ribosomal protein L24 [Schizosaccharomyces
  misc_feature (5)..(161): Homolog of NCBI NO: 25295112 NR Description: 60S ribosomal protein L24 [imported] -
  misc_feature (1)..(161): Homolog of NCBI NO: 15231730 NR Description: 60S ribosomal protein - like; protein id: supported by cDNA: gi_16648705, supported by cDNA: gi_20260561 thaliana] >gi|26454659|sp|P38666|RL24_ARATH 60S ribosomal protein
  misc_feature (1)..(161): Homolog of NCBI NO: 18404176 NR Description: 60S ribosomal protein L24; protein id: supported by cDNA: 14564., supported by cDNA: gi_16604375, by cDNA: gi_18252830 [Arabidopsis thaliana]
  misc_feature (1)..(160): Homolog of NCBI NO: 6094040 NR Description: 60S ribosomal protein L24
  misc_feature (1)..(161): Homolog of NCBI NO: 1710521 NR Description: 60S RIBOSOMAL PROTEIN L24 >gi|7440778|pir||T06178
  misc_feature (1)..(161): Homolog of NCBI NO: 15231730 NR Description: 60S ribosomal protein - like; protein id: supported by cDNA: gi_16648705, supported by cDNA: gi_20260561 thaliana] >gi|26454659|sp|P38666|RL24_ARATH 60S ribosomal protein
  misc_feature (5)..(161): Homolog of NCBI NO: 25295112 NR Description: 60S ribosomal protein L24 [imported] -
  misc_feature (3)..(150): Homolog of NCBI NO: 19075214 NR Description: 60s ribosomal protein L24 [Schizosaccharomyces
  misc_feature (3)..(150): Homolog of NCBI NO: 19115030 NR Description: 60S ribosomal protein L24 [Schizosaccharomyces
  misc_feature (10)..(154): Homolog of NCBI NO: 40741063 NR Description: conserved hypothetical protein [Aspergillus

SEQ ID NO: 11855 - protein, 106 aa, Zea mays subsp. mays; identical to SEQ ID NO: 1701
  peptide (1)..(106): Ceres Seq. ID no. 12366952
  misc_feature (1)..(106): Homolog of NCBI NO: 1710521 NR Description: 60S RIBOSOMAL PROTEIN L24 >gi|7440778|pir||T06178
  misc_feature (1)..(106): Homolog of NCBI NO: 34900364 NR Description: putative 60S ribosomal protein L24 [Oryza sativa
  misc_feature (1)..(105): Homolog of NCBI NO: 6094040 NR Description: 60S ribosomal protein L24
  misc_feature (1)..(101): Homolog of NCBI NO: 10180025 NR Description: 60S ribosomal protein L24 [Prunus avium]
  misc_feature (1)..(106): Homolog of NCBI NO: 18404176 NR Description: 60S ribosomal protein L24; protein id: supported by cDNA: 14564., supported by cDNA: gi_16604375, by cDNA: gi_18252830 [Arabidopsis thaliana]
  misc_feature (1)..(106): Homolog of NCBI NO: 15231730 NR Description: 60S ribosomal protein - like; protein id: supported by cDNA: gi_16648705, supported by cDNA: gi_20260561 thaliana] >gi|26454659|sp|P38666|RL24_ARATH 60S ribosomal protein
  misc_feature (1)..(106): Homolog of NCBI NO: 25295112 NR Description: 60S ribosomal protein L24 [imported] -
  misc_feature (1)..(95): Homolog of NCBI NO: 19075214 NR Description: 60s ribosomal protein L24 [Schizosaccharomyces
  misc_feature (1)..(95): Homolog of NCBI NO: 19115030 NR Description: 60S ribosomal protein L24 [Schizosaccharomyces
  misc_feature (1)..(99): Homolog of NCBI NO: 40741063 NR Description: conserved hypothetical protein [Aspergillus
  misc_feature (1)..(106): Homolog of NCBI NO: 1710521 NR Description: 60S RIBOSOMAL PROTEIN L24 >gi|7440778|pir||T06178
  misc_feature (1)..(106): Homolog of NCBI NO: 34900364 NR Description: putative 60S ribosomal protein L24 [Oryza sativa
  misc_feature (1)..(105): Homolog of NCBI NO: 6094040 NR Description: 60S ribosomal protein L24
  misc_feature (1)..(101): Homolog of NCBI NO: 10180025 NR Description: 60S ribosomal protein L24 [Prunus avium]
  misc_feature (1)..(106): Homolog of NCBI NO: 18404176 NR Description: 60S ribosomal protein L24; protein id: supported by cDNA: 14564., supported by cDNA: gi_16604375, by cDNA: gi_18252830 [Arabidopsis thaliana]
  misc_feature (1)..(106): Homolog of NCBI NO: 15231730 NR Description: 60S ribosomal protein - like; protein id: supported by cDNA: gi_16648705, supported by cDNA: gi_20260561 thaliana] >gi|26454659|sp|P38666|RL24_ARATH 60S ribosomal protein
  misc_feature (1)..(106): Homolog of NCBI NO: 25295112 NR Description: 60S ribosomal protein L24 [imported] -
  misc_feature (1)..(95): Homolog of NCBI NO: 19075214 NR Description: 60s ribosomal protein L24 [Schizosaccharomyces
  misc_feature (1)..(95): Homolog of NCBI NO: 19115030 NR Description: 60S ribosomal protein L24 [Schizosaccharomyces
  misc_feature (1)..(99): Homolog of NCBI NO: 40741063 NR Description: conserved hypothetical protein [Aspergillus

SEQ ID NO: 11856 - DNA, 834 bp, Zea mays subsp. mays
  misc_feature (1)..(834): Ceres Seq. ID no. 12341141
  misc_feature: MA Experiment ID: 108535 Result: Up-regulated in Transcription
  misc_feature: MA Experiment 108535 PARAMETER Experiment Name: Zm_Meristem_P Parameter: Age (day) Value: 8
  misc_feature: MA Experiment 108535 PARAMETER Experiment Name: Zm_Meristem_P Parameter: Organism Value: Zea mays
  misc_feature: MA Experiment 108535 PARAMETER Experiment Name: Zm_Meristem_P Parameter: Plant Line Value: 35A19
  misc_feature: MA Experiment 108535 PARAMETER Experiment Name: Zm_Meristem_P Parameter: Tissue Value: Root Meristem vs. Above Root Meristem
  misc_feature: MA Experiment ID: 20000487 Result: Up-regulated in Transcription
  misc_feature: MA Experiment 20000487 PARAMETER Experiment Name: Zm_50mM_NH4NO3_L_to_H_P Parameter: Organism Value: Zea mays
  misc_feature: MA Experiment 20000487 PARAMETER Experiment Name: Zm_50mM_NH4NO3_L_to_H_P Parameter: Timepoint (hr) Value: 4
  misc_feature: MA Experiment 20000487 PARAMETER Experiment Name: Zm_50mM_NH4NO3_L_to_H_P Parameter: Tissue Value: Leaves
  misc_feature: MA Experiment 20000487 PARAMETER Experiment Name: Zm_50mM_NH4NO3_L_to_H_P Parameter: Treatment Value: 50mM NH4NO3 vs. 100mM Mannitol
  misc_feature: MA Experiment ID: 20000488 Result: Up-regulated in Transcription
  misc_feature: MA Experiment 20000488 PARAMETER Experiment Name: Zm_50mM_NH4NO3_L_to_H_P Parameter: Organism Value: Zea mays
  misc_feature: MA Experiment 20000488 PARAMETER Experiment Name: Zm_50mM_NH4NO3_L_to_H_P Parameter: Timepoint (hr) Value: 8
  misc_feature: MA Experiment 20000488 PARAMETER Experiment Name: Zm_50mM_NH4NO3_L_to_H_P Parameter: Tissue Value: Leaves
  misc_feature: MA Experiment 20000488 PARAMETER Experiment Name: Zm_50mM_NH4NO3_L_to_H_P Parameter: Treatment Value: 50mM NH4NO3 vs. 100mM Mannitol
  misc_feature: MA Experiment ID: 20000492 Result: Up-regulated in Transcription
  misc_feature: MA Experiment 20000492 PARAMETER Experiment Name: Zm_Hybrid_Seed_Dev_P Parameter: DAP Value: 12
  misc_feature: MA Experiment 20000492 PARAMETER Experiment Name: Zm_Hybrid_Seed_Dev_P Parameter: Organism Value: Zea mays
  misc_feature: MA Experiment 20000492 PARAMETER Experiment Name: Zm_Hybrid_Seed_Dev_P Parameter: Plant Line Value: 35A19
  misc_feature: MA Experiment 20000492 PARAMETER Experiment Name: Zm_Hybrid_Seed_Dev_P Parameter: Tissue Value: Fert Kernel vs. Unfert Floret
  misc_feature: MA Experiment ID: 20000626 Result: Up-regulated in Transcription
  misc_feature: MA Experiment 20000626 PARAMETER Experiment Name: Zm_Herbicide-Treatments_P Parameter: Timepoint (hr) Value: 12
  misc_feature: MA Experiment 20000626 PARAMETER Experiment Name: Zm_Herbicide-Treatments_P Parameter: Tissue Value: Aerial
  misc_feature: MA Experiment 20000626 PARAMETER Experiment Name: Zm_Herbicide-Treatments_P Parameter: Treatment Value: Roundup vs. No Treatment
ataacattataacccacgcaactccggggtccgggttctggctcgccaaaccctagccgccgagtgccgcccaccgcccgcccgccctccgccgcgcgtcggacggtgccgagggaagaggcaccatgaggttggagaagtgctggttctgctcctctaccatctaccccggccatggaatccagttcgtccgcaacgacgccaaggtcttccgcttttgccggtcaaagtgccataaaaacttcaagatgaagaggaaccctcgtaaggttaagtggacaaaagcatacaggcatttgcatggcaaggacatgacccaggatacaacctttgagtttgagaggaagaggaacaggcccgagcgctacgaccgcaatttgacggagcagactctgaaggctatcccgcttattgcaaagattaggcatgaccgtatgggaaaacacatctcaaacagacataaacctggtaaacgcaaggagatggaaaaggactccaaggagctggagcaggacatcggcatgctcccgaagaagcttattatcaaccatctcgcggctgagaaaacgaaggtcaaggttgaagttgttcagcagcagacagaagataacgctatggaagagtagtgcgtggcattttgtgtgcttgtgttttcatgtctgatgcagatccttttgtatttgcgtaagaagctatgtagttgatgaaagatgtttatttgatatatatattaatggatggattcgtggactgagtatcagcaagtttgttgttctggaatgtaagcttgctctgcttatgctataattgtcttgtcaggaaagtctcaatcct

SEQ ID NO: 11857 - protein, 166 aa, Zea mays subsp. mays
  peptide (1)..(166): Ceres Seq. ID no. 12341142
  misc_feature (1)..(75): Pfam Name: Ribosomal protein L24e Pfam Description: Ribosomal protein L24e
  misc_feature (1)..(166): Homolog of NCBI NO: 27817966 NR Description: putative 60S ribosomal protein L30 [Oryza sativa
  misc_feature (1)..(166): Homolog of NCBI NO: 15225363 NR Description: 60S ribosomal protein L30; protein id: supported by cDNA: 34564., supported by cDNA: gi_15146219, by cDNA: gi_20466078 [Arabidopsis thaliana]
  misc_feature (1)..(67): Homolog of NCBI NO: 34914662 NR Description: putative ribosomal protein [Oryza sativa cultivar- group)] >gi|13161378|dbj|BAB32973.1| putative ribosomal
  misc_feature (1)..(166): Homolog of NCBI NO: 38083793 NR Description: similar to ribosomal protein L24-like; 60S protein L30 isolog; my024 protein; homolog of yeast ribosomal protein 24 [Mus musculus] >gi|38348464|ref|NP_941011.1| Similar
  misc_feature (1)..(166): Homolog of NCBI NO: 16740902 NR Description: 60S ribosomal protein L30 isolog [Homo sapiens]
  misc_feature (1)..(166): Homolog of NCBI NO: 10047102 NR Description: ribosomal protein L24-like; my024 protein [Homo >gi|6563296|gb|AAF17241.1|AF201949_1 60S ribosomal protein L30 [Homo sapiens] >gi|9294749|gb|AAF86651.1|AF165521_1 ribosomal
  misc_feature (1)..(166): Homolog of NCBI NO: 34864348 NR Description: similar to ribosomal protein L24-like; 60S protein L30 isolog; my024 protein; homolog of yeast ribosomal
  misc_feature (1)..(166): Homolog of NCBI NO: 27769143 NR Description: Similar to chromosome 15 open reading frame 15
  misc_feature (1)..(166): Homolog of NCBI NO: 14250160 NR Description: 60S ribosomal protein L30 isolog [Homo sapiens]
  misc_feature (1)..(166): Homolog of NCBI NO: 15779001 NR Description: 60S ribosomal protein L30 isolog [Homo sapiens]
MRLEKCWFCSSTIYPGHGIQFVRNDAKVFRFCRSKCHKNFKMKRNPRKVKWTKAYRHLHGKDMTQDTTFEFERKRNRPERYDRNLTEQTLKAIPLIAKIRHDRMGKHISNRHKPGKRKEMEKDSKELEQDIGMLPKKLIINHLAAEKTKVKVEVVQQQTEDNAMEE

SEQ ID NO: 11858 - protein, 125 aa, Zea mays subsp. mays
  peptide (1)..(125): Ceres Seq. ID no. 12341143
  misc_feature (1)..(125): Homolog of NCBI NO: 27817966 NR Description: putative 60S ribosomal protein L30 [Oryza sativa
  misc_feature (1)..(125): Homolog of NCBI NO: 15225363 NR Description: 60S ribosomal protein L30; protein id: supported by cDNA: 34564., supported by cDNA: gi_15146219, by cDNA: gi_20466078 [Arabidopsis thaliana]
  misc_feature (1)..(26): Homolog of NCBI NO: 34914662 NR Description: putative ribosomal protein [Oryza sativa cultivar- group)] >gi|13161378|dbj|BAB32973.1| putative ribosomal
  misc_feature (1)..(125): Homolog of NCBI NO: 38083793 NR Description: similar to ribosomal protein L24-like; 60S protein L30 isolog; my024 protein; homolog of yeast ribosomal protein 24 [Mus musculus] >gi|38348464|ref|NP_941011.1| Similar
  misc_feature (1)..(125): Homolog of NCBI NO: 16740902 NR Description: 60S ribosomal protein L30 isolog [Homo sapiens]
  misc_feature (1)..(125): Homolog of NCBI NO: 10047102 NR Description: ribosomal protein L24-like; my024 protein [Homo >gi|6563296|gb|AAF17241.1|AF201949_1 60S ribosomal protein L30 [Homo sapiens] >gi|9294749|gb|AAF86651.1|AF165521_1 ribosomal
  misc_feature (1)..(125): Homolog of NCBI NO: 34864348 NR Description: similar to ribosomal protein L24-like; 60S protein L30 isolog; my024 protein; homolog of yeast ribosomal
  misc_feature (1)..(125): Homolog of NCBI NO: 27769143 NR Description: Similar to chromosome 15 open reading frame 15
  misc_feature (1)..(125): Homolog of NCBI NO: 14250160 NR Description: 60S ribosomal protein L30 isolog [Homo sapiens]
  misc_feature (1)..(125): Homolog of NCBI NO: 15779001 NR Description: 60S ribosomal protein L30 isolog [Homo sapiens]
MKRNPRKVKWTKAYRHLHGKDMTQDTTFEFERKRNRPERYDRNLTEQTLKAIPLIAKIRHDRMGKHISNRHKPGKRKEMEKDSKELEQDIGMLPKKLIINHLAAEKTKVKVEVVQQQTEDNAMEE

SEQ ID NO: 11859 - protein, 104 aa, Zea mays subsp. mays
  peptide (1)..(104): Ceres Seq. ID no. 12341144
  misc_feature (1)..(104): Homolog of NCBI NO: 27817966 NR Description: putative 60S ribosomal protein L30 [Oryza sativa
  misc_feature (1)..(104): Homolog of NCBI NO: 15225363 NR Description: 60S ribosomal protein L30; protein id: supported by cDNA: 34564., supported by cDNA: gi_15146219, by cDNA: gi_20466078 [Arabidopsis thaliana]
  misc_feature (1)..(104): Homolog of NCBI NO: 38083793 NR Description: similar to ribosomal protein L24-like; 60S protein L30 isolog; my024 protein; homolog of yeast ribosomal protein 24 [Mus musculus] >gi|38348464|ref|NP_941011.1| Similar
  misc_feature (1)..(104): Homolog of NCBI NO: 16740902 NR Description: 60S ribosomal protein L30 isolog [Homo sapiens]
  misc_feature (1)..(104): Homolog of NCBI NO: 10047102 NR Description: ribosomal protein L24-like; my024 protein [Homo >gi|6563296|gb|AAF17241.1|AF201949_1 60S ribosomal protein L30 [Homo sapiens] >gi|9294749|gb|AAF86651.1|AF165521_1 ribosomal
  misc_feature (1)..(104): Homolog of NCBI NO: 34864348 NR Description: similar to ribosomal protein L24-like; 60S protein L30 isolog; my024 protein; homolog of yeast ribosomal
  misc_feature (1)..(104): Homolog of NCBI NO: 27769143 NR Description: Similar to chromosome 15 open reading frame 15
  misc_feature (1)..(104): Homolog of NCBI NO: 14250160 NR Description: 60S ribosomal protein L30 isolog [Homo sapiens]
  misc_feature (1)..(104): Homolog of NCBI NO: 15779001 NR Description: 60S ribosomal protein L30 isolog [Homo sapiens]
  misc_feature (1)..(97): Homolog of NCBI NO: 28828084 NR Description: similar to Mus musculus (Mouse). Similar to 60S
MTQDTTFEFERKRNRPERYDRNLTEQTLKAIPLIAKIRHDRMGKHISNRHKPGKRKEMEKDSKELEQDIGMLPKKLIINHLAAEKTKVKVEVVQQQTEDNAMEE

SEQ ID NO: 11860 - DNA, 811 bp, Zea mays subsp. mays
  misc_feature (1)..(811): Ceres Seq. ID no. 12383720
  misc_feature: MA Experiment ID: 108530 Result: Down-regulated in Transcription
  misc_feature: MA Experiment 108530 PARAMETER Experiment Name: Zm_Imbibed_Seeds_P Parameter: Age (day) Value: 6 vs. 2
  misc_feature: MA Experiment 108530 PARAMETER Experiment Name: Zm_Imbibed_Seeds_P Parameter: Organism Value: Zea mays
  misc_feature: MA Experiment 108530 PARAMETER Experiment Name: Zm_Imbibed_Seeds_P Parameter: Plant Line Value: 35A19
  misc_feature: MA Experiment 108530 PARAMETER Experiment Name: Zm_Imbibed_Seeds_P Parameter: Tissue Value: Aerial vs. Embryo
  misc_feature: MA Experiment ID: 108535 Result: Up-regulated in Transcription
  misc_feature: MA Experiment 108535 PARAMETER Experiment Name: Zm_Meristem_P Parameter: Age (day) Value: 8
  misc_feature: MA Experiment 108535 PARAMETER Experiment Name: Zm_Meristem_P Parameter: Organism Value: Zea mays
  misc_feature: MA Experiment 108535 PARAMETER Experiment Name: Zm_Meristem_P Parameter: Plant Line Value: 35A19
  misc_feature: MA Experiment 108535 PARAMETER Experiment Name: Zm_Meristem_P Parameter: Tissue Value: Root Meristem vs. Above Root Meristem
  misc_feature: MA Experiment ID: 108544 Result: Down-regulated in Transcription
  misc_feature: MA Experiment ID: 108556 Result: Down-regulated in Transcription
  misc_feature: MA Experiment 108556 PARAMETER Experiment Name: Zm_Drought_P Parameter: Age (day) Value: 9
  misc_feature: MA Experiment 108556 PARAMETER Experiment Name: Zm_Drought_P Parameter: Organism Value: Zea mays
  misc_feature: MA Experiment 108556 PARAMETER Experiment Name: Zm_Drought_P Parameter: Plant Line Value: 35A19
  misc_feature: MA Experiment 108556 PARAMETER Experiment Name: Zm_Drought_P Parameter: Timepoint (hr) Value: 24
  misc_feature: MA Experiment 108556 PARAMETER Experiment Name: Zm_Drought_P Parameter: Tissue Value: Aerial
  misc_feature: MA Experiment 108556 PARAMETER Experiment Name: Zm_Drought_P Parameter: Treatment Value: Drought vs. No Drought
  misc_feature: MA Experiment ID: 20000488 Result: Up-regulated in Transcription
  misc_feature: MA Experiment 20000488 PARAMETER Experiment Name: Zm_50mM_NH4NO3_L_to_H_P Parameter: Organism Value: Zea mays
  misc_feature: MA Experiment 20000488 PARAMETER Experiment Name: Zm_50mM_NH4NO3_L_to_H_P Parameter: Timepoint (hr) Value: 8
  misc_feature: MA Experiment 20000488 PARAMETER Experiment Name: Zm_50mM_NH4NO3_L_to_H_P Parameter: Tissue Value: Leaves
  misc_feature: MA Experiment 20000488 PARAMETER Experiment Name: Zm_50mM_NH4NO3_L_to_H_P Parameter: Treatment Value: 50mM NH4NO3 vs. 100mM Mannitol
gcacgagaccattacctagaacatcctaatcaaaaaaaaccctaggccgccgccgccagtcctcactcctcaccatttcccaaaccctacccgtacccccgccgccgccgccaccgccatgccgcccaagctcgacccgtcgcaggtggtggaggtcttcgtccgggtgacgggcggcgaggtcggcgcggcgtcgtccctggcgcccaagatcggcccgctcgggctctccccgaagaagatcggcgaggacatcgccaaggagacggccaaggactggaagggcctgcgcgtcaccgtcaagctcaccgtccagaaccgccaggccaaggtctccgtcgtcccctccgccgccgcgctcgtcatcaaggcgctcaaggagcccgagagggaccggaagaaggtcaagaacatcaagcacagcggcaacatcggcctcgacgacgtcgtcgagatcgccaggaccatgaggaacaggtccatggccaaggagttggccggcaccgtcaaggagatcctcggcacctgcgtcagcgtcgggtgcaccgtcgacggcaaggaccccaaggacctgcagcaggagattgatgacggagaggtcgagatcccgtccgcttgaagactagccatccaaggggacttccattggtgctgctgaagtgttgttgttctgcatgctatcgatgtacctttttcaagcaacgcgagccatctattttttttgtctagctatgttagtgatatcttgtgagagacctcaatgttaccatcgtatctttgtctttgttggatggagagatttaagcacctc

SEQ ID NO: 11861 - protein, 166 aa, Zea mays subsp. mays
  peptide (1)..(166): Ceres Seq. ID no. 12383721
  misc_feature (76)..(144): Pfam Name: Ribosomal protein L11, RNA binding domain Pfam Description: Ribosomal protein L11, RNA binding domain
  misc_feature (1)..(166): Homolog of NCBI NO: 38567975 NR Description: OSJNBa0093F12.16 [Oryza sativa (japonica
  misc_feature (1)..(164): Homolog of NCBI NO: 40287508 NR Description: 60S ribosomal protein L12 [Capsicum annuum]
  misc_feature (1)..(164): Homolog of NCBI NO: 15228098 NR Description: 60S ribosomal protein L12; protein id: supported by cDNA: 23523., supported by cDNA: gi_13926285 thaliana] >gi|19884128|sp|P50883|RL12_ARATH 60S ribosomal protein
  misc_feature (1)..(164): Homolog of NCBI NO: 6094002 NR Description: 60S RIBOSOMAL PROTEIN L12
  misc_feature (1)..(164): Homolog of NCBI NO: 15231814 NR Description: 60S RIBOSOMAL PROTEIN L12 -like; protein id:
  misc_feature (1)..(165): Homolog of NCBI NO: 15239409 NR Description: 60S ribosomal protein L12 - like; protein id: supported by cDNA: 42276., supported by cDNA: gi_14517557, by cDNA: gi_18700231 [Arabidopsis thaliana]
  misc_feature (1)..(142): Homolog of NCBI NO: 3986695 NR Description: ribosomal protein L12 [Cichorium intybus]
  misc_feature (1)..(164): Homolog of NCBI NO: 19075397 NR Description: 60s ribosomal protein l12 [Schizosaccharomyces
  misc_feature (10)..(166): Homolog of NCBI NO: 1710485 NR Description: 60S RIBOSOMAL PROTEIN L12 >gi|7440807|pir||T08157
  misc_feature (1)..(166): Homolog of NCBI NO: 27371046 NR Description: Similar to ribosomal protein L12 [Xenopus laevis]
MPPKLDPSQVVEVFVRVTGGEVGAASSLAPKIGPLGLSPKKIGEDIAKETAKDWKGLRVTVKLTVQNRQAKVSVVPSAAALVIKALKEPERDRKKVKNIKHSGNIGLDDVVEIARTMRNRSMAKELAGTVKEILGTCVSVGCTVDGKDPKDLQQEIDDGEVEIPSA

SEQ ID NO: 11862 - DNA, 761 bp, Zea mays subsp. mays
  misc_feature (1)..(761): Ceres Seq. ID no. 12402751
  misc_feature: MA Experiment ID: 108544 Result: Up-regulated in Transcription
  misc_feature: MA Experiment ID: 20000480 Result: Up-regulated in Transcription
  misc_feature: MA Experiment 20000480 PARAMETER Experiment Name: Zm_Drought_P Parameter: Age (day) Value: 11
  misc_feature: MA Experiment 20000480 PARAMETER Experiment Name: Zm_Drought_P Parameter: Organism Value: Zea mays
  misc_feature: MA Experiment 20000480 PARAMETER Experiment Name: Zm_Drought_P Parameter: Plant Line Value: 35A19
  misc_feature: MA Experiment 20000480 PARAMETER Experiment Name: Zm_Drought_P Parameter: Timepoint (hr) Value: 72
  misc_feature: MA Experiment 20000480 PARAMETER Experiment Name: Zm_Drought_P Parameter: Tissue Value: Aerial
  misc_feature: MA Experiment 20000480 PARAMETER Experiment Name: Zm_Drought_P Parameter: Treatment Value: Drought vs. No Drought
aatccgcagtccatacagtgacccccacgaggtcaagaacctgtacgaggagaggaaagaacctggaagagaggagcttgaggagatggcgagcgccgagggcgagaggtgggtgggactggcgacggacttctcgcaggggagccgagaggcgctgcagtgggcggcgaccaacctgctccgcgccggcgaccacctgctgctgctgcacgtcatcaaggagcccgactacgagccagagcgaggccatcctctgggaatccaccggctccccgttgattcccctctcggagttctctgaccctattatcgcgaagaaatatggagcaaaacccgacatggaaaccttggacctcctgaacactacagctacccagaaggaaattatggtggttgtgaaagtcctgtggggagatccgcgtgagaagctctgtcaagttatccatgacaccccgttgagctgcttggttataggaagcaggggccttggcaaactcaagagggtgctcttaggaagtgtcagcgattacgtcgtgaacaacgcaacctgccctgtcaccgttgtcaagtcatcaagcaccgaaggttgatctcatcaccaaaatgcctgaatattgctgttgttataataaaagatggttggcctcatgaagaacatgcactagtttctagctacctgaaacatgttgaaccgggcaatcctattgtaataatagacaaagtgccttatgaagggcatggttatgtaataggtctgttcc

SEQ ID NO: 11863 - protein, 195 aa, Zea mays subsp. mays
  peptide (1)..(195): Ceres Seq. ID no. 12402752
  misc_feature (79)..(189): Pfam Name: Universal stress protein family Pfam Description: Universal stress protein family
  misc_feature (79)..(190): Homolog of NCBI NO: 18401345 NR Description: expressed protein; protein id: At3g17020.1, by cDNA: gi_14190420, supported by cDNA: gi_15215898 [Arabidopsis >gi|7670026|dbj|BAA94980.1|
  misc_feature (79)..(191): Homolog of NCBI NO: 15528707 NR Description: P0583G08.8 [Oryza sativa (japonica
  misc_feature (79)..(190): Homolog of NCBI NO: 20160561 NR Description: P0414E03.3 [Oryza sativa (japonica
  misc_feature (83)..(191): Homolog of NCBI NO: 30678807 NR Description: expressed protein [Arabidopsis thaliana]
  misc_feature (79)..(191): Homolog of NCBI NO: 30693971 NR Description: expressed protein [Arabidopsis thaliana]
  misc_feature (74)..(193): Homolog of NCBI NO: 11602747 NR Description: early nodulin ENOD18 [Vicia faba]
  misc_feature (74)..(193): Homolog of NCBI NO: 11602751 NR Description: ENOD18 protein [Vicia faba]
  misc_feature (74)..(193): Homolog of NCBI NO: 11602749 NR Description: early nodulin ENOD18 [Vicia faba]
  misc_feature (83)..(167): Homolog of NCBI NO: 18396497 NR Description: expressed protein; protein id: At3g03270.1, by cDNA: 118261. [Arabidopsis thaliana] unknown [Arabidopsis thaliana] >gi|27754280|gb|AAO22593.1|
  misc_feature (79)..(130): Homolog of NCBI NO: 21555070 NR Description: unknown [Arabidopsis thaliana]
SAVHTVTPTRSRTCTRRGKNLEERSLRRWRAPRARGGWDWRRTSRRGAERRCSGRRPTCSAPATTCCCCTSSRSPTTSQSEAILWESTGSPLIPLSEFSDPIIAKKYGAKPDMETLDLLNTTATQKEIMVVVKVLWGDPREKLCQVIHDTPLSCLVIGSRGLGKLKRVLLGSVSDYVVNNATCPVTVVKSSSTEG

SEQ ID NO: 11864 - protein, 99 aa, Zea mays subsp. mays
  peptide (1)..(99): Ceres Seq. ID no. 12402753
  misc_feature (29)..(78): Homolog of NCBI NO: 18401345 NR Description: expressed protein; protein id: At3g17020.1, by cDNA: gi_14190420, supported by cDNA: gi_15215898 [Arabidopsis >gi|7670026|dbj|BAA94980.1|
  misc_feature (34)..(82): Homolog of NCBI NO: 15528707 NR Description: P0583G08.8 [Oryza sativa (japonica
  misc_feature (29)..(71): Homolog of NCBI NO: 20160561 NR Description: P0414E03.3 [Oryza sativa (japonica
  misc_feature (36)..(71): Homolog of NCBI NO: 30678807 NR Description: expressed protein [Arabidopsis thaliana]
  misc_feature (35)..(72): Homolog of NCBI NO: 30693971 NR Description: expressed protein [Arabidopsis thaliana]
  misc_feature (35)..(71): Homolog of NCBI NO: 11602747 NR Description: early nodulin ENOD18 [Vicia faba]
  misc_feature (35)..(71): Homolog of NCBI NO: 11602751 NR Description: ENOD18 protein [Vicia faba]
  misc_feature (35)..(71): Homolog of NCBI NO: 11602749 NR Description: early nodulin ENOD18 [Vicia faba]
  misc_feature (36)..(71): Homolog of NCBI NO: 18396497 NR Description: expressed protein; protein id: At3g03270.1, by cDNA: 118261. [Arabidopsis thaliana] unknown [Arabidopsis thaliana] >gi|27754280|gb|AAO22593.1|
  misc_feature (35)..(72): Homolog of NCBI NO: 21555070 NR Description: unknown [Arabidopsis thaliana]
IRSPYSDPHEVKNLYEERKEPGREELEEMASAEGERWVGLATDFSQGSREALQWAATNLLRAGDHLLLLHVIKEPDYEPERGHPLGIHRLPVDSPLGVL

SEQ ID NO: 11865 - DNA, 1669 bp, Zea mays subsp. mays
  misc_feature (1)..(1669): Ceres Seq. ID no. 12411741
  misc_feature: MA Experiment ID: 108536 Result: Up-regulated in Transcription
  misc_feature: MA Experiment 108536 PARAMETER Experiment Name: Zm_Meristem_P Parameter: Age (day) Value: 8
  misc_feature: MA Experiment 108536 PARAMETER Experiment Name: Zm_Meristem_P Parameter: Organism Value: Zea mays
  misc_feature: MA Experiment 108536 PARAMETER Experiment Name: Zm_Meristem_P Parameter: Plant Line Value: 35A19
  misc_feature: MA Experiment 108536 PARAMETER Experiment Name: Zm_Meristem_P Parameter: Tissue Value: Shoot Meristem vs. Above Shoot Meristem
  misc_feature: MA Experiment ID: 108543 Result: Up-regulated in Transcription
agtagtcactgcctattcttggccatacggcttcccccacaccccaacacaaacaagagaaaaaacaaaaactagacgaaagagggaagaaaccaagaaattggcgaatccctggcgctccccactttcaactcccatccgcttgccgttgccgcgtttgtttatcgagccaatttgatcagggcgccacaccgaaccctagttcttgatttaatcacgggttatgtggtcatgccggccgggtcaccccgttcttcttctcttccacgagttcaggaggtagagtgagagagaaaatggaacgacaggggatggaaggcaacaatcttctgcattttcttgataccccgagcgcccattacagaaggacatgcgacggatttgaggcccaacacggcggcgatgaacactctgagacatcagatactgatccggctaatgcaagggaaatgctggaatatttgttgaaccaaccagcaaacaaaatctgtgcagactgtggctctccagatccaaaatgggtggccctgccttttggcacattcatctgcattaagtgctctggaactcatagaagtcttggtgtgcacatatcaaaggtgatttcagtgaatctggatgagtggacagatgatgaagtcaactgtttagctgaatcaggcggaaattctgttgtgaactcaagatatgaagcctttttacccgaaaacaaaaagctaaaacaagattgctcaacggaggagcgtaatgattttatcaggaaaaaataccagtttcaacagtttgtgtgtgatccacaattttcatgccctttaccacttaacagaaagcatgcaccaccagataaaaatcaccagcagcataatagcagcaagtatggttttggccatacttttaggaatagctggagaaaaaaggattcagatagcaaaagcctaaagaaaatgtcggatgtgggaatgatagaatttgttggattagtaaaggtcaatatcgtaaaaggcacagatttagctgttcgtgatgtgatgtcgagcgatccgtatgtcttgattcatctagggcaccagtccatgaaaacaaaggtgataaagaacacactgaatcctatctggaatgaaagactaatgctttcgatccctgacccaattccgcctcttaagctgcaagtatttgacaaggacacattcagctccgatgaccggatgggggaggccgaggtggacatccggccgctgattgcagcaacgaaggagcacgagaactcgaccatcaccgaatcgacagaactctacagatggtcagccagcgaagacagcaacggtgtgctcgccaaggacagcgtcatctctgttgcgagtggaaaggtcaagcaggagatcacactcaggctccagaatgtcgagcgcggtgaggtcgagatcgagatcgagtgtgtgccgctcagccagtagcagtcccatcgtgagcaggactggaagcagaaagagggaaggaatacatcatgctccattgttgtgacaaggacgctgctttgcaatgcagaaagacctcagcttcacttgtttgattgctccatgcctgtaattcgcgtgcatgtgtgagatgtgtaatgtgttgtacggtagataggcaaagggaaattatctacttatattactttgatgtt

SEQ ID NO: 11866 - protein, 385 aa, Zea mays subsp. mays
  peptide (1)..(385): Ceres Seq. ID no. 12411742
  misc_feature (51)..(171): Pfam Name: Putative GTPase activating protein for Arf Pfam Description: Putative GTPase activating protein for Arf
  misc_feature (6)..(385): Homolog of NCBI NO: 19386828 NR Description: putative zinc finger and C2 domain protein [Oryza
  misc_feature (37)..(385): Homolog of NCBI NO: 6648206 NR Description: putative GTPase activating protein [Arabidopsis
  misc_feature (37)..(385): Homolog of NCBI NO: 30680493 NR Description: zinc finger and C2 domain protein, putative
  misc_feature (46)..(385): Homolog of NCBI NO: 18412932 NR Description: putative protein; protein id: At4g05330.1, by cDNA: 116234. [Arabidopsis thaliana]
  misc_feature (46)..(385): Homolog of NCBI NO: 21594052 NR Description: putative GTPase activating protein [Arabidopsis
  misc_feature (46)..(385): Homolog of NCBI NO: 18415638 NR Description: putative protein; protein id: At4g21160.1, by cDNA: 6665., supported by cDNA: gi_17064945, supported by gi_9957237 [Arabidopsis thaliana]
  misc_feature (46)..(385): Homolog of NCBI NO: 25407332 NR Description: hypothetical protein AT4g05330 [imported] - thaliana >gi|7267293|emb|CAB81075.1| putative protein
  misc_feature (81)..(385): Homolog of NCBI NO: 7486586 NR Description: hypothetical protein F7J7.100 - Arabidopsis >gi|2911073|emb|CAA17535.1| putative protein [Arabidopsis >gi|7268913|emb|CAB79116.1| putative protein [Arabidopsis
  misc_feature (46)..(78): Homolog of NCBI NO: 7486586 NR Description: hypothetical protein F7J7.100 - Arabidopsis >gi|2911073|emb|CAA17535.1| putative protein [Arabidopsis >gi|7268913|emb|CAB79116.1| putative protein [Arabidopsis
  misc_feature (215)..(379): Homolog of NCBI NO: 15223248 NR Description: unknown protein; protein id: At1g70800.1
MERQGMEGNNLLHFLDTPSAHYRRTCDGFEAQHGGDEHSETSDTDPANAREMLEYLLNQPANKICADCGSPDPKWVALPFGTFICIKCSGTHRSLGVHISKVISVNLDEWTDDEVNCLAESGGNSVVNSRYEAFLPENKKLKQDCSTEERNDFIRKKYQFQQFVCDPQFSCPLPLNRKHAPPDKNHQQHNSSKYGFGHTFRNSWRKKDSDSKSLKKMSDVGMIEFVGLVKVNIVKGTDLAVRDVMSSDPYVLIHLGHQSMKTKVIKNTLNPIWNERLMLSIPDPIPPLKLQVFDKDTFSSDDRMGEAEVDIRPLIAATKEHENSTITESTELYRWSASEDSNGVLAKDSVISVASGKVKQEITLRLQNVERGEVEIEIECVPLSQ

SEQ ID NO: 11867 - protein, 380 aa, Zea mays subsp. mays
  peptide (1)..(380): Ceres Seq. ID no. 12411743
  misc_feature (46)..(166): Pfam Name: Putative GTPase activating protein for Arf Pfam Description: Putative GTPase activating protein for Arf
  misc_feature (1)..(380): Homolog of NCBI NO: 19386828 NR Description: putative zinc finger and C2 domain protein [Oryza
  misc_feature (32)..(380): Homolog of NCBI NO: 6648206 NR Description: putative GTPase activating protein [Arabidopsis
  misc_feature (32)..(380): Homolog of NCBI NO: 30680493 NR Description: zinc finger and C2 domain protein, putative
  misc_feature (41)..(380): Homolog of NCBI NO: 18412932 NR Description: putative protein; protein id: At4g05330.1, by cDNA: 116234. [Arabidopsis thaliana]
  misc_feature (41)..(380): Homolog of NCBI NO: 18415638 NR Description: putative protein; protein id: At4g21160.1, by cDNA: 6665., supported by cDNA: gi_17064945, supported by gi_9957237 [Arabidopsis thaliana]
  misc_feature (41)..(380): Homolog of NCBI NO: 21594052 NR Description: putative GTPase activating protein [Arabidopsis
  misc_feature (41)..(380): Homolog of NCBI NO: 25407332 NR Description: hypothetical protein AT4g05330 [imported] - thaliana >gi|7267293|emb|CAB81075.1| putative protein
  misc_feature (76)..(380): Homolog of NCBI NO: 7486586 NR Description: hypothetical protein F7J7.100 - Arabidopsis >gi|2911073|emb|CAA17535.1| putative protein [Arabidopsis >gi|7268913|emb|CAB79116.1| putative protein [Arabidopsis
  misc_feature (41)..(73): Homolog of NCBI NO: 7486586 NR Description: hypothetical protein F7J7.100 - Arabidopsis >gi|2911073|emb|CAA17535.1| putative protein [Arabidopsis >gi|7268913|emb|CAB79116.1| putative protein [Arabidopsis
  misc_feature (210)..(374): Homolog of NCBI NO: 15223248 NR Description: unknown protein; protein id: At1g70800.1
MEGNNLLHFLDTPSAHYRRTCDGFEAQHGGDEHSETSDTDPANAREMLEYLLNQPANKICADCGSPDPKWVALPFGTFICIKCSGTHRSLGVHISKVISVNLDEWTDDEVNCLAESGGNSVVNSRYEAFLPENKKLKQDCSTEERNDFIRKKYQFQQFVCDPQFSCPLPLNRKHAPPDKNHQQHNSSKYGFGHTFRNSWRKKDSDSKSLKKMSDVGMIEFVGLVKVNIVKGTDLAVRDVMSSDPYVLIHLGHQSMKTKVIKNTLNPIWNERLMLSIPDPIPPLKLQVFDKDTFSSDDRMGEAEVDIRPLIAATKEHENSTITESTELYRWSASEDSNGVLAKDSVISVASGKVKQEITLRLQNVERGEVEIEIECVPLSQ

SEQ ID NO: 11868 - protein, 334 aa, Zea mays subsp. mays
  peptide (1)..(334): Ceres Seq. ID no. 12411744
  misc_feature (1)..(120): Pfam Name: Putative GTPase activating protein for Arf Pfam Description: Putative GTPase activating protein for Arf
  misc_feature (1)..(334): Homolog of NCBI NO: 19386828 NR Description: putative zinc finger and C2 domain protein [Oryza
  misc_feature (1)..(334): Homolog of NCBI NO: 6648206 NR Description: putative GTPase activating protein [Arabidopsis
  misc_feature (1)..(334): Homolog of NCBI NO: 30680493 NR Description: zinc finger and C2 domain protein, putative
  misc_feature (1)..(334): Homolog of NCBI NO: 18412932 NR Description: putative protein; protein id: At4g05330.1, by cDNA: 116234. [Arabidopsis thaliana]
  misc_feature (1)..(334): Homolog of NCBI NO: 18415638 NR Description: putative protein; protein id: At4g21160.1, by cDNA: 6665., supported by cDNA: gi_17064945, supported by gi_9957237 [Arabidopsis thaliana]
  misc_feature (1)..(334): Homolog of NCBI NO: 21594052 NR Description: putative GTPase activating protein [Arabidopsis
  misc_feature (1)..(334): Homolog of NCBI NO: 25407332 NR Description: hypothetical protein AT4g05330 [imported] - thaliana >gi|7267293|emb|CAB81075.1| putative protein
  misc_feature (30)..(334): Homolog of NCBI NO: 7486586 NR Description: hypothetical protein F7J7.100 - Arabidopsis >gi|2911073|emb|CAA17535.1| putative protein [Arabidopsis >gi|7268913|emb|CAB79116.1| putative protein [Arabidopsis
  misc_feature (1)..(27): Homolog of NCBI NO: 7486586 NR Description: hypothetical protein F7J7.100 - Arabidopsis >gi|2911073|emb|CAA17535.1| putative protein [Arabidopsis >gi|7268913|emb|CAB79116.1| putative protein [Arabidopsis
  misc_feature (164)..(328): Homolog of NCBI NO: 15223248 NR Description: unknown protein; protein id: At1g70800.1
MLEYLLNQPANKICADCGSPDPKWVALPFGTFICIKCSGTHRSLGVHISKVISVNLDEWTDDEVNCLAESGGNSVVNSRYEAFLPENKKLKQDCSTEERNDFIRKKYQFQQFVCDPQFSCPLPLNRKHAPPDKNHQQHNSSKYGFGHTFRNSWRKKDSDSKSLKKMSDVGMIEFVGLVKVNIVKGTDLAVRDVMSSDPYVLIHLGHQSMKTKVIKNTLNPIWNERLMLSIPDPIPPLKLQVFDKDTFSSDDRMGEAEVDIRPLIAATKEHENSTITESTELYRWSASEDSNGVLAKDSVISVASGKVKQEITLRLQNVERGEVEIEIECVPLSQ

SEQ ID NO: 11869 - DNA, 1509 bp, Zea mays subsp. mays
  misc_feature (1)..(1509): Ceres Seq. ID no. 12435069
  misc_feature: MA Experiment ID: 20000535 Result: Down-regulated in Transcription
  misc_feature: MA Experiment 20000535 PARAMETER Experiment Name: Zm_Hybrid_Seed_Dev_P Parameter: DAP Value: 30 vs. 12
  misc_feature: MA Experiment 20000535 PARAMETER Experiment Name: Zm_Hybrid_Seed_Dev_P Parameter: Organism Value: Zea mays
  misc_feature: MA Experiment 20000535 PARAMETER Experiment Name: Zm_Hybrid_Seed_Dev_P Parameter: Plant Line Value: 35A19
  misc_feature: MA Experiment 20000535 PARAMETER Experiment Name: Zm_Hybrid_Seed_Dev_P Parameter: Tissue Value: Embryo vs. Unfert Floret
agaactctgcaagtccgcatcaattcgcactcccagcttcctttaccttcgcaacaagcaagccggtagcagcaagctagatcgcggggaagcgactcgcctccaccatcggcgctgctccggcgcggagaagcgtcctctcgcggcggctgggaagaccagtctccgccagtcccggcgactgcttccgtgaggtgcccttggctcctgggcgacgggctcgtggcggccggcgagatgaacagccatgcggccggaacaagcaacgggggacccggggatgcggccgctgggggcgcagccaggaggaacaccaggatgcccaagtattccaagttcacacagcaggagttgccagcttgcaagccgattcttactccaaaatgggttgtctctgttttcttcatcgtcggggtcatctttgttcccattggtgttgttttcactgctagctgcgagagatgttgttgagattattgatcggtatgatgaggcatgtgtgccagggcaacatgactgagaacaagcttgcttacatccagaatgacaccttatccaaagagtgcataaggaatcttacggttacaaaggatatgaagcagcctatttttgtgtattatgaacttggtaacttctaccagaaccataggaggtatgtaaagagccgaaacgatgcacagctaagagatgctagtaaagctaaccagacatccgcttgtgaacctgagaagaccacagctaatgggcaaccaattgttccttgcggcctcattgcttggagcttgtttaatgatacatataatttcactcgtggtaatgagaacttgacagtggacaagaaagatatttcctggaagagcgatagggaacataaatttggtaaagatgtctatccgagcaacttccagaatggcgcacttaaaggtggagcaacacttgacccaaagatcccgttgagtgagcaagaggatctcatcgtttggatgcggactgcagcacttcctacattcagaaagttatatgggagaatatacattgacctcaaggagaatgacacaataacagtgacattgaataacaactacaatacatatagcttcggtggcaagaaaaagctggtcctctccactgcaacttggcttggggggaagaacgattttcttggctttgcataccttatagttggcgggctctgcattttcctggcatttgcattcaccttgctgtacttcgtaaaaccaaggaaactgggagaccacaactacttatcctggaacagacgccatgcaggacgctaagatgttttggaaccccaagtgtcctaactacttaagtgcaacttgtatgaaatgaaatgccctgaaccagaaatctcgttgggcagactggatcagactagaacttcatgtacattttttttacaaagggtctaggtggctacgtgattttgtttcttgtgttctatagagctgcatgtagcagtgattatgagaatacatattgatctcg

SEQ ID NO: 11870 - protein, 278 aa, Zea mays subsp. mays
  peptide (1)..(278): Ceres Seq. ID no. 12435070
  misc_feature (21)..(265): Pfam Name: LEM3 (ligand-effect modulator 3) family / CDC50 family Pfam Description: LEM3 (ligand-effect modulator 3) family / CDC50
  misc_feature (21)..(278): Homolog of NCBI NO: 18404877 NR Description: membrane protein common family; protein id: supported by cDNA: gi_15010741, supported by cDNA: gi_15450728, by cDNA: gi_17386111 [Arabidopsis thaliana]
  misc_feature (21)..(278): Homolog of NCBI NO: 18399730 NR Description: membrane protein common family; protein id: supported by cDNA: 37019., supported by cDNA: gi_15028094, by cDNA: gi_15294235, supported by cDNA: gi_20258910 [Arabidopsis
  misc_feature (21)..(277): Homolog of NCBI NO: 18412377 NR Description: membrane protein common family; protein id: supported by cDNA: 94828. [Arabidopsis thaliana]
  misc_feature (20)..(277): Homolog of NCBI NO: 25347303 NR Description: protein F3O9.16 [imported] - Arabidopsis thaliana
  misc_feature (21)..(277): Homolog of NCBI NO: 25347301 NR Description: T8K14.13 [imported] - Arabidopsis thaliana
  misc_feature (20)..(277): Homolog of NCBI NO: 15219220 NR Description: membrane protein common family; protein id:
  misc_feature (21)..(274): Homolog of NCBI NO: 18422638 NR Description: membrane protein common family; protein id:
  misc_feature (21)..(274): Homolog of NCBI NO: 21554054 NR Description: unknown [Arabidopsis thaliana]
  misc_feature (21)..(261): Homolog of NCBI NO: 9757735 NR Description: gb|AAD25612.1~gene_id:MCL19.21~similar to unknown
  misc_feature (20)..(270): Homolog of NCBI NO: 19570056 NR Description: similar to membrane protein common family; id: At3g12740.1, supported by cDNA: 37019., supported by cDNA: supported by cDNA: gi_15294235, supported by cDNA: gi_20258910
MLLRLLIGMMRHVCQGNMTENKLAYIQNDTLSKECIRNLTVTKDMKQPIFVYYELGNFYQNHRRYVKSRNDAQLRDASKANQTSACEPEKTTANGQPIVPCGLIAWSLFNDTYNFTRGNENLTVDKKDISWKSDREHKFGKDVYPSNFQNGALKGGATLDPKIPLSEQEDLIVWMRTAALPTFRKLYGRIYIDLKENDTITVTLNNNYNTYSFGGKKKLVLSTATWLGGKNDFLGFAYLIVGGLCIFLAFAFTLLYFVKPRKLGDHNYLSWNRRHAGR

SEQ ID NO: 11871 - protein, 270 aa, Zea mays subsp. mays
  peptide (1)..(270): Ceres Seq. ID no. 12435071
  misc_feature (13)..(257): Pfam Name: LEM3 (ligand-effect modulator 3) family / CDC50 family Pfam Description: LEM3 (ligand-effect modulator 3) family / CDC50
  misc_feature (13)..(270): Homolog of NCBI NO: 18404877 NR Description: membrane protein common family; protein id: supported by cDNA: gi_15010741, supported by cDNA: gi_15450728, by cDNA: gi_17386111 [Arabidopsis thaliana]
  misc_feature (13)..(270): Homolog of NCBI NO: 18399730 NR Description: membrane protein common family; protein id: supported by cDNA: 37019., supported by cDNA: gi_15028094, by cDNA: gi_15294235, supported by cDNA: gi_20258910 [Arabidopsis
  misc_feature (13)..(269): Homolog of NCBI NO: 18412377 NR Description: membrane protein common family; protein id: supported by cDNA: 94828. [Arabidopsis thaliana]
  misc_feature (12)..(269): Homolog of NCBI NO: 25347303 NR Description: protein F3O9.16 [imported] - Arabidopsis thaliana
  misc_feature (13)..(269): Homolog of NCBI NO: 25347301 NR Description: T8K14.13 [imported] - Arabidopsis thaliana
  misc_feature (12)..(269): Homolog of NCBI NO: 15219220 NR Description: membrane protein common family; protein id:
  misc_feature (13)..(266): Homolog of NCBI NO: 18422638 NR Description: membrane protein common family; protein id:
  misc_feature (13)..(266): Homolog of NCBI NO: 21554054 NR Description: unknown [Arabidopsis thaliana]
  misc_feature (13)..(253): Homolog of NCBI NO: 9757735 NR Description: gb|AAD25612.1~gene_id:MCL19.21~similar to unknown
  misc_feature (12)..(262): Homolog of NCBI NO: 19570056 NR Description: similar to membrane protein common family; id: At3g12740.1, supported by cDNA: 37019., supported by cDNA: supported by cDNA: gi_15294235, supported by cDNA: gi_20258910
MMRHVCQGNMTENKLAYIQNDTLSKECIRNLTVTKDMKQPIFVYYELGNFYQNHRRYVKSRNDAQLRDASKANQTSACEPEKTTANGQPIVPCGLIAWSLFNDTYNFTRGNENLTVDKKDISWKSDREHKFGKDVYPSNFQNGALKGGATLDPKIPLSEQEDLIVWMRTAALPTFRKLYGRIYIDLKENDTITVTLNNNYNTYSFGGKKKLVLSTATWLGGKNDFLGFAYLIVGGLCIFLAFAFTLLYFVKPRKLGDHNYLSWNRRHAGR

SEQ ID NO: 11872 - protein, 269 aa, Zea mays subsp. mays
  peptide (1)..(269): Ceres Seq. ID no. 12435072
  misc_feature (12)..(256): Pfam Name: LEM3 (ligand-effect modulator 3) family / CDC50 family Pfam Description: LEM3 (ligand-effect modulator 3) family / CDC50
  misc_feature (12)..(269): Homolog of NCBI NO: 18404877 NR Description: membrane protein common family; protein id: supported by cDNA: gi_15010741, supported by cDNA: gi_15450728, by cDNA: gi_17386111 [Arabidopsis thaliana]
  misc_feature (12)..(269): Homolog of NCBI NO: 18399730 NR Description: membrane protein common family; protein id: supported by cDNA: 37019., supported by cDNA: gi_15028094, by cDNA: gi_15294235, supported by cDNA: gi_20258910 [Arabidopsis
  misc_feature (12)..(268): Homolog of NCBI NO: 18412377 NR Description: membrane protein common family; protein id: supported by cDNA: 94828. [Arabidopsis thaliana]
  misc_feature (11)..(268): Homolog of NCBI NO: 25347303 NR Description: protein F3O9.16 [imported] - Arabidopsis thaliana
  misc_feature (12)..(268): Homolog of NCBI NO: 25347301 NR Description: T8K14.13 [imported] - Arabidopsis thaliana
  misc_feature (11)..(268): Homolog of NCBI NO: 15219220 NR Description: membrane protein common family; protein id:
  misc_feature (12)..(265): Homolog of NCBI NO: 18422638 NR Description: membrane protein common family; protein id:
  misc_feature (12)..(265): Homolog of NCBI NO: 21554054 NR Description: unknown [Arabidopsis thaliana]
  misc_feature (12)..(252): Homolog of NCBI NO: 9757735 NR Description: gb|AAD25612.1~gene_id:MCL19.21~similar to unknown
  misc_feature (11)..(261): Homolog of NCBI NO: 19570056 NR Description: similar to membrane protein common family; id: At3g12740.1, supported by cDNA: 37019., supported by cDNA: supported by cDNA: gi_15294235, supported by cDNA: gi_20258910
MRHVCQGNMTENKLAYIQNDTLSKECIRNLTVTKDMKQPIFVYYELGNFYQNHRRYVKSRNDAQLRDASKANQTSACEPEKTTANGQPIVPCGLIAWSLFNDTYNFTRGNENLTVDKKDISWKSDREHKFGKDVYPSNFQNGALKGGATLDPKIPLSEQEDLIVWMRTAALPTFRKLYGRIYIDLKENDTITVTLNNNYNTYSFGGKKKLVLSTATWLGGKNDFLGFAYLIVGGLCIFLAFAFTLLYFVKPRKLGDHNYLSWNRRHAGR

SEQ ID NO: 11873 - DNA, 796 bp, Zea mays subsp. mays; identical to SEQ ID NO: 7882
  misc_feature (1)..(796): Ceres Seq. ID no. 12595084
  misc_feature: MA Experiment ID: 108535 Result: Up-regulated in Transcription
  misc_feature: MA Experiment 108535 PARAMETER Experiment Name: Zm_Meristem_P Parameter: Age (day) Value: 8
  misc_feature: MA Experiment 108535 PARAMETER Experiment Name: Zm_Meristem_P Parameter: Organism Value: Zea mays
  misc_feature: MA Experiment 108535 PARAMETER Experiment Name: Zm_Meristem_P Parameter: Plant Line Value: 35A19
  misc_feature: MA Experiment 108535 PARAMETER Experiment Name: Zm_Meristem_P Parameter: Tissue Value: Root Meristem vs. Above Root Meristem
  misc_feature: MA Experiment ID: 108556 Result: Down-regulated in Transcription
  misc_feature: MA Experiment 108556 PARAMETER Experiment Name: Zm_Drought_P Parameter: Age (day) Value: 9
  misc_feature: MA Experiment 108556 PARAMETER Experiment Name: Zm_Drought_P Parameter: Organism Value: Zea mays
  misc_feature: MA Experiment 108556 PARAMETER Experiment Name: Zm_Drought_P Parameter: Plant Line Value: 35A19
  misc_feature: MA Experiment 108556 PARAMETER Experiment Name: Zm_Drought_P Parameter: Timepoint (hr) Value: 24
  misc_feature: MA Experiment 108556 PARAMETER Experiment Name: Zm_Drought_P Parameter: Tissue Value: Aerial
  misc_feature: MA Experiment 108556 PARAMETER Experiment Name: Zm_Drought_P Parameter: Treatment Value: Drought vs. No Drought
  misc_feature: MA Experiment ID: 108597 Result: Down-regulated in Transcription
  misc_feature: MA Experiment 108597 PARAMETER Experiment Name: Zm_100uM_ABA_P Parameter: Age (day) Value: 9
  misc_feature: MA Experiment 108597 PARAMETER Experiment Name: Zm_100uM_ABA_P Parameter: Organism Value: Zea mays
  misc_feature: MA Experiment 108597 PARAMETER Experiment Name: Zm_100uM_ABA_P Parameter: Plant Line Value: 35A19
  misc_feature: MA Experiment 108597 PARAMETER Experiment Name: Zm_100uM_ABA_P Parameter: Timepoint (hr) Value: 24
  misc_feature: MA Experiment 108597 PARAMETER Experiment Name: Zm_100uM_ABA_P Parameter: Tissue Value: Aerial
  misc_feature: MA Experiment 108597 PARAMETER Experiment Name: Zm_100uM_ABA_P Parameter: Treatment Value: 100uM ABA vs. No Treatment
  misc_feature: MA Experiment ID: 20000478 Result: Down-regulated in Transcription
  misc_feature: MA Experiment 20000478 PARAMETER Experiment Name: Zm_5mM_SA_P Parameter: Age (day) Value: 11
  misc_feature: MA Experiment 20000478 PARAMETER Experiment Name: Zm_5mM_SA_P Parameter: Organism Value: Zea mays
  misc_feature: MA Experiment 20000478 PARAMETER Experiment Name: Zm_5mM_SA_P Parameter: Plant Line Value: 35A19
  misc_feature: MA Experiment 20000478 PARAMETER Experiment Name: Zm_5mM_SA_P Parameter: Timepoint (hr) Value: 72
  misc_feature: MA Experiment 20000478 PARAMETER Experiment Name: Zm_5mM_SA_P Parameter: Tissue Value: Aerial
  misc_feature: MA Experiment 20000478 PARAMETER Experiment Name: Zm_5mM_SA_P Parameter: Treatment Value: 5mM SA vs. No Treatment
  misc_feature: MA Experiment ID: 20000479 Result: Down-regulated in Transcription
  misc_feature: MA Experiment 20000479 PARAMETER Experiment Name: Zm_Drought_P Parameter: Age (day) Value: 10
  misc_feature: MA Experiment 20000479 PARAMETER Experiment Name: Zm_Drought_P Parameter: Organism Value: Zea mays
  misc_feature: MA Experiment 20000479 PARAMETER Experiment Name: Zm_Drought_P Parameter: Plant Line Value: 35A19
  misc_feature: MA Experiment 20000479 PARAMETER Experiment Name: Zm_Drought_P Parameter: Timepoint (hr) Value: 48
  misc_feature: MA Experiment 20000479 PARAMETER Experiment Name: Zm_Drought_P Parameter: Tissue Value: Aerial
  misc_feature: MA Experiment 20000479 PARAMETER Experiment Name: Zm_Drought_P Parameter: Treatment Value: Drought vs. No Drought
  misc_feature: MA Experiment ID: 20000534 Result: Down-regulated in Transcription
  misc_feature: MA Experiment 20000534 PARAMETER Experiment Name: Zm_Hybrid_Pollen_P Parameter: Age (day) Value: 8
  misc_feature: MA Experiment 20000534 PARAMETER Experiment Name: Zm_Hybrid_Pollen_P Parameter: Organism Value: Zea mays
  misc_feature: MA Experiment 20000534 PARAMETER Experiment Name: Zm_Hybrid_Pollen_P Parameter: Plant Line Value: 35A19
  misc_feature: MA Experiment 20000534 PARAMETER Experiment Name: Zm_Hybrid_Pollen_P Parameter: Tissue Value: Pollen vs. Aerial
  misc_feature: MA Experiment ID: 20000632 Result: Down-regulated in Transcription
  misc_feature: MA Experiment 20000632 PARAMETER Experiment Name: Zm_Herbicide-Treatments_P Parameter: Timepoint (hr) Value: 4
  misc_feature: MA Experiment 20000632 PARAMETER Experiment Name: Zm_Herbicide-Treatments_P Parameter: Tissue Value: Aerial
  misc_feature: MA Experiment 20000632 PARAMETER Experiment Name: Zm_Herbicide-Treatments_P Parameter: Treatment Value: Glean vs. No Treatment

SEQ ID NO: 11874 - protein, 140 aa, Zea mays subsp. mays; identical to SEQ ID NO: 7883
  peptide (1)..(140): Ceres Seq. ID no. 12595085

SEQ ID NO: 11875 - protein, 128 aa, Zea mays subsp. mays; identical to SEQ ID NO: 7884
  peptide (1)..(128): Ceres Seq. ID no. 12595086
  misc_feature (42)..(113): Pfam Name: Cyclin-dependent kinase regulatory subunit Pfam Description: Cyclin-dependent kinase regulatory subunit
  misc_feature (42)..(113): Pfam Name: Cyclin-dependent kinase regulatory subunit Pfam Description: Cyclin-dependent kinase regulatory subunit
  misc_feature (42)..(128): Homolog of NCBI NO: 15451612 NR Description: Putative cyclin-dependent kinase regulatory
  misc_feature (42)..(128): Homolog of NCBI NO: 15226294 NR Description: CDK-subunit 1; protein id: At2g27960.1, supported cDNA: 5750. [Arabidopsis thaliana] >gi|25287718|pir||A84679
  misc_feature (42)..(128): Homolog of NCBI NO: 40641585 NR Description: putative cyclin-dependent kinase regulatory
  misc_feature (42)..(124): Homolog of NCBI NO: 15226297 NR Description: CDK-subunit 2; protein id: At2g27970.1
  misc_feature (42)..(121): Homolog of NCBI NO: 27435806 NR Description: CKS1 protein [Populus tremula x Populus
  misc_feature (45)..(112): Homolog of NCBI NO: 2493727 NR Description: PROBABLE CYCLIN-DEPENDENT KINASES REGULATORY
  misc_feature (44)..(127): Homolog of NCBI NO: 21355377 NR Description: CG9790-PA [Drosophila melanogaster]
  misc_feature (44)..(118): Homolog of NCBI NO: 13384804 NR Description: RIKEN cDNA 1110038L14 [Mus musculus]
  misc_feature (44)..(118): Homolog of NCBI NO: 4502859 NR Description: CDC28 protein kinase 2; CKS1(S. cerevisiae
  misc_feature (36)..(111): Homolog of NCBI NO: 2493729 NR Description: CYCLIN-DEPENDENT KINASES REGULATORY SUBUNIT
  misc_feature (42)..(128): Homolog of NCBI NO: 15451612 NR Description: Putative cyclin-dependent kinase regulatory
  misc_feature (42)..(128): Homolog of NCBI NO: 15226294 NR Description: CDK-subunit 1; protein id: At2g27960.1, supported cDNA: 5750. [Arabidopsis thaliana] >gi|25287718|pir||A84679
  misc_feature (42)..(128): Homolog of NCBI NO: 40641585 NR Description: putative cyclin-dependent kinase regulatory
  misc_feature (42)..(124): Homolog of NCBI NO: 15226297 NR Description: CDK-subunit 2; protein id: At2g27970.1
  misc_feature (42)..(121): Homolog of NCBI NO: 27435806 NR Description: CKS1 protein [Populus tremula x Populus
  misc_feature (45)..(112): Homolog of NCBI NO: 2493727 NR Description: PROBABLE CYCLIN-DEPENDENT KINASES REGULATORY
  misc_feature (44)..(127): Homolog of NCBI NO: 21355377 NR Description: CG9790-PA [Drosophila melanogaster]
  misc_feature (44)..(118): Homolog of NCBI NO: 13384804 NR Description: RIKEN cDNA 1110038L14 [Mus musculus]
  misc_feature (44)..(118): Homolog of NCBI NO: 4502859 NR Description: CDC28 protein kinase 2; CKS1(S. cerevisiae
  misc_feature (36)..(111): Homolog of NCBI NO: 2493729 NR Description: CYCLIN-DEPENDENT KINASES REGULATORY SUBUNIT

SEQ ID NO: 11876 - protein, 87 aa, Zea mays subsp. mays; identical to SEQ ID NO: 7885
  peptide (1)..(87): Ceres Seq. ID no. 12595087
  misc_feature (1)..(72): Pfam Name: Cyclin-dependent kinase regulatory subunit Pfam Description: Cyclin-dependent kinase regulatory subunit
  misc_feature (1)..(72): Pfam Name: Cyclin-dependent kinase regulatory subunit Pfam Description: Cyclin-dependent kinase regulatory subunit
  misc_feature (1)..(87): Homolog of NCBI NO: 15451612 NR Description: Putative cyclin-dependent kinase regulatory
  misc_feature (1)..(87): Homolog of NCBI NO: 15226294 NR Description: CDK-subunit 1; protein id: At2g27960.1, supported cDNA: 5750. [Arabidopsis thaliana] >gi|25287718|pir||A84679
  misc_feature (1)..(87): Homolog of NCBI NO: 40641585 NR Description: putative cyclin-dependent kinase regulatory
  misc_feature (1)..(83): Homolog of NCBI NO: 15226297 NR Description: CDK-subunit 2; protein id: At2g27970.1
  misc_feature (1)..(80): Homolog of NCBI NO: 27435806 NR Description: CKS1 protein [Populus tremula x Populus
  misc_feature (1)..(87): Homolog of NCBI NO: 15226294 NR Description: CDK-subunit 1; protein id: At2g27960.1, supported cDNA: 5750. [Arabidopsis thaliana] >gi|25287718|pir||A84679
  misc_feature (1)..(83): Homolog of NCBI NO: 15226297 NR Description: CDK-subunit 2; protein id: At2g27970.1
  misc_feature (1)..(70): Homolog of NCBI NO: 2493729 NR Description: CYCLIN-DEPENDENT KINASES REGULATORY SUBUNIT
  misc_feature (3)..(77): Homolog of NCBI NO: 4502859 NR Description: CDC28 protein kinase 2; CKS1(S. cerevisiae
  misc_feature (3)..(77): Homolog of NCBI NO: 13384804 NR Description: RIKEN cDNA 1110038L14 [Mus musculus]
  misc_feature (3)..(86): Homolog of NCBI NO: 21355377 NR Description: CG9790-PA [Drosophila melanogaster]
  misc_feature (4)..(71): Homolog of NCBI NO: 2493727 NR Description: PROBABLE CYCLIN-DEPENDENT KINASES REGULATORY
  misc_feature (1)..(80): Homolog of NCBI NO: 27435806 NR Description: CKS1 protein [Populus tremula x Populus
  misc_feature (1)..(87): Homolog of NCBI NO: 40641585 NR Description: putative cyclin-dependent kinase regulatory
  misc_feature (1)..(87): Homolog of NCBI NO: 15451612 NR Description: Putative cyclin-dependent kinase regulatory
  misc_feature (4)..(71): Homolog of NCBI NO: 2493727 NR Description: PROBABLE CYCLIN-DEPENDENT KINASES REGULATORY
  misc_feature (3)..(86): Homolog of NCBI NO: 21355377 NR Description: CG9790-PA [Drosophila melanogaster]
  misc_feature (3)..(77): Homolog of NCBI NO: 13384804 NR Description: RIKEN cDNA 1110038L14 [Mus musculus]
  misc_feature (3)..(77): Homolog of NCBI NO: 4502859 NR Description: CDC28 protein kinase 2; CKS1(S. cerevisiae
  misc_feature (1)..(70): Homolog of NCBI NO: 2493729 NR Description: CYCLIN-DEPENDENT KINASES REGULATORY SUBUNIT

SEQ ID NO: 11877 - DNA, 1803 bp, Zea mays subsp. mays
  misc_feature (1)..(1803): Ceres Seq. ID no. 12345120
  misc_feature: MA Experiment ID: 20000534 Result: Down-regulated in Transcription
  misc_feature: MA Experiment 20000534 PARAMETER Experiment Name: Zm_Hybrid_Pollen_P Parameter: Age (day) Value: 8
  misc_feature: MA Experiment 20000534 PARAMETER Experiment Name: Zm_Hybrid_Pollen_P Parameter: Organism Value: Zea mays
  misc_feature: MA Experiment 20000534 PARAMETER Experiment Name: Zm_Hybrid_Pollen_P Parameter: Plant Line Value: 35A19
  misc_feature: MA Experiment 20000534 PARAMETER Experiment Name: Zm_Hybrid_Pollen_P Parameter: Tissue Value: Pollen vs. Aerial
aatctcgataggggtgcgcgaggacgaggagaaaaaacagaggaggaaaaaatatcaccttctcttcctgcattcccctgctcgatccccggcgaggaattcgcccccgaatccatcgatttgctcagtccagtccgccgatccgtggatcgattcgtgcgtgggctctgtcctccccggggttccgatctggtcctcgcctcgccggaggaggagctggaggagatgaacggcaccgggggcagccaccaccagcagcagcacaggctccggcagcagcagcagcagcaggcgctcctgatgcagcaggcgctgcagcagcagcagcagcaacatcagtaccagtccggcgtcctcgccgccgcggcagccgcggccatgacccagatggaacctatttccaatggcaatcttccacctggctttgatccttccacttgtcgcagtgtgtatgttggaaacgtgaaccctaatgtcacggagagccttttgattgaagttttccagagtgctggccttgtggaaagatgcaagctcatacggaaagagaagtcatcctttgggtttgtggactactatgatagaaggtctgctgctctagcaatcatgacccttcatggccgtcacatatatggacaagcaatcaaggtgaactgggcatacgcaagtacacagagggaggatacgtcggggcatttccatatttttgttggtgatttaagttctgaagtgaatgatgcaactctttatgcctgtttctcagcatatccttcttgttctgatgctcgagtcatgtgggacaacaaaactggacgttccaggggttatggttttgtctccttccgtaatcaacaggaagctgaaactgctataactgaaatgactggaaaatggcttggaagcagacaaataaggtgcaattgggcaacaaagaccaattcagaagagaaaccagaaactgacaatcataatgcagttgtactaacaaatggtagctccaccaattcagcaacagatgcaagccaggatgcaggaagtaaagagaacccagagaacaatcctgattgtactactgtatatgttggcaaccttggacatgaggttaatcgggatgagcttcaccgccacttctataacttgggggtcggggcaatcgaggaaatccgtgttcaacaggataaggggtttggatttgtgagatatagcacccatggggaagcagcattagctattcagatggccaatggattggtagtccgtgggaaatcaattaagtgctcatggggaaacaagccaactccacctggcaccacctccaagcccctaccccctccagttgcttcataccagcctgctgtagcaatgtcaggtgtcccacaaggtttcacagcagccgaacttcttgcttaccagaggcagcttgccttaagccaggctgcagcagggcagattgctggccagcatggtctcgcgggtcaggtttctgcaggtcttcttgctgctgctggttctcaggccctctacgatggctacccgaaccagtcatcagcccagcagcttatgtactacaactagagttcaagaggacggcgttggccatcgtcgccctgttttttattttgtggttcatgtactatttgtgtgagagttcttgatctcttgtcgccgcggaattgtgttactatcttattactgtaccattgaccatttttcttgtgagattcatttgagtagtcactttaacagagtaagagatgtattctatgtgacttcgcgattgattaatgtaatgctcccctgtgc

SEQ ID NO: 11878 - protein, 524 aa, Zea mays subsp. mays
  peptide (1)..(524): Ceres Seq. ID no. 12345121
  misc_feature (150)..(210): Pfam Name: RNA recognition motif. (a.k.a. RRM, RBD, or RNP domain) Pfam Description: RNA recognition motif. (a.k.a. RRM, RBD, or RNP
  misc_feature (89)..(523): Homolog of NCBI NO: 18394471 NR Description: oligouridylate binding protein (UBP1), putative; id: At1g17370.1, supported by cDNA: 17210. [Arabidopsis thaliana] Putative RNA binding protein binding protein, putative
  misc_feature (86)..(523): Homolog of NCBI NO: 15231783 NR Description: oligouridylate binding protein (UBP1), putative; id: At3g14100.1, supported by cDNA: 37712. [Arabidopsis thaliana] RNA binding protein nucleolysin; oligouridylate binding protein
  misc_feature (86)..(523): Homolog of NCBI NO: 21593280 NR Description: oligouridylate binding protein, putative
  misc_feature (85)..(523): Homolog of NCBI NO: 23237933 NR Description: putative oligouridylate binding protein [Oryza
  misc_feature (85)..(523): Homolog of NCBI NO: 15221031 NR Description: oligouridylate binding protein (UBP1), putative; id: At1g54080.1, supported by cDNA: gi_13194791, supported by gi_13605626 [Arabidopsis thaliana] >gi|25405690|pir||E96581
  misc_feature (85)..(523): Homolog of NCBI NO: 30695647 NR Description: oligouridylate binding protein (UBP1), putative
  misc_feature (83)..(425): Homolog of NCBI NO: 22208507 NR Description: putative oligouridylate binding protein [Sorghum
  misc_feature (426)..(510): Homolog of NCBI NO: 22208507 NR Description: putative oligouridylate binding protein [Sorghum
  misc_feature (86)..(483): Homolog of NCBI NO: 6996560 NR Description: oligouridylate binding protein [Nicotiana
  misc_feature (129)..(427): Homolog of NCBI NO: 23928438 NR Description: putative oligouridylate binding protein [Zea mays]
NLDRGARGRGEKTEEEKISPSLPAFPCSIPGEEFAPESIDLLSPVRRSVDRFVRGLCPPRGSDLVLASPEEELEEMNGTGGSHHQQQHRLRQQQQQQALLMQQALQQQQQQHQYQSGVLAAAAAAAMTQMEPISNGNLPPGFDPSTCRSVYVGNVNPNVTESLLIEVFQSAGLVERCKLIRKEKSSFGFVDYYDRRSAALAIMTLHGRHIYGQAIKVNWAYASTQREDTSGHFHIFVGDLSSEVNDATLYACFSAYPSCSDARVMWDNKTGRSRGYGFVSFRNQQEAETAITEMTGKWLGSRQIRCNWATKTNSEEKPETDNHNAVVLTNGSSTNSATDASQDAGSKENPENNPDCTTVYVGNLGHEVNRDELHRHFYNLGVGAIEEIRVQQDKGFGFVRYSTHGEAALAIQMANGLVVRGKSIKCSWGNKPTPPGTTSKPLPPPVASYQPAVAMSGVPQGFTAAELLAYQRQLALSQAAAGQIAGQHGLAGQVSAGLLAAAGSQALYDGYPNQSSAQQLMYYN

SEQ ID NO: 11879 - protein, 449 aa, Zea mays subsp. mays
  peptide (1)..(449): Ceres Seq. ID no. 12345122
  misc_feature (75)..(135): Pfam Name: RNA recognition motif. (a.k.a. RRM, RBD, or RNP domain) Pfam Description: RNA recognition motif. (a.k.a. RRM, RBD, or RNP
  misc_feature (14)..(448): Homolog of NCBI NO: 18394471 NR Description: oligouridylate binding protein (UBP1), putative; id: At1g17370.1, supported by cDNA: 17210. [Arabidopsis thaliana] Putative RNA binding protein binding protein, putative
  misc_feature (11)..(448): Homolog of NCBI NO: 15231783 NR Description: oligouridylate binding protein (UBP1), putative; id: At3g14100.1, supported by cDNA: 37712. [Arabidopsis thaliana] RNA binding protein nucleolysin; oligouridylate binding protein
  misc_feature (11)..(448): Homolog of NCBI NO: 21593280 NR Description: oligouridylate binding protein, putative
  misc_feature (10)..(448): Homolog of NCBI NO: 23237933 NR Description: putative oligouridylate binding protein [Oryza
  misc_feature (10)..(448): Homolog of NCBI NO: 15221031 NR Description: oligouridylate binding protein (UBP1), putative; id: At1g54080.1, supported by cDNA: gi_13194791, supported by gi_13605626 [Arabidopsis thaliana] >gi|25405690|pir||E96581
  misc_feature (10)..(448): Homolog of NCBI NO: 30695647 NR Description: oligouridylate binding protein (UBP1), putative
  misc_feature (8)..(350): Homolog of NCBI NO: 22208507 NR Description: putative oligouridylate binding protein [Sorghum
  misc_feature (351)..(435): Homolog of NCBI NO: 22208507 NR Description: putative oligouridylate binding protein [Sorghum
  misc_feature (11)..(408): Homolog of NCBI NO: 6996560 NR Description: oligouridylate binding protein [Nicotiana
  misc_feature (54)..(352): Homolog of NCBI NO: 23928438 NR Description: putative oligouridylate binding protein [Zea mays]
MNGTGGSHHQQQHRLRQQQQQQALLMQQALQQQQQQHQYQSGVLAAAAAAAMTQMEPISNGNLPPGFDPSTCRSVYVGNVNPNVTESLLIEVFQSAGLVERCKLIRKEKSSFGFVDYYDRRSAALAIMTLHGRHIYGQAIKVNWAYASTQREDTSGHFHIFVGDLSSEVNDATLYACFSAYPSCSDARVMWDNKTGRSRGYGFVSFRNQQEAETAITEMTGKWLGSRQIRCNWATKTNSEEKPETDNHNAVVLTNGSSTNSATDASQDAGSKENPENNPDCTTVYVGNLGHEVNRDELHRHFYNLGVGAIEEIRVQQDKGFGFVRYSTHGEAALAIQMANGLVVRGKSIKCSWGNKPTPPGTTSKPLPPPVASYQPAVAMSGVPQGFTAAELLAYQRQLALSQAAAGQIAGQHGLAGQVSAGLLAAAGSQALYDGYPNQSSAQQLMYYN

SEQ ID NO: 11880 - protein, 424 aa, Zea mays subsp. mays
  peptide (1)..(424): Ceres Seq. ID no. 12345123
  misc_feature (50)..(110): Pfam Name: RNA recognition motif. (a.k.a. RRM, RBD, or RNP domain) Pfam Description: RNA recognition motif. (a.k.a. RRM, RBD, or RNP
  misc_feature (1)..(423): Homolog of NCBI NO: 18394471 NR Description: oligouridylate binding protein (UBP1), putative; id: At1g17370.1, supported by cDNA: 17210. [Arabidopsis thaliana] Putative RNA binding protein binding protein, putative
  misc_feature (1)..(423): Homolog of NCBI NO: 15231783 NR Description: oligouridylate binding protein (UBP1), putative; id: At3g14100.1, supported by cDNA: 37712. [Arabidopsis thaliana] RNA binding protein nucleolysin; oligouridylate binding protein
  misc_feature (1)..(423): Homolog of NCBI NO: 21593280 NR Description: oligouridylate binding protein, putative
  misc_feature (1)..(423): Homolog of NCBI NO: 23237933 NR Description: putative oligouridylate binding protein [Oryza
  misc_feature (1)..(423): Homolog of NCBI NO: 15221031 NR Description: oligouridylate binding protein (UBP1), putative; id: At1g54080.1, supported by cDNA: gi_13194791, supported by gi_13605626 [Arabidopsis thaliana] >gi|25405690|pir||E96581
  misc_feature (1)..(423): Homolog of NCBI NO: 30695647 NR Description: oligouridylate binding protein (UBP1), putative
  misc_feature (1)..(325): Homolog of NCBI NO: 22208507 NR Description: putative oligouridylate binding protein [Sorghum
  misc_feature (326)..(410): Homolog of NCBI NO: 22208507 NR Description: putative oligouridylate binding protein [Sorghum
  misc_feature (1)..(383): Homolog of NCBI NO: 6996560 NR Description: oligouridylate binding protein [Nicotiana
  misc_feature (29)..(327): Homolog of NCBI NO: 23928438 NR Description: putative oligouridylate binding protein [Zea mays]
MQQALQQQQQQHQYQSGVLAAAAAAAMTQMEPISNGNLPPGFDPSTCRSVYVGNVNPNVTESLLIEVFQSAGLVERCKLIRKEKSSFGFVDYYDRRSAALAIMTLHGRHIYGQAIKVNWAYASTQREDTSGHFHIFVGDLSSEVNDATLYACFSAYPSCSDARVMWDNKTGRSRGYGFVSFRNQQEAETAITEMTGKWLGSRQIRCNWATKTNSEEKPETDNHNAVVLTNGSSTNSATDASQDAGSKENPENNPDCTTVYVGNLGHEVNRDELHRHFYNLGVGAIEEIRVQQDKGFGFVRYSTHGEAALAIQMANGLVVRGKSIKCSWGNKPTPPGTTSKPLPPPVASYQPAVAMSGVPQGFTAAELLAYQRQLALSQAAAGQIAGQHGLAGQVSAGLLAAAGSQALYDGYPNQSSAQQLMYYN

SEQ ID NO: 11881 - DNA, 1703 bp, Zea mays subsp. mays
  misc_feature (1)..(1703): Ceres Seq. ID no. 12343304
  misc_feature: MA Experiment ID: 108535 Result: Down-regulated in Transcription
  misc_feature: MA Experiment 108535 PARAMETER Experiment Name: Zm_Meristem_P Parameter: Age (day) Value: 8
  misc_feature: MA Experiment 108535 PARAMETER Experiment Name: Zm_Meristem_P Parameter: Organism Value: Zea mays
  misc_feature: MA Experiment 108535 PARAMETER Experiment Name: Zm_Meristem_P Parameter: Plant Line Value: 35A19
  misc_feature: MA Experiment 108535 PARAMETER Experiment Name: Zm_Meristem_P Parameter: Tissue Value: Root Meristem vs. Above Root Meristem
gcgtttagagagagagaagacagggagaaggaggaagagccgccgcggtggaccgggtgatttggcgtttccttgtcctcggcagggttgtcaggggattcgtcaggacacgggcaagctttgtacgctaccaattcagcgaataaccgacgggggtgcgtggaattgctcaccggagcaaaccctccgccgccgaaccaccatccgctgtgagcgaataaccggcatccccagggcgccgtcgatcccggtcggccatctcccggtgcctggtaactgatcgttaatttcatcgatgggtgccatggaggaccgcagctccaagcaggcaggcgcgggcttggtggcccacctccacgacgacctccttgtggagatcctctcccgcgtccccgccaagtccatctgccggttcaagtgcgtgtccaaggcctggctcgacctcattgccggtcccgaccaccgtaagaagctccgccaacccatgcagggactcatctacatgaatccagagaaggaccgccacagcttcagcttcctggacctgccactgacagtaggatccgtgcctcaggacgttgtcgaccctgcaggcttcatctccttcctgacggaacagcctgagatccatcgcctcgtcttactggattcctgcaatggtctgatcctattccagcaccttatggagctgccgcactacaacagtttgggctatgtcgtgtgcaacccgaccacgaagcaatggcgagccgtgcccgagcccgactgcagctcccatgtaccaatgaactacacatatttggcttttgatccgactgtatcctcccacttccacttggtccggttcaaaaagaatcgcgagtacatggagcccatgtcggtgcatgcttactcgtctaaaactgggatatggacctatagccaaactgagaaagaagaagaagaatggcagaatcaggtctacttatctataagtaatcgatgcgcctttgttaatggcttcctgcatttgctagtttggggctcgaacaaaatgcagatactcatcgtagatgtacaaggacgtccaagaaggatgatcagactgccagacgcggctgctggtaattgtgagggatgctactgtgtttactttggccaatcccaggggcatctgcactgcattactaaacaattattcgacttcaacgaagagaaatacgagctgtccatctgggctcttcaggattacgaagcacaagagtgggtgctgaaggacactgtgagctccctccagctctttggaggaaattgccccacaagtgtcgcattggagttgtacagcgaggtggccagcatgcatctggatcgcaatgtggtcttcttcttttcacactgtgaacgtagattcatagcatatgacatggacagcaaggaagtgagtgttttcagcagttccaaagctatacacaggtggaaggttggttgctatgttccttgtttctcaccggcgcctctcaaataagcactacaagcaattagtgcgtggtctaatacaagtatgagctgctagcaacttagttagactgtaataaggtcaagtgaagtatttcgtccatgagtgtttggtctaattagttccgcaagcctgttgaggcatttatatatatatgtagtctatatttatggatgctagttaaattaatggatacgttgtatgattt

SEQ ID NO: 11882 - protein, 402 aa, Zea mays subsp. mays
  peptide (1)..(402): Ceres Seq. ID no. 12343305
  misc_feature (109)..(397): Homolog of NCBI NO: 33146479 NR Description: receptor-like kinase-like [Oryza sativa (japonica
  misc_feature (109)..(397): Homolog of NCBI NO: 34898802 NR Description: OJ1131_E05.28 [Oryza sativa (japonica
  misc_feature (18)..(266): Homolog of NCBI NO: 34898810 NR Description: OJ1131_E05.32 [Oryza sativa (japonica
  misc_feature (18)..(266): Homolog of NCBI NO: 34898788 NR Description: OJ1131_E05.20 [Oryza sativa (japonica
  misc_feature (18)..(266): Homolog of NCBI NO: 34898790 NR Description: OJ1131_E05.21 [Oryza sativa (japonica
  misc_feature (103)..(397): Homolog of NCBI NO: 33146481 NR Description: unknown protein [Oryza sativa (japonica
  misc_feature (103)..(397): Homolog of NCBI NO: 34898810 NR Description: OJ1131_E05.32 [Oryza sativa (japonica
  misc_feature (23)..(266): Homolog of NCBI NO: 34898796 NR Description: OJ1131_E05.24 [Oryza sativa (japonica >gi|22831061|dbj|BAC15924.1| hypothetical protein [Oryza sativa
  misc_feature (6)..(402): Homolog of NCBI NO: 34914902 NR Description: B1096D03.14 [Oryza sativa (japonica
  misc_feature (140)..(401): Homolog of NCBI NO: 37536818 NR Description: hypothetical protein [Oryza sativa (japonica group)] >gi|18873858|gb|AAL79804.1| hypothetical protein [Oryza >gi|31433493|gb|AAP54998.1| hypothetical protein [Oryza sativa
MGAMEDRSSKQAGAGLVAHLHDDLLVEILSRVPAKSICRFKCVSKAWLDLIAGPDHRKKLRQPMQGLIYMNPEKDRHSFSFLDLPLTVGSVPQDVVDPAGFISFLTEQPEIHRLVLLDSCNGLILFQHLMELPHYNSLGYVVCNPTTKQWRAVPEPDCSSHVPMNYTYLAFDPTVSSHFHLVRFKKNREYMEPMSVHAYSSKTGIWTYSQTEKEEEEWQNQVYLSISNRCAFVNGFLHLLVWGSNKMQILIVDVQGRPRRMIRLPDAAAGNCEGCYCVYFGQSQGHLHCITKQLFDFNEEKYELSIWALQDYEAQEWVLKDTVSSLQLFGGNCPTSVALELYSEVASMHLDRNVVFFFSHCERRFIAYDMDSKEVSVFSSSKAIHRWKVGCYVPCFSPAPLK

SEQ ID NO: 11883 - protein, 399 aa, Zea mays subsp. mays
  peptide (1)..(399): Ceres Seq. ID no. 12343306
  misc_feature (106)..(394): Homolog of NCBI NO: 33146479 NR Description: receptor-like kinase-like [Oryza sativa (japonica
  misc_feature (106)..(394): Homolog of NCBI NO: 34898802 NR Description: OJ1131_E05.28 [Oryza sativa (japonica
  misc_feature (15)..(263): Homolog of NCBI NO: 34898810 NR Description: OJ1131_E05.32 [Oryza sativa (japonica
  misc_feature (15)..(263): Homolog of NCBI NO: 34898788 NR Description: OJ1131_E05.20 [Oryza sativa (japonica
  misc_feature (15)..(263): Homolog of NCBI NO: 34898790 NR Description: OJ1131_E05.21 [Oryza sativa (japonica
  misc_feature (100)..(394): Homolog of NCBI NO: 33146481 NR Description: unknown protein [Oryza sativa (japonica
  misc_feature (100)..(394): Homolog of NCBI NO: 34898810 NR Description: OJ1131_E05.32 [Oryza sativa (japonica
  misc_feature (20)..(263): Homolog of NCBI NO: 34898796 NR Description: OJ1131_E05.24 [Oryza sativa (japonica >gi|22831061|dbj|BAC15924.1| hypothetical protein [Oryza sativa
  misc_feature (3)..(399): Homolog of NCBI NO: 34914902 NR Description: B1096D03.14 [Oryza sativa (japonica
  misc_feature (137)..(398): Homolog of NCBI NO: 37536818 NR Description: hypothetical protein [Oryza sativa (japonica group)] >gi|18873858|gb|AAL79804.1| hypothetical protein [Oryza >gi|31433493|gb|AAP54998.1| hypothetical protein [Oryza sativa
MEDRSSKQAGAGLVAHLHDDLLVEILSRVPAKSICRFKCVSKAWLDLIAGPDHRKKLRQPMQGLIYMNPEKDRHSFSFLDLPLTVGSVPQDVVDPAGFISFLTEQPEIHRLVLLDSCNGLILFQHLMELPHYNSLGYVVCNPTTKQWRAVPEPDCSSHVPMNYTYLAFDPTVSSHFHLVRFKKNREYMEPMSVHAYSSKTGIWTYSQTEKEEEEWQNQVYLSISNRCAFVNGFLHLLVWGSNKMQILIVDVQGRPRRMIRLPDAAAGNCEGCYCVYFGQSQGHLHCITKQLFDFNEEKYELSIWALQDYEAQEWVLKDTVSSLQLFGGNCPTSVALELYSEVASMHLDRNVVFFFSHCERRFIAYDMDSKEVSVFSSSKAIHRWKVGCYVPCFSPAPLK

SEQ ID NO: 11884 - protein, 339 aa, Zea mays subsp. mays
  peptide (1)..(339): Ceres Seq. ID no. 12343307
  misc_feature (46)..(334): Homolog of NCBI NO: 33146479 NR Description: receptor-like kinase-like [Oryza sativa (japonica
  misc_feature (46)..(334): Homolog of NCBI NO: 34898802 NR Description: OJ1131_E05.28 [Oryza sativa (japonica
  misc_feature (1)..(203): Homolog of NCBI NO: 34898810 NR Description: OJ1131_E05.32 [Oryza sativa (japonica
  misc_feature (1)..(203): Homolog of NCBI NO: 34898788 NR Description: OJ1131_E05.20 [Oryza sativa (japonica
  misc_feature (1)..(203): Homolog of NCBI NO: 34898790 NR Description: OJ1131_E05.21 [Oryza sativa (japonica
  misc_feature (40)..(334): Homolog of NCBI NO: 33146481 NR Description: unknown protein [Oryza sativa (japonica
  misc_feature (40)..(334): Homolog of NCBI NO: 34898810 NR Description: OJ1131_E05.32 [Oryza sativa (japonica
  misc_feature (1)..(203): Homolog of NCBI NO: 34898796 NR Description: OJ1131_E05.24 [Oryza sativa (japonica >gi|22831061|dbj|BAC15924.1| hypothetical protein [Oryza sativa
  misc_feature (1)..(339): Homolog of NCBI NO: 34914902 NR Description: B1096D03.14 [Oryza sativa (japonica
  misc_feature (77)..(338): Homolog of NCBI NO: 37536818 NR Description: hypothetical protein [Oryza sativa (japonica group)] >gi|18873858|gb|AAL79804.1| hypothetical protein [Oryza >gi|31433493|gb|AAP54998.1| hypothetical protein [Oryza sativa
MQGLIYMNPEKDRHSFSFLDLPLTVGSVPQDVVDPAGFISFLTEQPEIHRLVLLDSCNGLILFQHLMELPHYNSLGYVVCNPTTKQWRAVPEPDCSSHVPMNYTYLAFDPTVSSHFHLVRFKKNREYMEPMSVHAYSSKTGIWTYSQTEKEEEEWQNQVYLSISNRCAFVNGFLHLLVWGSNKMQILIVDVQGRPRRMIRLPDAAAGNCEGCYCVYFGQSQGHLHCITKQLFDFNEEKYELSIWALQDYEAQEWVLKDTVSSLQLFGGNCPTSVALELYSEVASMHLDRNVVFFFSHCERRFIAYDMDSKEVSVFSSSKAIHRWKVGCYVPCFSPAPLK

SEQ ID NO: 11885 - DNA, 1751 bp, Zea mays subsp. mays
  misc_feature (1)..(1751): Ceres Seq. ID no. 12345721
  misc_feature: MA Experiment ID: 108523 Result: Down-regulated in Transcription
  misc_feature: MA Experiment 108523 PARAMETER Experiment Name: Zm_42deg_Heat_P Parameter: Age (day) Value: 8
  misc_feature: MA Experiment 108523 PARAMETER Experiment Name: Zm_42deg_Heat_P Parameter: Organism Value: Zea mays
  misc_feature: MA Experiment 108523 PARAMETER Experiment Name: Zm_42deg_Heat_P Parameter: Plant Line Value: 35A19
  misc_feature: MA Experiment 108523 PARAMETER Experiment Name: Zm_42deg_Heat_P Parameter: Temperature (deg C) Value: 42 vs. 22
  misc_feature: MA Experiment 108523 PARAMETER Experiment Name: Zm_42deg_Heat_P Parameter: Timepoint (hr) Value: 6
  misc_feature: MA Experiment 108523 PARAMETER Experiment Name: Zm_42deg_Heat_P Parameter: Tissue Value: Aerial
  misc_feature: MA Experiment ID: 108529 Result: Up-regulated in Transcription
  misc_feature: MA Experiment 108529 PARAMETER Experiment Name: Zm_Imbibed_Seeds_P Parameter: Age (day) Value: 5 vs. 2
  misc_feature: MA Experiment 108529 PARAMETER Experiment Name: Zm_Imbibed_Seeds_P Parameter: Organism Value: Zea mays
  misc_feature: MA Experiment 108529 PARAMETER Experiment Name: Zm_Imbibed_Seeds_P Parameter: Plant Line Value: 35A19
  misc_feature: MA Experiment 108529 PARAMETER Experiment Name: Zm_Imbibed_Seeds_P Parameter: Tissue Value: Roots vs. Embryo
  misc_feature: MA Experiment ID: 108535 Result: Down-regulated in Transcription
  misc_feature: MA Experiment 108535 PARAMETER Experiment Name: Zm_Meristem_P Parameter: Age (day) Value: 8
  misc_feature: MA Experiment 108535 PARAMETER Experiment Name: Zm_Meristem_P Parameter: Organism Value: Zea mays
  misc_feature: MA Experiment 108535 PARAMETER Experiment Name: Zm_Meristem_P Parameter: Plant Line Value: 35A19
  misc_feature: MA Experiment 108535 PARAMETER Experiment Name: Zm_Meristem_P Parameter: Tissue Value: Root Meristem vs. Above Root Meristem
  misc_feature: MA Experiment ID: 108536 Result: Up-regulated in Transcription
  misc_feature: MA Experiment 108536 PARAMETER Experiment Name: Zm_Meristem_P Parameter: Age (day) Value: 8
  misc_feature: MA Experiment 108536 PARAMETER Experiment Name: Zm_Meristem_P Parameter: Organism Value: Zea mays
  misc_feature: MA Experiment 108536 PARAMETER Experiment Name: Zm_Meristem_P Parameter: Plant Line Value: 35A19
  misc_feature: MA Experiment 108536 PARAMETER Experiment Name: Zm_Meristem_P Parameter: Tissue Value: Shoot Meristem vs. Above Shoot Meristem
  misc_feature: MA Experiment ID: 108544 Result: Up-regulated in Transcription
  misc_feature: MA Experiment ID: 108546 Result: Up-regulated in Transcription
  misc_feature: MA Experiment 108546 PARAMETER Experiment Name: Zm_Imbibed_Seeds_P Parameter: Age (day) Value: 3 vs. 2
  misc_feature: MA Experiment 108546 PARAMETER Experiment Name: Zm_Imbibed_Seeds_P Parameter: Organism Value: Zea mays
  misc_feature: MA Experiment 108546 PARAMETER Experiment Name: Zm_Imbibed_Seeds_P Parameter: Plant Line Value: 35A19
  misc_feature: MA Experiment 108546 PARAMETER Experiment Name: Zm_Imbibed_Seeds_P Parameter: Tissue Value: Roots vs. Embryo
  misc_feature: MA Experiment ID: 108556 Result: Down-regulated in Transcription
  misc_feature: MA Experiment 108556 PARAMETER Experiment Name: Zm_Drought_P Parameter: Age (day) Value: 9
  misc_feature: MA Experiment 108556 PARAMETER Experiment Name: Zm_Drought_P Parameter: Organism Value: Zea mays
  misc_feature: MA Experiment 108556 PARAMETER Experiment Name: Zm_Drought_P Parameter: Plant Line Value: 35A19
  misc_feature: MA Experiment 108556 PARAMETER Experiment Name: Zm_Drought_P Parameter: Timepoint (hr) Value: 24
  misc_feature: MA Experiment 108556 PARAMETER Experiment Name: Zm_Drought_P Parameter: Tissue Value: Aerial
  misc_feature: MA Experiment 108556 PARAMETER Experiment Name: Zm_Drought_P Parameter: Treatment Value: Drought vs. No Drought
  misc_feature: MA Experiment ID: 108689 Result: Down-regulated in Transcription
  misc_feature: MA Experiment 108689 PARAMETER Experiment Name: Zm_Drought_Roots_P Parameter: Age (day) Value: 9
  misc_feature: MA Experiment 108689 PARAMETER Experiment Name: Zm_Drought_Roots_P Parameter: Organism Value: Zea mays
  misc_feature: MA Experiment 108689 PARAMETER Experiment Name: Zm_Drought_Roots_P Parameter: Plant Line Value: 35A19
  misc_feature: MA Experiment 108689 PARAMETER Experiment Name: Zm_Drought_Roots_P Parameter: Timepoint (hr) Value: 24
  misc_feature: MA Experiment 108689 PARAMETER Experiment Name: Zm_Drought_Roots_P Parameter: Tissue Value: Roots
  misc_feature: MA Experiment 108689 PARAMETER Experiment Name: Zm_Drought_Roots_P Parameter: Treatment Value: Drought vs. No Drought
  misc_feature: MA Experiment ID: 20000478 Result: Down-regulated in Transcription
  misc_feature: MA Experiment 20000478 PARAMETER Experiment Name: Zm_5mM_SA_P Parameter: Age (day) Value: 11
  misc_feature: MA Experiment 20000478 PARAMETER Experiment Name: Zm_5mM_SA_P Parameter: Organism Value: Zea mays
  misc_feature: MA Experiment 20000478 PARAMETER Experiment Name: Zm_5mM_SA_P Parameter: Plant Line Value: 35A19
  misc_feature: MA Experiment 20000478 PARAMETER Experiment Name: Zm_5mM_SA_P Parameter: Timepoint (hr) Value: 72
  misc_feature: MA Experiment 20000478 PARAMETER Experiment Name: Zm_5mM_SA_P Parameter: Tissue Value: Aerial
  misc_feature: MA Experiment 20000478 PARAMETER Experiment Name: Zm_5mM_SA_P Parameter: Treatment Value: 5mM SA vs. No Treatment
  misc_feature: MA Experiment ID: 20000479 Result: Down-regulated in Transcription
  misc_feature: MA Experiment 20000479 PARAMETER Experiment Name: Zm_Drought_P Parameter: Age (day) Value: 10
  misc_feature: MA Experiment 20000479 PARAMETER Experiment Name: Zm_Drought_P Parameter: Organism Value: Zea mays
  misc_feature: MA Experiment 20000479 PARAMETER Experiment Name: Zm_Drought_P Parameter: Plant Line Value: 35A19
  misc_feature: MA Experiment 20000479 PARAMETER Experiment Name: Zm_Drought_P Parameter: Timepoint (hr) Value: 48
  misc_feature: MA Experiment 20000479 PARAMETER Experiment Name: Zm_Drought_P Parameter: Tissue Value: Aerial
  misc_feature: MA Experiment 20000479 PARAMETER Experiment Name: Zm_Drought_P Parameter: Treatment Value: Drought vs. No Drought
  misc_feature: MA Experiment ID: 20000480 Result: Down-regulated in Transcription
  misc_feature: MA Experiment 20000480 PARAMETER Experiment Name: Zm_Drought_P Parameter: Age (day) Value: 11
  misc_feature: MA Experiment 20000480 PARAMETER Experiment Name: Zm_Drought_P Parameter: Organism Value: Zea mays
  misc_feature: MA Experiment 20000480 PARAMETER Experiment Name: Zm_Drought_P Parameter: Plant Line Value: 35A19
  misc_feature: MA Experiment 20000480 PARAMETER Experiment Name: Zm_Drought_P Parameter: Timepoint (hr) Value: 72
  misc_feature: MA Experiment 20000480 PARAMETER Experiment Name: Zm_Drought_P Parameter: Tissue Value: Aerial
  misc_feature: MA Experiment 20000480 PARAMETER Experiment Name: Zm_Drought_P Parameter: Treatment Value: Drought vs. No Drought
  misc_feature: MA Experiment ID: 20001610 Result: Down-regulated in Transcription
  misc_feature: MA Experiment 20001610 PARAMETER Experiment Name: Zm_50ppm_KNO3_L-to-H_P Parameter: Age (day) Value: 19
  misc_feature: MA Experiment 20001610 PARAMETER Experiment Name: Zm_50ppm_KNO3_L-to-H_P Parameter: Organism Value: Zea mays
  misc_feature: MA Experiment 20001610 PARAMETER Experiment Name: Zm_50ppm_KNO3_L-to-H_P Parameter: Plant Line Value: 35A19
  misc_feature: MA Experiment 20001610 PARAMETER Experiment Name: Zm_50ppm_KNO3_L-to-H_P Parameter: Timepoint (hr) Value: 2
  misc_feature: MA Experiment 20001610 PARAMETER Experiment Name: Zm_50ppm_KNO3_L-to-H_P Parameter: Tissue Value: Roots
  misc_feature: MA Experiment 20001610 PARAMETER Experiment Name: Zm_50ppm_KNO3_L-to-H_P Parameter: Treatment Value: 50ppm KNO3 vs. 50ppm KCl
tccccttctggtcgaatcgttattatcagtgggctagaacatactaatgcgagtgctgtgctgctaaatctaatctgcgtgcgattggtcgatgggcaggttcggtggagatcgccgccgttggcgtttcgatcgccatatttaaccaagtctccaaggtctgcatctaccctctcgttagcgtcacaacgtcgttcgtcgcggaggaagacgcgatcatcagtaaggccgtccgaggaaacagcagccaggaggaggacgtggagaaagcctcccacgtgggctttgatccggagaccagcaatctgcatgcatctggccctgcaggtatggcagaatgcgtgaactcgtgtatccctacggagtgcgcagcagatccctctggcaggcaagggcggtgcgagaagaggtacgtgccgtcggtcacgtcggcgctaatagtcggttccattctcggcctgcttcaggccgtcttcctggtcctttcggccagattcgtgctcaacatcatgggtgttaagtccggatccccgatgcaagggcctgcggtgcgctacctaacgataaggtcccttggtgcccccgctgtgctgctgtctctggccatgcaaggggttttccgggggttcaaggacaccaagacaccgttatacgctactgtggttggcgacgcggcgaacatcatactggacccgattttgatgtttgtttgccatatgggcgtcactggtgcggctattgctcatgttgtttctcagtacatgataacgttgatactgctgtgccggctcgtccagcgagttcacgttatcccacccagcattaaatctctgaaatttgggaggtttcttggatgtggattcctgctgctcgcaagggttgtcgcggtgacgttctgcgtcacgctggcggcgtccctggccgctcgccatggacccaccgtcatggcaggcttccagatctgctgccagctctggctggccacgtctcttctcgccgatggattggccgtggcaggacaggcggtgcttgcaagcgcgttcgccaagaacgacagtaagaaggtcgctgccgcgacatcccgtgtgttgcagctgagcattgtcctgggcatgggtctcaccgtcgtgctgggacttgctatgaggttcggggctggcattttcacaagcgacgtgcccgtgatccaagtcattcacagaggcatcccgtttgtcgccgggacgcagaccatcaattccctggccttcgtgtttgatggcatcaactttgcagcgtcagactacagatactctgcttactccatggttgctgttgcgtctgtgtcgataccatgcctgctgtacctttctgcgcataacggattcatcggtatatggatcgcattgacgatctacatgagtctgaggaccatagctagcacctggaggatgggggcagcgaggggaccatggacgtttctccggaactgatgatggattggcttggaactgatgatctgcggcacactgctgacagataaggctgcgccgcgctgcgcatgcgcctctcatgtagcatcagcgaagtatagtacgtgttctgctggtgtttaaagcttcggatatcggaggtagatgtagctatgggactatcccctcctgatcgtctgacttgtggccttgcgtggagagtttacgttgctccgttgatttatgttgtatcatgccaggatgtcagtttaataccatacatcggtaaagtgtctctct

SEQ ID NO: 11886 - protein, 380 aa, Zea mays subsp. mays
  peptide (1)..(380): Ceres Seq. ID no. 12345722
  misc_feature (1)..(326): Homolog of NCBI NO: 19386721 NR Description: P0678F11.10 [Oryza sativa (japonica
  misc_feature (1)..(379): Homolog of NCBI NO: 15231918 NR Description: MATE efflux family protein, putative; protein id: supported by cDNA: gi_15912322, supported by cDNA: gi_15982819, by cDNA: gi_19310968 [Arabidopsis thaliana] protein [Arabidopsis
  misc_feature (1)..(367): Homolog of NCBI NO: 25405456 NR Description: hypothetical protein F11M15.20 [imported] - thaliana >gi|4836944|gb|AAD30646.1|AC006085_19 Hypothetical
  misc_feature (1)..(368): Homolog of NCBI NO: 37532300 NR Description: putative membrane protein [Oryza sativa (japonica group)] >gi|18958689|gb|AAL82672.1| putative membrane protein
  misc_feature (1)..(302): Homolog of NCBI NO: 20270057 NR Description: Putative membrane protein [Oryza sativa (japonica
  misc_feature (327)..(368): Homolog of NCBI NO: 20270057 NR Description: Putative membrane protein [Oryza sativa (japonica
  misc_feature (26)..(378): Homolog of NCBI NO: 30687474 NR Description: MATE efflux protein family [Arabidopsis thaliana] unknown protein [Arabidopsis thaliana]
  misc_feature (26)..(368): Homolog of NCBI NO: 7487160 NR Description: hypothetical protein At2g38330 [imported] - thaliana >gi|3395439|gb|AAC28771.1| hypothetical protein
  misc_feature (1)..(225): Homolog of NCBI NO: 18403476 NR Description: expressed protein; protein id: At1g51340.1, by cDNA: gi_16604696, supported by cDNA: gi_20259590 [Arabidopsis
  misc_feature (35)..(375): Homolog of NCBI NO: 29830828 NR Description: putative DNA-damage-inducible protein F
MAECVNSCIPTECAADPSGRQGRCEKRYVPSVTSALIVGSILGLLQAVFLVLSARFVLNIMGVKSGSPMQGPAVRYLTIRSLGAPAVLLSLAMQGVFRGFKDTKTPLYATVVGDAANIILDPILMFVCHMGVTGAAIAHVVSQYMITLILLCRLVQRVHVIPPSIKSLKFGRFLGCGFLLLARVVAVTFCVTLAASLAARHGPTVMAGFQICCQLWLATSLLADGLAVAGQAVLASAFAKNDSKKVAAATSRVLQLSIVLGMGLTVVLGLAMRFGAGIFTSDVPVIQVIHRGIPFVAGTQTINSLAFVFDGINFAASDYRYSAYSMVAVASVSIPCLLYLSAHNGFIGIWIALTIYMSLRTIASTWRMGAARGPWTFLRN

SEQ ID NO: 11887 - protein, 320 aa, Zea mays subsp. mays
  peptide (1)..(320): Ceres Seq. ID no. 12345723
  misc_feature (1)..(266): Homolog of NCBI NO: 19386721 NR Description: P0678F11.10 [Oryza sativa (japonica
  misc_feature (1)..(319): Homolog of NCBI NO: 15231918 NR Description: MATE efflux family protein, putative; protein id: supported by cDNA: gi_15912322, supported by cDNA: gi_15982819, by cDNA: gi_19310968 [Arabidopsis thaliana] protein [Arabidopsis
  misc_feature (1)..(307): Homolog of NCBI NO: 25405456 NR Description: hypothetical protein F11M15.20 [imported] - thaliana >gi|4836944|gb|AAD30646.1|AC006085_19 Hypothetical
  misc_feature (1)..(308): Homolog of NCBI NO: 37532300 NR Description: putative membrane protein [Oryza sativa (japonica group)] >gi|18958689|gb|AAL82672.1| putative membrane protein
  misc_feature (1)..(242): Homolog of NCBI NO: 20270057 NR Description: Putative membrane protein [Oryza sativa (japonica
  misc_feature (267)..(308): Homolog of NCBI NO: 20270057 NR Description: Putative membrane protein [Oryza sativa (japonica
  misc_feature (1)..(318): Homolog of NCBI NO: 30687474 NR Description: MATE efflux protein family [Arabidopsis thaliana] unknown protein [Arabidopsis thaliana]
  misc_feature (1)..(308): Homolog of NCBI NO: 7487160 NR Description: hypothetical protein At2g38330 [imported] - thaliana >gi|3395439|gb|AAC28771.1| hypothetical protein
  misc_feature (1)..(165): Homolog of NCBI NO: 18403476 NR Description: expressed protein; protein id: At1g51340.1, by cDNA: gi_16604696, supported by cDNA: gi_20259590 [Arabidopsis
  misc_feature (1)..(315): Homolog of NCBI NO: 29830828 NR Description: putative DNA-damage-inducible protein F
MGVKSGSPMQGPAVRYLTIRSLGAPAVLLSLAMQGVFRGFKDTKTPLYATVVGDAANIILDPILMFVCHMGVTGAAIAHVVSQYMITLILLCRLVQRVHVIPPSIKSLKFGRFLGCGFLLLARVVAVTFCVTLAASLAARHGPTVMAGFQICCQLWLATSLLADGLAVAGQAVLASAFAKNDSKKVAAATSRVLQLSIVLGMGLTVVLGLAMRFGAGIFTSDVPVIQVIHRGIPFVAGTQTINSLAFVFDGINFAASDYRYSAYSMVAVASVSIPCLLYLSAHNGFIGIWIALTIYMSLRTIASTWRMGAARGPWTFLRN

SEQ ID NO: 11888 - protein, 312 aa, Zea mays subsp. mays
  peptide (1)..(312): Ceres Seq. ID no. 12345724
  misc_feature (1)..(258): Homolog of NCBI NO: 19386721 NR Description: P0678F11.10 [Oryza sativa (japonica
  misc_feature (1)..(311): Homolog of NCBI NO: 15231918 NR Description: MATE efflux family protein, putative; protein id: supported by cDNA: gi_15912322, supported by cDNA: gi_15982819, by cDNA: gi_19310968 [Arabidopsis thaliana] protein [Arabidopsis
  misc_feature (1)..(299): Homolog of NCBI NO: 25405456 NR Description: hypothetical protein F11M15.20 [imported] - thaliana >gi|4836944|gb|AAD30646.1|AC006085_19 Hypothetical
  misc_feature (1)..(300): Homolog of NCBI NO: 37532300 NR Description: putative membrane protein [Oryza sativa (japonica group)] >gi|18958689|gb|AAL82672.1| putative membrane protein
  misc_feature (1)..(234): Homolog of NCBI NO: 20270057 NR Description: Putative membrane protein [Oryza sativa (japonica
  misc_feature (259)..(300): Homolog of NCBI NO: 20270057 NR Description: Putative membrane protein [Oryza sativa (japonica
  misc_feature (1)..(310): Homolog of NCBI NO: 30687474 NR Description: MATE efflux protein family [Arabidopsis thaliana] unknown protein [Arabidopsis thaliana]
  misc_feature (1)..(300): Homolog of NCBI NO: 7487160 NR Description: hypothetical protein At2g38330 [imported] - thaliana >gi|3395439|gb|AAC28771.1| hypothetical protein
  misc_feature (1)..(157): Homolog of NCBI NO: 18403476 NR Description: expressed protein; protein id: At1g51340.1, by cDNA: gi_16604696, supported by cDNA: gi_20259590 [Arabidopsis
  misc_feature (1)..(307): Homolog of NCBI NO: 29830828 NR Description: putative DNA-damage-inducible protein F
MQGPAVRYLTIRSLGAPAVLLSLAMQGVFRGFKDTKTPLYATVVGDAANIILDPILMFVCHMGVTGAAIAHVVSQYMITLILLCRLVQRVHVIPPSIKSLKFGRFLGCGFLLLARVVAVTFCVTLAASLAARHGPTVMAGFQICCQLWLATSLLADGLAVAGQAVLASAFAKNDSKKVAAATSRVLQLSIVLGMGLTVVLGLAMRFGAGIFTSDVPVIQVIHRGIPFVAGTQTINSLAFVFDGINFAASDYRYSAYSMVAVASVSIPCLLYLSAHNGFIGIWIALTIYMSLRTIASTWRMGAARGPWTFLRN

SEQ ID NO: 11889 - DNA, 1389 bp, Zea mays subsp. mays
  misc_feature (1)..(1389): Ceres Seq. ID no. 12411729
  misc_feature: MA Experiment ID: 20000492 Result: Up-regulated in Transcription
  misc_feature: MA Experiment 20000492 PARAMETER Experiment Name: Zm_Hybrid_Seed_Dev_P Parameter: DAP Value: 12
  misc_feature: MA Experiment 20000492 PARAMETER Experiment Name: Zm_Hybrid_Seed_Dev_P Parameter: Organism Value: Zea mays
  misc_feature: MA Experiment 20000492 PARAMETER Experiment Name: Zm_Hybrid_Seed_Dev_P Parameter: Plant Line Value: 35A19
  misc_feature: MA Experiment 20000492 PARAMETER Experiment Name: Zm_Hybrid_Seed_Dev_P Parameter: Tissue Value: Fert Kernel vs. Unfert Floret
acctcttaattaccctttcggtaccgcgatgccctaactcggtgcttttgcagcagccactcgctccacaagtacgcgccgctggactggtccgcctacttcgacgaggagcgccgcgtacgcatccccgacaccgacaacgttttcaatgcgtacacgaccggatcggaggggcccgtcgtgttctgcctgcacggaggcggttattcggggctttcatttgctctagcagcaagtcaaatgaaggacaaggctcgtgttgttgccatggatctaagggggcatggaaaatcaacaacgaatgatgatctggatttgtccattgaaactcttaccaatgatgtcatagctgttatacgtacaatgtatggagatttgccaccagcaattatacttgttgggcatagcatgggcggttcagtggctatacatgtggctgcaagaaaagaaattagaaatcttcatgggcttgttgtcgttgatgttgtcgagggaacagcaatggcttcattagttcatatgcagaagatcttagcaaaccgggcacagcattttcctagcattgaaaaagcaattgaatggagtgtcaaaggtgggccattaaggaacatcgagtctgctcgtgtgtccattccatctaccctgaaatacgatgaatcacgagaatgctatacatatcgcactcctcttgagcaaacagaaaagtactggaaaggatggtatgaaggtctttcagacaagttcctatcttgcccagtgcaaaagatcctgttgttagctggtaccgacagactggacagttggtttacaatttgcagagctttaacaatcggtcaaatgcaaggaaaatttcaaatggtggtgattcggcacactggacatgctatacaggaagatgtacctgaagaatttgcatcgcacatactgaagttcatatcccgcaacaaaatagggcctaacggtgttgagatacctgggctcattaaaaaatggcagcagtagacataatgtacaagttaccgttctggaaaatgttcaggaaaatgatgagtaggtctgcctatccgagttctcttcatatcgaattaaaaaaaggttcaagatgatcatgcgatcgttaacaatcagtcattggtttcgtcatctgttggcaactctcccatgtcgcttgagttgctttgtttctgacatcactctgcgacctgccggcgtcttttgtacgagggttcttgtatgtttttaggtagagctgagtgcagtgcgttgtaatgctttccgtgaggttattatactgctatcaagcaggatcagctcgttatgacagctctgtttcgaatttctgctggcctcggcaagtttgatgggaataaatcgaagaagccttctttg

SEQ ID NO: 11890 - protein, 253 aa, Zea mays subsp. mays
  peptide (1)..(253): Ceres Seq. ID no. 12411730
  misc_feature (5)..(229): Pfam Name: alpha/beta hydrolase fold Pfam Description: alpha/beta hydrolase fold
  misc_feature (1)..(253): Homolog of NCBI NO: 18413291 NR Description: lipase-like protein; protein id: At4g10050.1, by cDNA: 6822., supported by cDNA: gi_14423411, supported by
  misc_feature (1)..(139): Homolog of NCBI NO: 30794138 NR Description: protein phosphatase methylesterase 1 [Mus
  misc_feature (144)..(241): Homolog of NCBI NO: 30794138 NR Description: protein phosphatase methylesterase 1 [Mus
  misc_feature (1)..(139): Homolog of NCBI NO: 34858774 NR Description: similar to Protein phosphatase methylesterase 1
  misc_feature (144)..(241): Homolog of NCBI NO: 34858774 NR Description: similar to Protein phosphatase methylesterase 1
  misc_feature (1)..(139): Homolog of NCBI NO: 20809834 NR Description: RIKEN cDNA 2700017M01 gene [Mus musculus]
  misc_feature (144)..(241): Homolog of NCBI NO: 20809834 NR Description: RIKEN cDNA 2700017M01 gene [Mus musculus]
  misc_feature (1)..(139): Homolog of NCBI NO: 7706645 NR Description: protein phosphatase methylesterase-1 [Homo
  misc_feature (144)..(241): Homolog of NCBI NO: 7706645 NR Description: protein phosphatase methylesterase-1 [Homo
  misc_feature (1)..(136): Homolog of NCBI NO: 28277941 NR Description: Similar to RIKEN cDNA 2700017M01 gene [Danio
MKDKARVVAMDLRGHGKSTTNDDLDLSIETLTNDVIAVIRTMYGDLPPAIILVGHSMGGSVAIHVAARKEIRNLHGLVVVDVVEGTAMASLVHMQKILANRAQHFPSIEKAIEWSVKGGPLRNIESARVSIPSTLKYDESRECYTYRTPLEQTEKYWKGWYEGLSDKFLSCPVQKILLLAGTDRLDSWFTICRALTIGQMQGKFQMVVIRHTGHAIQEDVPEEFASHILKFISRNKIGPNGVEIPGLIKKWQQ

SEQ ID NO: 11891 - protein, 244 aa, Zea mays subsp. mays
  peptide (1)..(244): Ceres Seq. ID no. 12411731
  misc_feature (1)..(220): Pfam Name: alpha/beta hydrolase fold Pfam Description: alpha/beta hydrolase fold
  misc_feature (135)..(232): Homolog of NCBI NO: 30794138 NR Description: protein phosphatase methylesterase 1 [Mus
  misc_feature (1)..(130): Homolog of NCBI NO: 34858774 NR Description: similar to Protein phosphatase methylesterase 1
  misc_feature (135)..(232): Homolog of NCBI NO: 34858774 NR Description: similar to Protein phosphatase methylesterase 1
  misc_feature (1)..(130): Homolog of NCBI NO: 20809834 NR Description: RIKEN cDNA 2700017M01 gene [Mus musculus]
  misc_feature (1)..(244): Homolog of NCBI NO: 18413291 NR Description: lipase-like protein; protein id: At4g10050.1, by cDNA: 6822., supported by cDNA: gi_14423411, supported by
  misc_feature (1)..(130): Homolog of NCBI NO: 30794138 NR Description: protein phosphatase methylesterase 1 [Mus
  misc_feature (135)..(232): Homolog of NCBI NO: 20809834 NR Description: RIKEN cDNA 2700017M01 gene [Mus musculus]
  misc_feature (1)..(130): Homolog of NCBI NO: 7706645 NR Description: protein phosphatase methylesterase-1 [Homo
  misc_feature (135)..(232): Homolog of NCBI NO: 7706645 NR Description: protein phosphatase methylesterase-1 [Homo
  misc_feature (1)..(127): Homolog of NCBI NO: 28277941 NR Description: Similar to RIKEN cDNA 2700017M01 gene [Danio
MDLRGHGKSTTNDDLDLSIETLTNDVIAVIRTMYGDLPPAIILVGHSMGGSVAIHVAARKEIRNLHGLVVVDVVEGTAMASLVHMQKILANRAQHFPSIEKAIEWSVKGGPLRNIESARVSIPSTLKYDESRECYTYRTPLEQTEKYWKGWYEGLSDKFLSCPVQKILLLAGTDRLDSWFTICRALTIGQMQGKFQMVVIRHTGHAIQEDVPEEFASHILKFISRNKIGPNGVEIPGLIKKWQQ

SEQ ID NO: 11892 - protein, 212 aa, Zea mays subsp. mays
  peptide (1)..(212): Ceres Seq. ID no. 12411732
  misc_feature (1)..(188): Pfam Name: alpha/beta hydrolase fold Pfam Description: alpha/beta hydrolase fold
  misc_feature (1)..(212): Homolog of NCBI NO: 18413291 NR Description: lipase-like protein; protein id: At4g10050.1, by cDNA: 6822., supported by cDNA: gi_14423411, supported by
  misc_feature (1)..(98): Homolog of NCBI NO: 30794138 NR Description: protein phosphatase methylesterase 1 [Mus
  misc_feature (103)..(200): Homolog of NCBI NO: 30794138 NR Description: protein phosphatase methylesterase 1 [Mus
  misc_feature (1)..(98): Homolog of NCBI NO: 34858774 NR Description: similar to Protein phosphatase methylesterase 1
  misc_feature (103)..(200): Homolog of NCBI NO: 34858774 NR Description: similar to Protein phosphatase methylesterase 1
  misc_feature (1)..(98): Homolog of NCBI NO: 20809834 NR Description: RIKEN cDNA 2700017M01 gene [Mus musculus]
  misc_feature (103)..(200): Homolog of NCBI NO: 20809834 NR Description: RIKEN cDNA 2700017M01 gene [Mus musculus]
  misc_feature (1)..(98): Homolog of NCBI NO: 7706645 NR Description: protein phosphatase methylesterase-1 [Homo
  misc_feature (103)..(200): Homolog of NCBI NO: 7706645 NR Description: protein phosphatase methylesterase-1 [Homo
  misc_feature (1)..(95): Homolog of NCBI NO: 28277941 NR Description: Similar to RIKEN cDNA 2700017M01 gene [Danio
MYGDLPPAIILVGHSMGGSVAIHVAARKEIRNLHGLVVVDVVEGTAMASLVHMQKILANRAQHFPSIEKAIEWSVKGGPLRNIESARVSIPSTLKYDESRECYTYRTPLEQTEKYWKGWYEGLSDKFLSCPVQKILLLAGTDRLDSWFTICRALTIGQMQGKFQMVVIRHTGHAIQEDVPEEFASHILKFISRNKIGPNGVEIPGLIKKWQQ

SEQ ID NO: 11893 - DNA, 677 bp, Zea mays subsp. mays
  misc_feature (1)..(677): Ceres Seq. ID no. 12341262
  misc_feature: MA Experiment ID: 108527 Result: Down-regulated in Transcription
  misc_feature: MA Experiment 108527 PARAMETER Experiment Name: Zm_5mM_NO_P Parameter: Age (day) Value: 8
  misc_feature: MA Experiment 108527 PARAMETER Experiment Name: Zm_5mM_NO_P Parameter: Organism Value: Zea mays
  misc_feature: MA Experiment 108527 PARAMETER Experiment Name: Zm_5mM_NO_P Parameter: Plant Line Value: 35A19
  misc_feature: MA Experiment 108527 PARAMETER Experiment Name: Zm_5mM_NO_P Parameter: Timepoint (hr) Value: 6
  misc_feature: MA Experiment 108527 PARAMETER Experiment Name: Zm_5mM_NO_P Parameter: Tissue Value: Aerial
  misc_feature: MA Experiment 108527 PARAMETER Experiment Name: Zm_5mM_NO_P Parameter: Treatment Value: 5mM NO vs. No Treatment
acgaacggtggaagagtacgcctcggaatcagaggagcagcgaggaagctgaaggaggggcgaatctaagcccaattgaagcatgagggcgtcgattaatcgtcccccgacgccgagcgcggaggaggatcgggacaagcagccttctctcggagagatcattaacatcaagttggtagagactggggagaaggagaagctaatggagctactccgcgagcgactcgctgagtgcggctggagggatgagatgaaggcactctgcagggcctatgcaaggaagaaaggaagaaataatgtgacagtagatgacctcattcatgttattactccgaaaggaagagcatccgtgcctgattcagtgaaggcagaactcctgcaacgcatccggtccttccttatgtctaccacacttcggtagtcatttgtcgcgacggttggagcctatatgtaccattgtaggatcattgggaagtcgatcttgttggggaccaaaggtgcaggaaagcagtgcgtaggggaatattgtgagcatgaaaagaaacagtgtgatcttcatgacactgtcgacatgttcctcgtcaggcgcaggcggttggcgtaatttcaggtgtaccaatagagttgtaagttgtaacccctgaatactgtattgttaaagcaaccttccaccttgt

SEQ ID NO: 11894 - protein, 112 aa, Zea mays subsp. mays
  peptide (1)..(112): Ceres Seq. ID no. 12341263
  misc_feature (1)..(111): Homolog of NCBI NO: 30688637 NR Description: expressed protein [Arabidopsis thaliana]
  misc_feature (18)..(106): Homolog of NCBI NO: 9910186 NR Description: DC6 protein [Homo sapiens] hypothetical protein 6720481I12 [Mus musculus] similar to DC6 protein [Homo sapiens] [Rattus norvegicus]
  misc_feature (18)..(106): Homolog of NCBI NO: 34866121 NR Description: similar to DC6 protein [Rattus norvegicus]
  misc_feature (1)..(65): Homolog of NCBI NO: 19386734 NR Description: P0678F11.23 [Oryza sativa (japonica
  misc_feature (8)..(106): Homolog of NCBI NO: 38086720 NR Description: similar to DC6 protein; e(y)2 homolog; enhancer
  misc_feature (32)..(106): Homolog of NCBI NO: 17864496 NR Description: enhancer of yellow 2 CG15191-PA
  misc_feature (1)..(64): Homolog of NCBI NO: 9279634 NR Description: gene_id:MOJ10.18~unknown protein [Arabidopsis
  misc_feature (36)..(106): Homolog of NCBI NO: 24644735 NR Description: CG14612-PA [Drosophila melanogaster]
MRASINRPPTPSAEEDRDKQPSLGEIINIKLVETGEKEKLMELLRERLAECGWRDEMKALCRAYARKKGRNNVTVDDLIHVITPKGRASVPDSVKAELLQRIRSFLMSTTLR

SEQ ID NO: 11895 - protein, 72 aa, Zea mays subsp. mays
  peptide (1)..(72): Ceres Seq. ID no. 12341264
  misc_feature (1)..(71): Homolog of NCBI NO: 30688637 NR Description: expressed protein [Arabidopsis thaliana]
  misc_feature (1)..(66): Homolog of NCBI NO: 9910186 NR Description: DC6 protein [Homo sapiens] hypothetical protein 6720481I12 [Mus musculus] similar to DC6 protein [Homo sapiens] [Rattus norvegicus]
  misc_feature (1)..(66): Homolog of NCBI NO: 34866121 NR Description: similar to DC6 protein [Rattus norvegicus]
  misc_feature (1)..(25): Homolog of NCBI NO: 19386734 NR Description: P0678F11.23 [Oryza sativa (japonica
  misc_feature (1)..(66): Homolog of NCBI NO: 38086720 NR Description: similar to DC6 protein; e(y)2 homolog; enhancer
  misc_feature (1)..(66): Homolog of NCBI NO: 17864496 NR Description: enhancer of yellow 2 CG15191-PA
  misc_feature (1)..(24): Homolog of NCBI NO: 9279634 NR Description: gene_id:MOJ10.18~unknown protein [Arabidopsis
  misc_feature (1)..(66): Homolog of NCBI NO: 24644735 NR Description: CG14612-PA [Drosophila melanogaster]
MELLRERLAECGWRDEMKALCRAYARKKGRNNVTVDDLIHVITPKGRASVPDSVKAELLQRIRSFLMSTTLR

SEQ ID NO: 11896 - protein, 56 aa, Zea mays subsp. mays
  peptide (1)..(56): Ceres Seq. ID no. 12341265
  misc_feature (1)..(55): Homolog of NCBI NO: 30688637 NR Description: expressed protein [Arabidopsis thaliana]
  misc_feature (1)..(50): Homolog of NCBI NO: 9910186 NR Description: DC6 protein [Homo sapiens] hypothetical protein 6720481I12 [Mus musculus] similar to DC6 protein [Homo sapiens] [Rattus norvegicus]
  misc_feature (1)..(50): Homolog of NCBI NO: 34866121 NR Description: similar to DC6 protein [Rattus norvegicus]
  misc_feature (1)..(50): Homolog of NCBI NO: 38086720 NR Description: similar to DC6 protein; e(y)2 homolog; enhancer
  misc_feature (1)..(50): Homolog of NCBI NO: 17864496 NR Description: enhancer of yellow 2 CG15191-PA
  misc_feature (1)..(50): Homolog of NCBI NO: 24644735 NR Description: CG14612-PA [Drosophila melanogaster]
MKALCRAYARKKGRNNVTVDDLIHVITPKGRASVPDSVKAELLQRIRSFLMSTTLR

SEQ ID NO: 11897 - DNA, 1251 bp, Zea mays subsp. mays
  misc_feature (1)..(1251): Ceres Seq. ID no. 12403165
  misc_feature: MA Experiment ID: 20000534 Result: Down-regulated in Transcription
  misc_feature: MA Experiment 20000534 PARAMETER Experiment Name: Zm_Hybrid_Pollen_P Parameter: Age (day) Value: 8
  misc_feature: MA Experiment 20000534 PARAMETER Experiment Name: Zm_Hybrid_Pollen_P Parameter: Organism Value: Zea mays
  misc_feature: MA Experiment 20000534 PARAMETER Experiment Name: Zm_Hybrid_Pollen_P Parameter: Plant Line Value: 35A19
  misc_feature: MA Experiment 20000534 PARAMETER Experiment Name: Zm_Hybrid_Pollen_P Parameter: Tissue Value: Pollen vs. Aerial
gagatttggattgtcacgtaattcgtttccctgtcctccccctctcgctgagctgagcccacctactccctcccaccacttgcattcacacactcgattccgctgctctctccctcttcctctcccccgcggcggagccataaaccctaggcctcgccgtcgtcggaggcgccgccgcgatgtcgcactttggaaggacgggtccgccggacatccgcgacaccttctcgctgctcgtcctcaacatcagcttccgaaccacggccgacgaccttttcccgctcttcgagcgctgcggcaaggtcgtcgacgtcttcatcccgagggaccgcaggaccggggactcgaggggttttgcgttcgtgcggtacaagtacgccgacgaggcgcagaaggctatagatcggctcgatggccgtaatgtggatgggaggaacatcatggtgcagtttgcaaagtacggccccaatgctgtgccaatccacaaaggaagggtcaaagagggggttgagaaatcaagagacaggtcaaggagccgtagtccaaggccaaggcacagagacagagatgatagaaggcgaagtcgcagcaggagcaggagcaggagcagagaaagacatgtccatgatagagatagggactatcgtcgtcggagcagaagtagaagccgaagtatgagttcaagccctgaccacaaaagtcatcgcagagcaagagatgatgttaagcgcaagagcagaagcaagagtagaagcaagagcaggagcaggagtagaagccgctcataccacagttcttcacctgcccggcgcagtgctagccctcccaagagcccactgccacagaggagccccactcctgaaaagcatgccaatggaaaagattcacctctgtcacgcagtgtatctccatcaccgaagcgtgcaagctcccgcagcctaggcagcgatagcaaggaataaagcttgttgatctggtgatgcttaaagagcagtcttcccatgggattgcagaacgttgagaaggctgtttgaatatgatggcagtaccaatctgcaatcaaccgctatccaaggttgctagttgttcttttaatgacttctagaattgtgttttccagttgtcaaaatatgctgttggtttgtatttcgacctctattgtctttttatacccttgtactgcatcatctactttatgtgcatccgtttcttgactccatattaatttgttaaaacatttgtgcattttct

SEQ ID NO: 11898 - protein, 260 aa, Zea mays subsp. mays
  peptide (1)..(260): Ceres Seq. ID no. 12403166
  misc_feature (18)..(89): Pfam Name: RNA recognition motif. (a.k.a. RRM, RBD, or RNP domain) Pfam Description: RNA recognition motif. (a.k.a. RRM, RBD, or RNP
  misc_feature (18)..(89): Pfam Name: RNA recognition motif. (a.k.a. RRM, RBD, or RNP domain) Pfam Description: RNA recognition motif. (a.k.a. RRM, RBD, or RNP
  misc_feature (1)..(258): Homolog of NCBI NO: 7446336 NR Description: probable arginine/serine-rich splicing factor -
  misc_feature (1)..(259): Homolog of NCBI NO: 33146621 NR Description: putative splicing factor, arginine/serine-rich 2
  misc_feature (1)..(260): Homolog of NCBI NO: 15237641 NR Description: arginine/serine-rich splicing factor SC35; id: At5g64200.1, supported by cDNA: gi_17380867 [Arabidopsis >gi|17380868|gb|AAL36246.1| unknown protein [Arabidopsis
  misc_feature (1)..(259): Homolog of NCBI NO: 9843653 NR Description: splicing factor SC35 [Arabidopsis thaliana]
  misc_feature (4)..(219): Homolog of NCBI NO: 28279759 NR Description: Similar to splicing factor, arginine/serine-rich
  misc_feature (1)..(259): Homolog of NCBI NO: 33146621 NR Description: putative splicing factor, arginine/serine-rich 2
  misc_feature (1)..(259): Homolog of NCBI NO: 9843653 NR Description: splicing factor SC35 [Arabidopsis thaliana]
  misc_feature (4)..(219): Homolog of NCBI NO: 4506899 NR Description: splicing factor, arginine/serine-rich 2 [Homo
  misc_feature (4)..(219): Homolog of NCBI NO: 39794351 NR Description: Unknown (protein for MGC:75633) [Silurana
  misc_feature (4)..(219): Homolog of NCBI NO: 28175397 NR Description: Unknown (protein for MGC:53177) [Xenopus laevis]
  misc_feature (4)..(219): Homolog of NCBI NO: 6755478 NR Description: splicing factor, arginine/serine-rich 2; DNA Chr 11, Wayne State University 175, expressed; splicing factor [Mus musculus] >gi|27691222|ref|XP_213556.1| similar to
  misc_feature (4)..(219): Homolog of NCBI NO: 266991 NR Description: Splicing factor, arginine/serine-rich 2 (Splicing
  misc_feature (4)..(219): Homolog of NCBI NO: 28279759 NR Description: Similar to splicing factor, arginine/serine-rich
  misc_feature (1)..(260): Homolog of NCBI NO: 15237641 NR Description: arginine/serine-rich splicing factor SC35; id: At5g64200.1, supported by cDNA: gi_17380867 [Arabidopsis >gi|17380868|gb|AAL36246.1| unknown protein [Arabidopsis
  misc_feature (1)..(258): Homolog of NCBI NO: 7446336 NR Description: probable arginine/serine-rich splicing factor -
  misc_feature (4)..(219): Homolog of NCBI NO: 266991 NR Description: Splicing factor, arginine/serine-rich 2 (Splicing
  misc_feature (4)..(219): Homolog of NCBI NO: 6755478 NR Description: splicing factor, arginine/serine-rich 2; DNA Chr 11, Wayne State University 175, expressed; splicing factor [Mus musculus] >gi|27691222|ref|XP_213556.1| similar to
  misc_feature (4)..(219): Homolog of NCBI NO: 28175397 NR Description: Unknown (protein for MGC:53177) [Xenopus laevis]
  misc_feature (4)..(219): Homolog of NCBI NO: 39794351 NR Description: Unknown (protein for MGC:75633) [Silurana
  misc_feature (4)..(219): Homolog of NCBI NO: 4506899 NR Description: splicing factor, arginine/serine-rich 2 [Homo
MSHFGRTGPPDIRDTFSLLVLNISFRTTADDLFPLFERCGKVVDVFIPRDRRTGDSRGFAFVRYKYADEAQKAIDRLDGRNVDGRNIMVQFAKYGPNAVPIHKGRVKEGVEKSRDRSRSRSPRPRHRDRDDRRRSRSRSRSRSRERHVHDRDRDYRRRSRSRSRSMSSSPDHKSHRRARDDVKRKSRSKSRSKSRSRSRSRSYHSSSPARRSASPPKSPLPQRSPTPEKHANGKDSPLSRSVSPSPKRASSRSLGSDSKE

SEQ ID NO: 11899 - protein, 173 aa, Zea mays subsp. mays
  peptide (1)..(173): Ceres Seq. ID no. 12403167
  misc_feature (25)..(73): Pfam Name: Protamine P1 Pfam Description: Protamine P1
  misc_feature (25)..(73): Pfam Name: Protamine P1 Pfam Description: Protamine P1
  misc_feature (1)..(171): Homolog of NCBI NO: 7446336 NR Description: probable arginine/serine-rich splicing factor -
  misc_feature (1)..(172): Homolog of NCBI NO: 33146621 NR Description: putative splicing factor, arginine/serine-rich 2
  misc_feature (1)..(173): Homolog of NCBI NO: 15237641 NR Description: arginine/serine-rich splicing factor SC35; id: At5g64200.1, supported by cDNA: gi_17380867 [Arabidopsis >gi|17380868|gb|AAL36246.1| unknown protein [Arabidopsis
  misc_feature (1)..(172): Homolog of NCBI NO: 9843653 NR Description: splicing factor SC35 [Arabidopsis thaliana]
  misc_feature (1)..(132): Homolog of NCBI NO: 28279759 NR Description: Similar to splicing factor, arginine/serine-rich
  misc_feature (1)..(172): Homolog of NCBI NO: 33146621 NR Description: putative splicing factor, arginine/serine-rich 2
  misc_feature (1)..(172): Homolog of NCBI NO: 9843653 NR Description: splicing factor SC35 [Arabidopsis thaliana]
  misc_feature (1)..(132): Homolog of NCBI NO: 4506899 NR Description: splicing factor, arginine/serine-rich 2 [Homo
  misc_feature (1)..(132): Homolog of NCBI NO: 39794351 NR Description: Unknown (protein for MGC:75633) [Silurana
  misc_feature (1)..(132): Homolog of NCBI NO: 28175397 NR Description: Unknown (protein for MGC:53177) [Xenopus laevis]
  misc_feature (1)..(132): Homolog of NCBI NO: 6755478 NR Description: splicing factor, arginine/serine-rich 2; DNA Chr 11, Wayne State University 175, expressed; splicing factor [Mus musculus] >gi|27691222|ref|XP_213556.1| similar to
  misc_feature (1)..(132): Homolog of NCBI NO: 266991 NR Description: Splicing factor, arginine/serine-rich 2 (Splicing
  misc_feature (1)..(132): Homolog of NCBI NO: 28279759 NR Description: Similar to splicing factor, arginine/serine-rich
  misc_feature (1)..(173): Homolog of NCBI NO: 15237641 NR Description: arginine/serine-rich splicing factor SC35; id: At5g64200.1, supported by cDNA: gi_17380867 [Arabidopsis >gi|17380868|gb|AAL36246.1| unknown protein [Arabidopsis
  misc_feature (1)..(171): Homolog of NCBI NO: 7446336 NR Description: probable arginine/serine-rich splicing factor -
  misc_feature (1)..(132): Homolog of NCBI NO: 266991 NR Description: Splicing factor, arginine/serine-rich 2 (Splicing
  misc_feature (1)..(132): Homolog of NCBI NO: 6755478 NR Description: splicing factor, arginine/serine-rich 2; DNA Chr 11, Wayne State University 175, expressed; splicing factor [Mus musculus] >gi|27691222|ref|XP_213556.1| similar to
  misc_feature (1)..(132): Homolog of NCBI NO: 28175397 NR Description: Unknown (protein for MGC:53177) [Xenopus laevis]
  misc_feature (1)..(132): Homolog of NCBI NO: 39794351 NR Description: Unknown (protein for MGC:75633) [Silurana
  misc_feature (1)..(132): Homolog of NCBI NO: 4506899 NR Description: splicing factor, arginine/serine-rich 2 [Homo
MVQFAKYGPNAVPIHKGRVKEGVEKSRDRSRSRSPRPRHRDRDDRRRSRSRSRSRSRERHVHDRDRDYRRRSRSRSRSMSSSPDHKSHRRARDDVKRKSRSKSRSKSRSRSRSRSYHSSSPARRSASPPKSPLPQRSPTPEKHANGKDSPLSRSVSPSPKRASSRSLGSDSKE

SEQ ID NO: 11900 - protein, 139 aa, Zea mays subsp. mays
  peptide (1)..(139): Ceres Seq. ID no. 12403168
RFGLSRNSFPCPPPLAELSPPTPSHHLHSHTRFRCSLPLPLPRGGAINPRPRRRRRRRRDVALWKDGSAGHPRHLLAARPQHQLPNHGRRPFPALRALRQGRRRLHPEGPQDRGLEGFCVRAVQVRRRGAEGYRSARWP

SEQ ID NO: 11901 - DNA, 935 bp, Zea mays subsp. mays
  misc_feature (1)..(935): Ceres Seq. ID no. 12402277
  misc_feature: MA Experiment ID: 108530 Result: Up-regulated in Transcription
  misc_feature: MA Experiment 108530 PARAMETER Experiment Name: Zm_Imbibed_Seeds_P Parameter: Age (day) Value: 6 vs. 2
  misc_feature: MA Experiment 108530 PARAMETER Experiment Name: Zm_Imbibed_Seeds_P Parameter: Organism Value: Zea mays
  misc_feature: MA Experiment 108530 PARAMETER Experiment Name: Zm_Imbibed_Seeds_P Parameter: Plant Line Value: 35A19
  misc_feature: MA Experiment 108530 PARAMETER Experiment Name: Zm_Imbibed_Seeds_P Parameter: Tissue Value: Aerial vs. Embryo
  misc_feature: MA Experiment ID: 20000535 Result: Down-regulated in Transcription
  misc_feature: MA Experiment 20000535 PARAMETER Experiment Name: Zm_Hybrid_Seed_Dev_P Parameter: DAP Value: 30 vs. 12
  misc_feature: MA Experiment 20000535 PARAMETER Experiment Name: Zm_Hybrid_Seed_Dev_P Parameter: Organism Value: Zea mays
  misc_feature: MA Experiment 20000535 PARAMETER Experiment Name: Zm_Hybrid_Seed_Dev_P Parameter: Plant Line Value: 35A19
  misc_feature: MA Experiment 20000535 PARAMETER Experiment Name: Zm_Hybrid_Seed_Dev_P Parameter: Tissue Value: Embryo vs. Unfert Floret
aagctcactcaagaacccgccacgaccaaacagtacgtagtgcgcgtcgagctagcccggcaggtagacatggcgcccagcaaggccgtggtggcacacctcgtggtgctattagtgccctgcttgctctccgtgctgcccttctcctccctcgctctgacccaggacttatgcgtcgcgaacatgctcctcccagatacgccgtccggctacccgtgcaagcccaaaggtctcgtcagctccgacgacttctactccgacgccttggccaggcctggcccggtcatcgcccccttcaacaccagcctggcctccgccgccgttaaacagctccccggcctgaatggcctcggcatcgccgccacgcgtgtcgatgtccaaccaggtggggtcgtgcccatgcacaaccacccggaagcctcggagctcatcttcctcctcgaaggaacccttttcgctggcttcatcagcgccgaaaccaataaggcctatgtcaagagcctaaagaagggcgacctctacgtgttcccgcagggcttgctgcacttccagttcaacaccggcaacacgaccgccaccgccatcgccgcgtacagcaaccagaaccccggcctacagatcgctgtctatgcactcttcggcaacaccctcacagtggaaacggtgaataagaccaccttcgtaacaaaggaggaggtcatgaggctcaaggacctcttcggccagtcttcagtgccatcctgattaacgctcgccaggattaattaatatgcatgctcctagatgtacgtttatatatggggtgtaataataaattgcgtgtgtgtgcacgtacgttcaacctatatcgtcatcgtcatgtagtatatatttctcgactatatatattgtaccctcgggaaggaccgatgtttaaggcatcagtggctctattt

SEQ ID NO: 11902 - protein, 247 aa, Zea mays subsp. mays
  peptide (1)..(247): Ceres Seq. ID no. 12402278
  misc_feature (89)..(233): Pfam Name: Cupin Pfam Description: Cupin
  misc_feature (37)..(243): Homolog of NCBI NO: 13160411 NR Description: adenosine diphosphate glucose pyrophosphatase
  misc_feature (37)..(243): Homolog of NCBI NO: 7447326 NR Description: germin-like protein 1 - barley
  misc_feature (37)..(243): Homolog of NCBI NO: 21322655 NR Description: adenosine diphosphate glucose pyrophosphatase
  misc_feature (36)..(243): Homolog of NCBI NO: 2655293 NR Description: germin-like protein 5 [Oryza sativa]
  misc_feature (36)..(243): Homolog of NCBI NO: 7447327 NR Description: germin-like protein - rice
  misc_feature (36)..(243): Homolog of NCBI NO: 4239821 NR Description: germin-like protein 1 [Oryza sativa]
  misc_feature (42)..(241): Homolog of NCBI NO: 31711507 NR Description: 24K germin like protein [Nicotiana tabacum]
  misc_feature (42)..(241): Homolog of NCBI NO: 1934726 NR Description: germin-like protein [Arabidopsis thaliana]
  misc_feature (42)..(241): Homolog of NCBI NO: 15218535 NR Description: germin-like protein; protein id: At1g72610.1, by cDNA: 20068., supported by cDNA: gi_17473702, supported by gi_1755155, supported by cDNA: gi_1755157, supported by cDNA:
  misc_feature (42)..(241): Homolog of NCBI NO: 17473703 NR Description: germin-like protein [Arabidopsis thaliana]
KLTQEPATTKQYVVRVELARQVDMAPSKAVVAHLVVLLVPCLLSVLPFSSLALTQDLCVANMLLPDTPSGYPCKPKGLVSSDDFYSDALARPGPVIAPFNTSLASAAVKQLPGLNGLGIAATRVDVQPGGVVPMHNHPEASELIFLLEGTLFAGFISAETNKAYVKSLKKGDLYVFPQGLLHFQFNTGNTTATAIAAYSNQNPGLQIAVYALFGNTLTVETVNKTTFVTKEEVMRLKDLFGQSSVPS

SEQ ID NO: 11903 - protein, 224 aa, Zea mays subsp. mays
  peptide (1)..(224): Ceres Seq. ID no. 12402279
  misc_feature (66)..(210): Pfam Name: Cupin Pfam Description: Cupin
  misc_feature (14)..(220): Homolog of NCBI NO: 13160411 NR Description: adenosine diphosphate glucose pyrophosphatase
  misc_feature (14)..(220): Homolog of NCBI NO: 7447326 NR Description: germin-like protein 1 - barley
  misc_feature (14)..(220): Homolog of NCBI NO: 21322655 NR Description: adenosine diphosphate glucose pyrophosphatase
  misc_feature (13)..(220): Homolog of NCBI NO: 2655293 NR Description: germin-like protein 5 [Oryza sativa]
  misc_feature (13)..(220): Homolog of NCBI NO: 7447327 NR Description: germin-like protein - rice
  misc_feature (13)..(220): Homolog of NCBI NO: 4239821 NR Description: germin-like protein 1 [Oryza sativa]
  misc_feature (19)..(218): Homolog of NCBI NO: 31711507 NR Description: 24K germin like protein [Nicotiana tabacum]
  misc_feature (19)..(218): Homolog of NCBI NO: 1934726 NR Description: germin-like protein [Arabidopsis thaliana]
  misc_feature (19)..(218): Homolog of NCBI NO: 15218535 NR Description: germin-like protein; protein id: At1g72610.1, by cDNA: 20068., supported by cDNA: gi_17473702, supported by gi_1755155, supported by cDNA: gi_1755157, supported by cDNA:
  misc_feature (19)..(218): Homolog of NCBI NO: 17473703 NR Description: germin-like protein [Arabidopsis thaliana]
MAPSKAVVAHLVVLLVPCLLSVLPFSSLALTQDLCVANMLLPDTPSGYPCKPKGLVSSDDFYSDALARPGPVIAPFNTSLASAAVKQLPGLNGLGIAATRVDVQPGGVVPMHNHPEASELIFLLEGTLFAGFISAETNKAYVKSLKKGDLYVFPQGLLHFQFNTGNTTATAIAAYSNQNPGLQIAVYALFGNTLTVETVNKTTFVTKEEVMRLKDLFGQSSVPS

SEQ ID NO: 11904 - protein, 186 aa, Zea mays subsp. mays
  peptide (1)..(186): Ceres Seq. ID no. 12402280
  misc_feature (28)..(172): Pfam Name: Cupin Pfam Description: Cupin
  misc_feature (1)..(182): Homolog of NCBI NO: 13160411 NR Description: adenosine diphosphate glucose pyrophosphatase
  misc_feature (1)..(182): Homolog of NCBI NO: 7447326 NR Description: germin-like protein 1 - barley
  misc_feature (1)..(182): Homolog of NCBI NO: 21322655 NR Description: adenosine diphosphate glucose pyrophosphatase
  misc_feature (1)..(182): Homolog of NCBI NO: 2655293 NR Description: germin-like protein 5 [Oryza sativa]
  misc_feature (1)..(182): Homolog of NCBI NO: 7447327 NR Description: germin-like protein - rice
  misc_feature (1)..(182): Homolog of NCBI NO: 4239821 NR Description: germin-like protein 1 [Oryza sativa]
  misc_feature (1)..(180): Homolog of NCBI NO: 31711507 NR Description: 24K germin like protein [Nicotiana tabacum]
  misc_feature (1)..(180): Homolog of NCBI NO: 1934726 NR Description: germin-like protein [Arabidopsis thaliana]
  misc_feature (1)..(180): Homolog of NCBI NO: 17473703 NR Description: germin-like protein [Arabidopsis thaliana]
  misc_feature (1)..(180): Homolog of NCBI NO: 15218535 NR Description: germin-like protein; protein id: At1g72610.1, by cDNA: 20068., supported by cDNA: gi_17473702, supported by gi_1755155, supported by cDNA: gi_1755157, supported by cDNA:
MLLPDTPSGYPCKPKGLVSSDDFYSDALARPGPVIAPFNTSLASAAVKQLPGLNGLGIAATRVDVQPGGVVPMHNHPEASELIFLLEGTLFAGFISAETNKAYVKSLKKGDLYVFPQGLLHFQFNTGNTTATAIAAYSNQNPGLQIAVYALFGNTLTVETVNKTTFVTKEEVMRLKDLFGQSSVPS

SEQ ID NO: 11905 - DNA, 802 bp, Zea mays subsp. mays
  misc_feature (1)..(802): Ceres Seq. ID no. 12404643
  misc_feature: MA Experiment ID: 108527 Result: Down-regulated in Transcription
  misc_feature: MA Experiment 108527 PARAMETER Experiment Name: Zm_5mM_NO_P Parameter: Age (day) Value: 8
  misc_feature: MA Experiment 108527 PARAMETER Experiment Name: Zm_5mM_NO_P Parameter: Organism Value: Zea mays
  misc_feature: MA Experiment 108527 PARAMETER Experiment Name: Zm_5mM_NO_P Parameter: Plant Line Value: 35A19
  misc_feature: MA Experiment 108527 PARAMETER Experiment Name: Zm_5mM_NO_P Parameter: Timepoint (hr) Value: 6
  misc_feature: MA Experiment 108527 PARAMETER Experiment Name: Zm_5mM_NO_P Parameter: Tissue Value: Aerial
  misc_feature: MA Experiment 108527 PARAMETER Experiment Name: Zm_5mM_NO_P Parameter: Treatment Value: 5mM NO vs. No Treatment
  misc_feature: MA Experiment ID: 108528 Result: Up-regulated in Transcription
  misc_feature: MA Experiment 108528 PARAMETER Experiment Name: Zm_Imbibed_Seeds_P Parameter: Age (day) Value: 5 vs. 2
  misc_feature: MA Experiment 108528 PARAMETER Experiment Name: Zm_Imbibed_Seeds_P Parameter: Organism Value: Zea mays
  misc_feature: MA Experiment 108528 PARAMETER Experiment Name: Zm_Imbibed_Seeds_P Parameter: Plant Line Value: 35A19
  misc_feature: MA Experiment 108528 PARAMETER Experiment Name: Zm_Imbibed_Seeds_P Parameter: Tissue Value: Aerial vs. Embryo
  misc_feature: MA Experiment ID: 108529 Result: Down-regulated in Transcription
  misc_feature: MA Experiment 108529 PARAMETER Experiment Name: Zm_Imbibed_Seeds_P Parameter: Age (day) Value: 5 vs. 2
  misc_feature: MA Experiment 108529 PARAMETER Experiment Name: Zm_Imbibed_Seeds_P Parameter: Organism Value: Zea mays
  misc_feature: MA Experiment 108529 PARAMETER Experiment Name: Zm_Imbibed_Seeds_P Parameter: Plant Line Value: 35A19
  misc_feature: MA Experiment 108529 PARAMETER Experiment Name: Zm_Imbibed_Seeds_P Parameter: Tissue Value: Roots vs. Embryo
  misc_feature: MA Experiment ID: 108530 Result: Up-regulated in Transcription
  misc_feature: MA Experiment 108530 PARAMETER Experiment Name: Zm_Imbibed_Seeds_P Parameter: Age (day) Value: 6 vs. 2
  misc_feature: MA Experiment 108530 PARAMETER Experiment Name: Zm_Imbibed_Seeds_P Parameter: Organism Value: Zea mays
  misc_feature: MA Experiment 108530 PARAMETER Experiment Name: Zm_Imbibed_Seeds_P Parameter: Plant Line Value: 35A19
  misc_feature: MA Experiment 108530 PARAMETER Experiment Name: Zm_Imbibed_Seeds_P Parameter: Tissue Value: Aerial vs. Embryo
  misc_feature: MA Experiment ID: 108536 Result: Down-regulated in Transcription
  misc_feature: MA Experiment 108536 PARAMETER Experiment Name: Zm_Meristem_P Parameter: Age (day) Value: 8
  misc_feature: MA Experiment 108536 PARAMETER Experiment Name: Zm_Meristem_P Parameter: Organism Value: Zea mays
  misc_feature: MA Experiment 108536 PARAMETER Experiment Name: Zm_Meristem_P Parameter: Plant Line Value: 35A19
  misc_feature: MA Experiment 108536 PARAMETER Experiment Name: Zm_Meristem_P Parameter: Tissue Value: Shoot Meristem vs. Above Shoot Meristem
  misc_feature: MA Experiment ID: 108544 Result: Down-regulated in Transcription
  misc_feature: MA Experiment ID: 108545 Result: Up-regulated in Transcription
  misc_feature: MA Experiment 108545 PARAMETER Experiment Name: Zm_Imbibed_Seeds_P Parameter: Age (day) Value: 3 vs. 2
  misc_feature: MA Experiment 108545 PARAMETER Experiment Name: Zm_Imbibed_Seeds_P Parameter: Organism Value: Zea mays
  misc_feature: MA Experiment 108545 PARAMETER Experiment Name: Zm_Imbibed_Seeds_P Parameter: Plant Line Value: 35A19
  misc_feature: MA Experiment 108545 PARAMETER Experiment Name: Zm_Imbibed_Seeds_P Parameter: Tissue Value: Aerial vs. Embryo
  misc_feature: MA Experiment ID: 108546 Result: Down-regulated in Transcription
  misc_feature: MA Experiment 108546 PARAMETER Experiment Name: Zm_Imbibed_Seeds_P Parameter: Age (day) Value: 3 vs. 2
  misc_feature: MA Experiment 108546 PARAMETER Experiment Name: Zm_Imbibed_Seeds_P Parameter: Organism Value: Zea mays
  misc_feature: MA Experiment 108546 PARAMETER Experiment Name: Zm_Imbibed_Seeds_P Parameter: Plant Line Value: 35A19
  misc_feature: MA Experiment 108546 PARAMETER Experiment Name: Zm_Imbibed_Seeds_P Parameter: Tissue Value: Roots vs. Embryo
  misc_feature: MA Experiment ID: 108547 Result: Up-regulated in Transcription
  misc_feature: MA Experiment 108547 PARAMETER Experiment Name: Zm_Imbibed_Seeds_P Parameter: Age (day) Value: 4 vs. 2
  misc_feature: MA Experiment 108547 PARAMETER Experiment Name: Zm_Imbibed_Seeds_P Parameter: Organism Value: Zea mays
  misc_feature: MA Experiment 108547 PARAMETER Experiment Name: Zm_Imbibed_Seeds_P Parameter: Plant Line Value: 35A19
  misc_feature: MA Experiment 108547 PARAMETER Experiment Name: Zm_Imbibed_Seeds_P Parameter: Tissue Value: Aerial vs. Embryo
  misc_feature: MA Experiment ID: 108556 Result: Down-regulated in Transcription
  misc_feature: MA Experiment 108556 PARAMETER Experiment Name: Zm_Drought_P Parameter: Age (day) Value: 9
  misc_feature: MA Experiment 108556 PARAMETER Experiment Name: Zm_Drought_P Parameter: Organism Value: Zea mays
  misc_feature: MA Experiment 108556 PARAMETER Experiment Name: Zm_Drought_P Parameter: Plant Line Value: 35A19
  misc_feature: MA Experiment 108556 PARAMETER Experiment Name: Zm_Drought_P Parameter: Timepoint (hr) Value: 24
  misc_feature: MA Experiment 108556 PARAMETER Experiment Name: Zm_Drought_P Parameter: Tissue Value: Aerial
  misc_feature: MA Experiment 108556 PARAMETER Experiment Name: Zm_Drought_P Parameter: Treatment Value: Drought vs. No Drought
  misc_feature: MA Experiment ID: 108559 Result: Down-regulated in Transcription
  misc_feature: MA Experiment 108559 PARAMETER Experiment Name: Zm_5mM_NO_P Parameter: Age (day) Value: 8
  misc_feature: MA Experiment 108559 PARAMETER Experiment Name: Zm_5mM_NO_P Parameter: Organism Value: Zea mays
  misc_feature: MA Experiment 108559 PARAMETER Experiment Name: Zm_5mM_NO_P Parameter: Plant Line Value: 35A19
  misc_feature: MA Experiment 108559 PARAMETER Experiment Name: Zm_5mM_NO_P Parameter: Timepoint (hr) Value: 12
  misc_feature: MA Experiment 108559 PARAMETER Experiment Name: Zm_5mM_NO_P Parameter: Tissue Value: Aerial
  misc_feature: MA Experiment 108559 PARAMETER Experiment Name: Zm_5mM_NO_P Parameter: Treatment Value: 5mM NO vs. No Treatment
  misc_feature: MA Experiment ID: 20000480 Result: Down-regulated in Transcription
  misc_feature: MA Experiment 20000480 PARAMETER Experiment Name: Zm_Drought_P Parameter: Age (day) Value: 11
  misc_feature: MA Experiment 20000480 PARAMETER Experiment Name: Zm_Drought_P Parameter: Organism Value: Zea mays
  misc_feature: MA Experiment 20000480 PARAMETER Experiment Name: Zm_Drought_P Parameter: Plant Line Value: 35A19
  misc_feature: MA Experiment 20000480 PARAMETER Experiment Name: Zm_Drought_P Parameter: Timepoint (hr) Value: 72
  misc_feature: MA Experiment 20000480 PARAMETER Experiment Name: Zm_Drought_P Parameter: Tissue Value: Aerial
  misc_feature: MA Experiment 20000480 PARAMETER Experiment Name: Zm_Drought_P Parameter: Treatment Value: Drought vs. No Drought
acagggactgtgagatcaagtcaatagctccatatggtgcttttgttgaaattgctccagggcgtgagggtttatgtcatatcagtgagttaagttcgggctggttggccaaggctgaggatgcttttaaagttggagatcgcatagacgtcaagcttattgagataaacgataagggtcaacttcggctaagttctcgagctttgcttccagacgtggattccgaatccaacataggttcaacaaaagaaaaggtgccacaaaaagatgatgtcataaaaatgacaacaaagagaccaaggcgcaagaaacagtctgagccgtctggagctgaaaatgccacaacaaaggctcttgcgaaaagcgctgctgctccagctggttcaaagggcagtgaagcgtagtaggatgtggacagcttggtgccttaatcagacgattgactggccaagctagggatacatccttcaaccgactatatgatggtcataggcatgagaaagagttcagacatgagggcacaactgtctaaacaggaatataatggagaagaattggttgatcgacctcgatgttagacaggtagagtgtctggttgatgcgttacacaaggcgtgcgcctatccagcagtaatggtgcccaggactggatcgtcgccctggttagcagaacagatcgcgtaaccaccatggaaacttgattgtaatcgccagaatagtttgtttacctttacctttgtgttgtaccgttctgtactaactacatattcttgccaatccggccaatgcaaactactgcgtg

SEQ ID NO: 11906 - protein, 133 aa, Zea mays subsp. mays
  peptide (1)..(133): Ceres Seq. ID no. 12404644
  misc_feature (1)..(66): Pfam Name: S1 RNA binding domain Pfam Description: S1 RNA binding domain
  misc_feature (1)..(132): Homolog of NCBI NO: 34395006 NR Description: putative polynucleotide phosphorylase [Oryza
  misc_feature (1)..(117): Homolog of NCBI NO: 7488820 NR Description: polyribonucleotide nucleotidyltransferase (EC - garden pea >gi|2286200|gb|AAC50039.1| polynucleotide
  misc_feature (1)..(129): Homolog of NCBI NO: 30678905 NR Description: polyribonucleotide nucleotidyltransferase, [Arabidopsis thaliana] >gi|25991185|gb|AAN76771.1|AF450480_1
  misc_feature (1)..(129): Homolog of NCBI NO: 6006870 NR Description: putative polynucleotide phosphorylase thaliana] >gi|6091752|gb|AAF03462.1|AC009327_1 putative
  misc_feature (1)..(129): Homolog of NCBI NO: 7413616 NR Description: putative polynucleotide phosphorylase
  misc_feature (1)..(63): Homolog of NCBI NO: 1924972 NR Description: polyribonucleotide phophorylase
  misc_feature (4)..(108): Homolog of NCBI NO: 22992785 NR Description: hypothetical protein [Enterococcus faecium]
  misc_feature (5)..(71): Homolog of NCBI NO: 15605577 NR Description: Polyribonucleotide Nucleotidyltransferase
  misc_feature (5)..(69): Homolog of NCBI NO: 15618907 NR Description: Polyribonucleotide Nucleotidyltransferase pneumoniae CWL029] >gi|15836530|ref|NP_301054.1| nucleotidyltransferase [Chlamydophila pneumoniae J138]
  misc_feature (5)..(69): Homolog of NCBI NO: 15834850 NR Description: polyribonucleotide nucleotidyltransferase muridarum] >gi|11279139|pir||G81725 polyribonucleotide
RDCEIKSIAPYGAFVEIAPGREGLCHISELSSGWLAKAEDAFKVGDRIDVKLIEINDKGQLRLSSRALLPDVDSESNIGSTKEKVPQKDDVIKMTTKRPRRKKQSEPSGAENATTKALAKSAAAPAGSKGSEA

SEQ ID NO: 11907 - DNA, 1314 bp, Zea mays subsp. mays
  misc_feature (1)..(1314): Ceres Seq. ID no. 12341153
  misc_feature: MA Experiment ID: 108530 Result: Down-regulated in Transcription
  misc_feature: MA Experiment 108530 PARAMETER Experiment Name: Zm_Imbibed_Seeds_P Parameter: Age (day) Value: 6 vs. 2
  misc_feature: MA Experiment 108530 PARAMETER Experiment Name: Zm_Imbibed_Seeds_P Parameter: Organism Value: Zea mays
  misc_feature: MA Experiment 108530 PARAMETER Experiment Name: Zm_Imbibed_Seeds_P Parameter: Plant Line Value: 35A19
  misc_feature: MA Experiment 108530 PARAMETER Experiment Name: Zm_Imbibed_Seeds_P Parameter: Tissue Value: Aerial vs. Embryo
  misc_feature: MA Experiment ID: 108556 Result: Down-regulated in Transcription
  misc_feature: MA Experiment 108556 PARAMETER Experiment Name: Zm_Drought_P Parameter: Age (day) Value: 9
  misc_feature: MA Experiment 108556 PARAMETER Experiment Name: Zm_Drought_P Parameter: Organism Value: Zea mays
  misc_feature: MA Experiment 108556 PARAMETER Experiment Name: Zm_Drought_P Parameter: Plant Line Value: 35A19
  misc_feature: MA Experiment 108556 PARAMETER Experiment Name: Zm_Drought_P Parameter: Timepoint (hr) Value: 24
  misc_feature: MA Experiment 108556 PARAMETER Experiment Name: Zm_Drought_P Parameter: Tissue Value: Aerial
  misc_feature: MA Experiment 108556 PARAMETER Experiment Name: Zm_Drought_P Parameter: Treatment Value: Drought vs. No Drought
  misc_feature: MA Experiment ID: 20000492 Result: Up-regulated in Transcription
  misc_feature: MA Experiment 20000492 PARAMETER Experiment Name: Zm_Hybrid_Seed_Dev_P Parameter: DAP Value: 12
  misc_feature: MA Experiment 20000492 PARAMETER Experiment Name: Zm_Hybrid_Seed_Dev_P Parameter: Organism Value: Zea mays
  misc_feature: MA Experiment 20000492 PARAMETER Experiment Name: Zm_Hybrid_Seed_Dev_P Parameter: Plant Line Value: 35A19
  misc_feature: MA Experiment 20000492 PARAMETER Experiment Name: Zm_Hybrid_Seed_Dev_P Parameter: Tissue Value: Fert Kernel vs. Unfert Floret
atcaagtctcatgtgcacgcctccattagcctcgcattgacgcggtccgcaactcctctaaacccttcctctccctccggcgccggcgccgacatggccgtccactacctcctccgccgcggggtctccggtggctcactgctccaccctatccgcggtctcttcctcgcctccaaggagcttgggaggcgtccgttgggctctgcggcggcgggagacgcagcggccgagctgaggggcgcgcgggaggacgtcaggcagctgctcaaggccacctcctgccatcccatcctggttcgattaggttggcatgatgctggtacatatgacaagaacattaccgagtggcccaagtgtggtggagctaatggtagcttgagattcgaagtcgagttgaagcatggggccaatgctggtcttgtgaatgctctgaagctgatccaacctatcaaggacaagttttcaggtgttacctatgcagatctgtttcagcttgccagcgccacagccattgaggaagcaggtggccccaaaattcctatgatctatggaagggttgatgttattgcccccgaacaatgcccaccagaggggaggcttcctgctgctggcccaccttcacccgcggaacatttgcgtgaagtattctacagaatgggcctgaacgacaaggaaatcgttgcactgtcaggagctcatacacttggacgtgcaagaccagagcgtagtggctggggtaaatcagaaacaaagtacactaaagatgggcctggtgcacctgggggacaatcttggacatctcaatggctcaagtttgacaacagctatttcaaggcatcgaagaaaggcgagatgaagacctcctagttctgcctactgatgctgtgctgtttgaggattcctcattcaagatctatgctacaaaatatgccaaggatcaggacacatttttcgaggactacgctgaagctcatgccaaattgagcaatcttggggcaaagtttgacccgccaaagggtatctcactcgagtagttgtggatggaggtgactgaacaggaaggggtcatgtttctttgcgtgaccattttcgaaggttggcaaggaaaagttattgtagttgaatgatagctccacaaattggattcaccgattaaaggattttttttcttagcgtgccctgtttttttagtagtgtcctacactatgaataaagcaacacctgtcattttaagatttgttacactaactaactgaaagcttccgaatcctaagtggtttcggtgattaatgacgacataagaccgttataact

SEQ ID NO: 11908 - protein, 288 aa, Zea mays subsp. mays
  peptide (1)..(288): Ceres Seq. ID no. 12341154
  misc_feature (81)..(282): Pfam Name: Peroxidase Pfam Description: Peroxidase
  misc_feature (70)..(282): Homolog of NCBI NO: 4996602 NR Description: thylakoid-bound ascorbate peroxidase [Nicotiana
  misc_feature (70)..(282): Homolog of NCBI NO: 4996604 NR Description: stromal ascorbate peroxidase [Nicotiana tabacum]
  misc_feature (70)..(282): Homolog of NCBI NO: 3202026 NR Description: stromal L-ascorbate peroxidase precursor
  misc_feature (70)..(282): Homolog of NCBI NO: 7484621 NR Description: L-ascorbate peroxidase (EC 1.11.1.11) precursor -
  misc_feature (70)..(282): Homolog of NCBI NO: 34809902 NR Description: Chain A, Crystal Structure Of Chloroplastic Peroxidase From Tobacco Plants And Structural Insights For Its >gi|22535513|dbj|BAC10691.1| stromal ascorbate peroxidase
  misc_feature (68)..(282): Homolog of NCBI NO: 24496465 NR Description: stromal ascorbate peroxidase [Retama raetam]
  misc_feature (68)..(282): Homolog of NCBI NO: 32879781 NR Description: stromal ascorbate peroxidase [Oryza sativa
  misc_feature (77)..(282): Homolog of NCBI NO: 2392025 NR Description: stromal ascorbate peroxidase [Cucurbita cv.
  misc_feature (77)..(282): Homolog of NCBI NO: 7484766 NR Description: L-ascorbate peroxidase (EC 1.11.1.11) precursor -
  misc_feature (70)..(282): Homolog of NCBI NO: 21039134 NR Description: ascorbate peroxidase [Lycopersicon esculentum]
IKSHVHASISLALTRSATPLNPSSPSGAGADMAVHYLLRRGVSGGSLLHPIRGLFLASKELGRRPLGSAAAGDAAAELRGAREDVRQLLKATSCHPILVRLGWHDAGTYDKNITEWPKCGGANGSLRFEVELKHGANAGLVNALKLIQPIKDKFSGVTYADLFQLASATAIEEAGGPKIPMIYGRVDVIAPEQCPPEGRLPAAGPPSPAEHLREVFYRMGLNDKEIVALSGAHTLGRARPERSGWGKSETKYTKDGPGAPGGQSWTSQWLKFDNSYFKASKKGEMKTS

SEQ ID NO: 11909 - protein, 257 aa, Zea mays subsp. mays
  peptide (1)..(257): Ceres Seq. ID no. 12341155
  misc_feature (50)..(251): Pfam Name: Peroxidase Pfam Description: Peroxidase
  misc_feature (39)..(251): Homolog of NCBI NO: 4996602 NR Description: thylakoid-bound ascorbate peroxidase [Nicotiana
  misc_feature (39)..(251): Homolog of NCBI NO: 4996604 NR Description: stromal ascorbate peroxidase [Nicotiana tabacum]
  misc_feature (39)..(251): Homolog of NCBI NO: 3202026 NR Description: stromal L-ascorbate peroxidase precursor
  misc_feature (39)..(251): Homolog of NCBI NO: 7484621 NR Description: L-ascorbate peroxidase (EC 1.11.1.11) precursor -
  misc_feature (39)..(251): Homolog of NCBI NO: 34809902 NR Description: Chain A, Crystal Structure Of Chloroplastic Peroxidase From Tobacco Plants And Structural Insights For Its >gi|22535513|dbj|BAC10691.1| stromal ascorbate peroxidase
  misc_feature (37)..(251): Homolog of NCBI NO: 24496465 NR Description: stromal ascorbate peroxidase [Retama raetam]
  misc_feature (37)..(251): Homolog of NCBI NO: 32879781 NR Description: stromal ascorbate peroxidase [Oryza sativa
  misc_feature (46)..(251): Homolog of NCBI NO: 2392025 NR Description: stromal ascorbate peroxidase [Cucurbita cv.
  misc_feature (46)..(251): Homolog of NCBI NO: 7484766 NR Description: L-ascorbate peroxidase (EC 1.11.1.11) precursor -
  misc_feature (39)..(251): Homolog of NCBI NO: 21039134 NR Description: ascorbate peroxidase [Lycopersicon esculentum]
MAVHYLLRRGVSGGSLLHPIRGLFLASKELGRRPLGSAAAGDAAAELRGAREDVRQLLKATSCHPILVRLGWHDAGTYDKNITEWPKCGGANGSLRFEVELKHGANAGLVNALKLIQPIKDKFSGVTYADLFQLASATAIEEAGGPKIPMIYGRVDVIAPEQCPPEGRLPAAGPPSPAEHLREVFYRMGLNDKEIVALSGAHTLGRARPERSGWGKSETKYTKDGPGAPGGQSWTSQWLKFDNSYFKASKKGEMKTS

SEQ ID NO: 11910 - DNA, 1377 bp, Zea mays subsp. mays
  misc_feature (1)..(1377): Ceres Seq. ID no. 12435077
  misc_feature: MA Experiment ID: 108535 Result: Up-regulated in Transcription
  misc_feature: MA Experiment 108535 PARAMETER Experiment Name: Zm_Meristem_P Parameter: Age (day) Value: 8
  misc_feature: MA Experiment 108535 PARAMETER Experiment Name: Zm_Meristem_P Parameter: Organism Value: Zea mays
  misc_feature: MA Experiment 108535 PARAMETER Experiment Name: Zm_Meristem_P Parameter: Plant Line Value: 35A19
  misc_feature: MA Experiment 108535 PARAMETER Experiment Name: Zm_Meristem_P Parameter: Tissue Value: Root Meristem vs. Above Root Meristem
  misc_feature: MA Experiment ID: 20000478 Result: Up-regulated in Transcription
  misc_feature: MA Experiment 20000478 PARAMETER Experiment Name: Zm_5mM_SA_P Parameter: Age (day) Value: 11
  misc_feature: MA Experiment 20000478 PARAMETER Experiment Name: Zm_5mM_SA_P Parameter: Organism Value: Zea mays
  misc_feature: MA Experiment 20000478 PARAMETER Experiment Name: Zm_5mM_SA_P Parameter: Plant Line Value: 35A19
  misc_feature: MA Experiment 20000478 PARAMETER Experiment Name: Zm_5mM_SA_P Parameter: Timepoint (hr) Value: 72
  misc_feature: MA Experiment 20000478 PARAMETER Experiment Name: Zm_5mM_SA_P Parameter: Tissue Value: Aerial
  misc_feature: MA Experiment 20000478 PARAMETER Experiment Name: Zm_5mM_SA_P Parameter: Treatment Value: 5mM SA vs. No Treatment
  misc_feature: MA Experiment ID: 20000487 Result: Up-regulated in Transcription
  misc_feature: MA Experiment 20000487 PARAMETER Experiment Name: Zm_50mM_NH4NO3_L_to_H_P Parameter: Organism Value: Zea mays
  misc_feature: MA Experiment 20000487 PARAMETER Experiment Name: Zm_50mM_NH4NO3_L_to_H_P Parameter: Timepoint (hr) Value: 4
  misc_feature: MA Experiment 20000487 PARAMETER Experiment Name: Zm_50mM_NH4NO3_L_to_H_P Parameter: Tissue Value: Leaves
  misc_feature: MA Experiment 20000487 PARAMETER Experiment Name: Zm_50mM_NH4NO3_L_to_H_P Parameter: Treatment Value: 50mM NH4NO3 vs. 100mM Mannitol
aacttcaaaggcataggagtaacagtcttcgcacaaatattccctcccccaaggcccgaagccccgaaactttccggatctttcttccgccgcttcatcttctttgcgcaaaactagttttgtttctcgttcttctcttcgatttcggccgaataaagatggcgtcggctgcgcgcctcctcgcgccgttctccaggcgcggcgtcgtctctgtggctctggcgggggtggagaggcggcggccggaggcggcgtcgctcatgggggcgcctgtgctggctacggtggaagcctgcgcttcgatcaaggtcattcctttgtcgaatcagctggctcgatactcgacaactgcatttcagaggtttgggttttcaacttcagccccccaacaagatgataaggagacaaacaagcacacagatgatggggttaatagaagtgttggagcaagtactggagcttcaagtgaagccaataatgtgcctggaaccgagaaggcacaggaagcagattcagaagacctagacctatcaaaggaggaccttgtgaagctgcttcttgagaaagacgaatcattgaagtctaaagatgaagagtttaaagatatgaaggataaggtcctacgcagctatgctgagatggagaatgtccttgccagaacaaagcgtgagtcagagaacaccaagaagtatgccatacagagcttctccaagagcttgttagatgttgcagacaatttgtctcgggcatcatctgttgtcaaggcaagtttctcaaagatagattcatctaacgattctgatgaagctgtaacactactgaaaaccctactagagggtgttgagatgactgagaagcaacttggagaggtcttcaagaagtttggagttgaaaagtttgatcctttgaatgagaagtttgatccaaataggcactatgccattttccaaattcctgatccttcaaaaccatcaggaactgttgctgctgttgtgaaggttggctacatgttacatgatcgtgttcttcgccccgctgaagttggtgtcactgaaggtggtccaactgaagaagagccagaggagtaatctagatcaaacggaggttgctggctgcacgtatatctatgactactgccctttattggttggataagcatacatatcataggttatgtttttaactagatctgtgaggcaaatcactatttttgtagcatgttcaacgaggcaatttgttcaagctagtccagaactctcctttttcttgctcggtaataaaaacgagattgtagaacatgtacatcaccgaaattgcttgccaaagacggattattgcagcctgcattaataggaatactgacaatgagcgtgccgc

SEQ ID NO: 11911 - protein, 361 aa, Zea mays subsp. mays
  peptide (1)..(361): Ceres Seq. ID no. 12435078
  misc_feature (157)..(351): Pfam Name: GrpE Pfam Description: GrpE
  misc_feature (114)..(361): Homolog of NCBI NO: 7485329 NR Description: hypothetical protein F10M23.120 - Arabidopsis >gi|4455201|emb|CAB36524.1| grpE like protein [Arabidopsis >gi|7269530|emb|CAB79533.1| grpE like protein [Arabidopsis
  misc_feature (114)..(361): Homolog of NCBI NO: 18416821 NR Description: grpE like protein; protein id: At4g26780.1, by cDNA: 35284. [Arabidopsis thaliana] grpE like protein [Arabidopsis thaliana]
  misc_feature (55)..(350): Homolog of NCBI NO: 3851640 NR Description: chaperone GrpE type 2 [Nicotiana tabacum]
  misc_feature (57)..(361): Homolog of NCBI NO: 21554173 NR Description: chaperone GrpE-like protein [Arabidopsis thaliana]
  misc_feature (53)..(361): Homolog of NCBI NO: 38636943 NR Description: putative chaperone GrpE [Oryza sativa (japonica group)] >gi|38637387|dbj|BAD03646.1| putative chaperone GrpE
  misc_feature (55)..(358): Homolog of NCBI NO: 3851638 NR Description: chaperone GrpE type 1 [Nicotiana tabacum]
  misc_feature (57)..(361): Homolog of NCBI NO: 15240475 NR Description: chaperone GrpE-like protein; protein id: supported by cDNA: 20790., supported by cDNA: gi_14596128,
  misc_feature (114)..(361): Homolog of NCBI NO: 1669597 NR Description: AR192 [Arabidopsis thaliana]
  misc_feature (105)..(351): Homolog of NCBI NO: 23482781 NR Description: co-chaperone GrpE, putative [Plasmodium yoelii
  misc_feature (198)..(353): Homolog of NCBI NO: 22962327 NR Description: hypothetical protein [Rhodopseudomonas palustris]
LQRHRSNSLRTNIPSPKARSPETFRIFLPPLHLLCAKLVLFLVLLFDFGRIKMASAARLLAPFSRRGVVSVALAGVERRRPEAASLMGAPVLATVEACASIKVIPLSNQLARYSTTAFQRFGFSTSAPQQDDKETNKHTDDGVNRSVGASTGASSEANNVPGTEKAQEADSEDLDLSKEDLVKLLLEKDESLKSKDEEFKDMKDKVLRSYAEMENVLARTKRESENTKKYAIQSFSKSLLDVADNLSRASSVVKASFSKIDSSNDSDEAVTLLKTLLEGVEMTEKQLGEVFKKFGVEKFDPLNEKFDPNRHYAIFQIPDPSKPSGTVAAVVKVGYMLHDRVLRPAEVGVTEGGPTEEEPEE

SEQ ID NO: 11912 - protein, 309 aa, Zea mays subsp. mays
  peptide (1)..(309): Ceres Seq. ID no. 12435079
  misc_feature (105)..(299): Pfam Name: GrpE Pfam Description: GrpE
  misc_feature (1)..(309): Homolog of NCBI NO: 38636943 NR Description: putative chaperone GrpE [Oryza sativa (japonica group)] >gi|38637387|dbj|BAD03646.1| putative chaperone GrpE
  misc_feature (3)..(306): Homolog of NCBI NO: 3851638 NR Description: chaperone GrpE type 1 [Nicotiana tabacum]
  misc_feature (62)..(309): Homolog of NCBI NO: 7485329 NR Description: hypothetical protein F10M23.120 - Arabidopsis >gi|4455201|emb|CAB36524.1| grpE like protein [Arabidopsis >gi|7269530|emb|CAB79533.1| grpE like protein [Arabidopsis
  misc_feature (62)..(309): Homolog of NCBI NO: 18416821 NR Description: grpE like protein; protein id: At4g26780.1, by cDNA: 35284. [Arabidopsis thaliana] grpE like protein [Arabidopsis thaliana]
  misc_feature (3)..(298): Homolog of NCBI NO: 3851640 NR Description: chaperone GrpE type 2 [Nicotiana tabacum]
  misc_feature (5)..(309): Homolog of NCBI NO: 21554173 NR Description: chaperone GrpE-like protein [Arabidopsis thaliana]
  misc_feature (5)..(309): Homolog of NCBI NO: 15240475 NR Description: chaperone GrpE-like protein; protein id: supported by cDNA: 20790., supported by cDNA: gi_14596128,
  misc_feature (62)..(309): Homolog of NCBI NO: 1669597 NR Description: AR192 [Arabidopsis thaliana]
  misc_feature (53)..(299): Homolog of NCBI NO: 23482781 NR Description: co-chaperone GrpE, putative [Plasmodium yoelii
  misc_feature (146)..(301): Homolog of NCBI NO: 22962327 NR Description: hypothetical protein [Rhodopseudomonas palustris]
MASAARLLAPFSRRGVVSVALAGVERRRPEAASLMGAPVLATVEACASIKVIPLSNQLARYSTTAFQRFGFSTSAPQQDDKETNKHTDDGVNRSVGASTGASSEANNVPGTEKAQEADSEDLDLSKEDLVKLLLEKDESLKSKDEEFKDMKDKVLRSYAEMENVLARTKRESENTKKYAIQSFSKSLLDVADNLSRASSVVKASFSKIDSSNDSDEAVTLLKTLLEGVEMTEKQLGEVFKKFGVEKFDPLNEKFDPNRHYAIFQIPDPSKPSGTVAAVVKVGYMLHDRVLRPAEVGVTEGGPTEEEPEE

SEQ ID NO: 11913 - protein, 275 aa, Zea mays subsp. mays
  peptide (1)..(275): Ceres Seq. ID no. 12435080
  misc_feature (71)..(265): Pfam Name: GrpE Pfam Description: GrpE
  misc_feature (1)..(275): Homolog of NCBI NO: 38636943 NR Description: putative chaperone GrpE [Oryza sativa (japonica group)] >gi|38637387|dbj|BAD03646.1| putative chaperone GrpE
  misc_feature (1)..(272): Homolog of NCBI NO: 3851638 NR Description: chaperone GrpE type 1 [Nicotiana tabacum]
  misc_feature (28)..(275): Homolog of NCBI NO: 7485329 NR Description: hypothetical protein F10M23.120 - Arabidopsis >gi|4455201|emb|CAB36524.1| grpE like protein [Arabidopsis >gi|7269530|emb|CAB79533.1| grpE like protein [Arabidopsis
  misc_feature (28)..(275): Homolog of NCBI NO: 18416821 NR Description: grpE like protein; protein id: At4g26780.1, by cDNA: 35284. [Arabidopsis thaliana] grpE like protein [Arabidopsis thaliana]
  misc_feature (1)..(264): Homolog of NCBI NO: 3851640 NR Description: chaperone GrpE type 2 [Nicotiana tabacum]
  misc_feature (1)..(275): Homolog of NCBI NO: 21554173 NR Description: chaperone GrpE-like protein [Arabidopsis thaliana]
  misc_feature (1)..(275): Homolog of NCBI NO: 15240475 NR Description: chaperone GrpE-like protein; protein id: supported by cDNA: 20790., supported by cDNA: gi_14596128,
  misc_feature (28)..(275): Homolog of NCBI NO: 1669597 NR Description: AR192 [Arabidopsis thaliana]
  misc_feature (19)..(265): Homolog of NCBI NO: 23482781 NR Description: co-chaperone GrpE, putative [Plasmodium yoelii
  misc_feature (112)..(267): Homolog of NCBI NO: 22962327 NR Description: hypothetical protein [Rhodopseudomonas palustris]
MGAPVLATVEACASIKVIPLSNQLARYSTTAFQRFGFSTSAPQQDDKETNKHTDDGVNRSVGASTGASSEANNVPGTEKAQEADSEDLDLSKEDLVKLLLEKDESLKSKDEEFKDMKDKVLRSYAEMENVLARTKRESENTKKYAIQSFSKSLLDVADNLSRASSVVKASFSKIDSSNDSDEAVTLLKTLLEGVEMTEKQLGEVFKKFGVEKFDPLNEKFDPNRHYAIFQIPDPSKPSGTVAAVVKVGYMLHDRVLRPAEVGVTEGGPTEEEPEE

SEQ ID NO: 11914 - DNA, 1288 bp, Zea mays subsp. mays
  misc_feature (1)..(1288): Ceres Seq. ID no. 12351736
  misc_feature: MA Experiment ID: 108523 Result: Up-regulated in Transcription
  misc_feature: MA Experiment 108523 PARAMETER Experiment Name: Zm_42deg_Heat_P Parameter: Age (day) Value: 8
  misc_feature: MA Experiment 108523 PARAMETER Experiment Name: Zm_42deg_Heat_P Parameter: Organism Value: Zea mays
  misc_feature: MA Experiment 108523 PARAMETER Experiment Name: Zm_42deg_Heat_P Parameter: Plant Line Value: 35A19
  misc_feature: MA Experiment 108523 PARAMETER Experiment Name: Zm_42deg_Heat_P Parameter: Temperature (deg C) Value: 42 vs. 22
  misc_feature: MA Experiment 108523 PARAMETER Experiment Name: Zm_42deg_Heat_P Parameter: Timepoint (hr) Value: 6
  misc_feature: MA Experiment 108523 PARAMETER Experiment Name: Zm_42deg_Heat_P Parameter: Tissue Value: Aerial
  misc_feature: MA Experiment ID: 108528 Result: Down-regulated in Transcription
  misc_feature: MA Experiment 108528 PARAMETER Experiment Name: Zm_Imbibed_Seeds_P Parameter: Age (day) Value: 5 vs. 2
  misc_feature: MA Experiment 108528 PARAMETER Experiment Name: Zm_Imbibed_Seeds_P Parameter: Organism Value: Zea mays
  misc_feature: MA Experiment 108528 PARAMETER Experiment Name: Zm_Imbibed_Seeds_P Parameter: Plant Line Value: 35A19
  misc_feature: MA Experiment 108528 PARAMETER Experiment Name: Zm_Imbibed_Seeds_P Parameter: Tissue Value: Aerial vs. Embryo
  misc_feature: MA Experiment ID: 108529 Result: Down-regulated in Transcription
  misc_feature: MA Experiment 108529 PARAMETER Experiment Name: Zm_Imbibed_Seeds_P Parameter: Age (day) Value: 5 vs. 2
  misc_feature: MA Experiment 108529 PARAMETER Experiment Name: Zm_Imbibed_Seeds_P Parameter: Organism Value: Zea mays
  misc_feature: MA Experiment 108529 PARAMETER Experiment Name: Zm_Imbibed_Seeds_P Parameter: Plant Line Value: 35A19
  misc_feature: MA Experiment 108529 PARAMETER Experiment Name: Zm_Imbibed_Seeds_P Parameter: Tissue Value: Roots vs. Embryo
  misc_feature: MA Experiment ID: 108530 Result: Down-regulated in Transcription
  misc_feature: MA Experiment 108530 PARAMETER Experiment Name: Zm_Imbibed_Seeds_P Parameter: Age (day) Value: 6 vs. 2
  misc_feature: MA Experiment 108530 PARAMETER Experiment Name: Zm_Imbibed_Seeds_P Parameter: Organism Value: Zea mays
  misc_feature: MA Experiment 108530 PARAMETER Experiment Name: Zm_Imbibed_Seeds_P Parameter: Plant Line Value: 35A19
  misc_feature: MA Experiment 108530 PARAMETER Experiment Name: Zm_Imbibed_Seeds_P Parameter: Tissue Value: Aerial vs. Embryo
  misc_feature: MA Experiment ID: 108534 Result: Up-regulated in Transcription
  misc_feature: MA Experiment 108534 PARAMETER Experiment Name: Zm_4deg_Cold_P Parameter: Age (hr) Value: 8
  misc_feature: MA Experiment 108534 PARAMETER Experiment Name: Zm_4deg_Cold_P Parameter: Organism Value: Zea mays
  misc_feature: MA Experiment 108534 PARAMETER Experiment Name: Zm_4deg_Cold_P Parameter: Plant Line Value: 35A19
  misc_feature: MA Experiment 108534 PARAMETER Experiment Name: Zm_4deg_Cold_P Parameter: Temperature (deg C) Value: 4 vs. 22
  misc_feature: MA Experiment 108534 PARAMETER Experiment Name: Zm_4deg_Cold_P Parameter: Timepoint (hr) Value: 6
  misc_feature: MA Experiment 108534 PARAMETER Experiment Name: Zm_4deg_Cold_P Parameter: Tissue Value: Aerial
  misc_feature: MA Experiment ID: 108535 Result: Up-regulated in Transcription
  misc_feature: MA Experiment 108535 PARAMETER Experiment Name: Zm_Meristem_P Parameter: Age (day) Value: 8
  misc_feature: MA Experiment 108535 PARAMETER Experiment Name: Zm_Meristem_P Parameter: Organism Value: Zea mays
  misc_feature: MA Experiment 108535 PARAMETER Experiment Name: Zm_Meristem_P Parameter: Plant Line Value: 35A19
  misc_feature: MA Experiment 108535 PARAMETER Experiment Name: Zm_Meristem_P Parameter: Tissue Value: Root Meristem vs. Above Root Meristem
  misc_feature: MA Experiment ID: 108536 Result: Up-regulated in Transcription
  misc_feature: MA Experiment 108536 PARAMETER Experiment Name: Zm_Meristem_P Parameter: Age (day) Value: 8
  misc_feature: MA Experiment 108536 PARAMETER Experiment Name: Zm_Meristem_P Parameter: Organism Value: Zea mays
  misc_feature: MA Experiment 108536 PARAMETER Experiment Name: Zm_Meristem_P Parameter: Plant Line Value: 35A19
  misc_feature: MA Experiment 108536 PARAMETER Experiment Name: Zm_Meristem_P Parameter: Tissue Value: Shoot Meristem vs. Above Shoot Meristem
  misc_feature: MA Experiment ID: 108543 Result: Up-regulated in Transcription
  misc_feature: MA Experiment ID: 108544 Result: Down-regulated in Transcription
  misc_feature: MA Experiment ID: 108546 Result: Down-regulated in Transcription
  misc_feature: MA Experiment 108546 PARAMETER Experiment Name: Zm_Imbibed_Seeds_P Parameter: Age (day) Value: 3 vs. 2
  misc_feature: MA Experiment 108546 PARAMETER Experiment Name: Zm_Imbibed_Seeds_P Parameter: Organism Value: Zea mays
  misc_feature: MA Experiment 108546 PARAMETER Experiment Name: Zm_Imbibed_Seeds_P Parameter: Plant Line Value: 35A19
  misc_feature: MA Experiment 108546 PARAMETER Experiment Name: Zm_Imbibed_Seeds_P Parameter: Tissue Value: Roots vs. Embryo
  misc_feature: MA Experiment ID: 108547 Result: Down-regulated in Transcription
  misc_feature: MA Experiment 108547 PARAMETER Experiment Name: Zm_Imbibed_Seeds_P Parameter: Age (day) Value: 4 vs. 2
  misc_feature: MA Experiment 108547 PARAMETER Experiment Name: Zm_Imbibed_Seeds_P Parameter: Organism Value: Zea mays
  misc_feature: MA Experiment 108547 PARAMETER Experiment Name: Zm_Imbibed_Seeds_P Parameter: Plant Line Value: 35A19
  misc_feature: MA Experiment 108547 PARAMETER Experiment Name: Zm_Imbibed_Seeds_P Parameter: Tissue Value: Aerial vs. Embryo
  misc_feature: MA Experiment ID: 108688 Result: Down-regulated in Transcription
  misc_feature: MA Experiment 108688 PARAMETER Experiment Name: Zm_Embryos-Flowers__P Parameter: Tissue Value: Immature Flowers vs. Aerial+
  misc_feature: MA Experiment ID: 20000477 Result: Down-regulated in Transcription
  misc_feature: MA Experiment 20000477 PARAMETER Experiment Name: Zm_5mM_SA_P Parameter: Age (day) Value: 10
  misc_feature: MA Experiment 20000477 PARAMETER Experiment Name: Zm_5mM_SA_P Parameter: Organism Value: Zea mays
  misc_feature: MA Experiment 20000477 PARAMETER Experiment Name: Zm_5mM_SA_P Parameter: Plant Line Value: 35A19
  misc_feature: MA Experiment 20000477 PARAMETER Experiment Name: Zm_5mM_SA_P Parameter: Timepoint (hr) Value: 48
  misc_feature: MA Experiment 20000477 PARAMETER Experiment Name: Zm_5mM_SA_P Parameter: Tissue Value: Aerial
  misc_feature: MA Experiment 20000477 PARAMETER Experiment Name: Zm_5mM_SA_P Parameter: Treatment Value: 5mM SA vs. No Treatment
  misc_feature: MA Experiment ID: 20000478 Result: Down-regulated in Transcription
  misc_feature: MA Experiment 20000478 PARAMETER Experiment Name: Zm_5mM_SA_P Parameter: Age (day) Value: 11
  misc_feature: MA Experiment 20000478 PARAMETER Experiment Name: Zm_5mM_SA_P Parameter: Organism Value: Zea mays
  misc_feature: MA Experiment 20000478 PARAMETER Experiment Name: Zm_5mM_SA_P Parameter: Plant Line Value: 35A19
  misc_feature: MA Experiment 20000478 PARAMETER Experiment Name: Zm_5mM_SA_P Parameter: Timepoint (hr) Value: 72
  misc_feature: MA Experiment 20000478 PARAMETER Experiment Name: Zm_5mM_SA_P Parameter: Tissue Value: Aerial
  misc_feature: MA Experiment 20000478 PARAMETER Experiment Name: Zm_5mM_SA_P Parameter: Treatment Value: 5mM SA vs. No Treatment
  misc_feature: MA Experiment ID: 20000488 Result: Up-regulated in Transcription
  misc_feature: MA Experiment 20000488 PARAMETER Experiment Name: Zm_50mM_NH4NO3_L_to_H_P Parameter: Organism Value: Zea mays
  misc_feature: MA Experiment 20000488 PARAMETER Experiment Name: Zm_50mM_NH4NO3_L_to_H_P Parameter: Timepoint (hr) Value: 8
  misc_feature: MA Experiment 20000488 PARAMETER Experiment Name: Zm_50mM_NH4NO3_L_to_H_P Parameter: Tissue Value: Leaves
  misc_feature: MA Experiment 20000488 PARAMETER Experiment Name: Zm_50mM_NH4NO3_L_to_H_P Parameter: Treatment Value: 50mM NH4NO3 vs. 100mM Mannitol
  misc_feature: MA Experiment ID: 20000532 Result: Up-regulated in Transcription
  misc_feature: MA Experiment 20000532 PARAMETER Experiment Name: Zm_0.001percent_MeJA_P Parameter: Age (day) Value: 10
  misc_feature: MA Experiment 20000532 PARAMETER Experiment Name: Zm_0.001percent_MeJA_P Parameter: Organism Value: Zea mays
  misc_feature: MA Experiment 20000532 PARAMETER Experiment Name: Zm_0.001percent_MeJA_P Parameter: Plant Line Value: 35A19
  misc_feature: MA Experiment 20000532 PARAMETER Experiment Name: Zm_0.001percent_MeJA_P Parameter: Timepoint (hr) Value: 48
  misc_feature: MA Experiment 20000532 PARAMETER Experiment Name: Zm_0.001percent_MeJA_P Parameter: Tissue Value: Aerial
  misc_feature: MA Experiment 20000532 PARAMETER Experiment Name: Zm_0.001percent_MeJA_P Parameter: Treatment Value: 0.001percent MeJA vs. No Treatment
  misc_feature: MA Experiment ID: 20000533 Result: Up-regulated in Transcription
  misc_feature: MA Experiment 20000533 PARAMETER Experiment Name: Zm_0.001percent_MeJA_P Parameter: Age (day) Value: 11
  misc_feature: MA Experiment 20000533 PARAMETER Experiment Name: Zm_0.001percent_MeJA_P Parameter: Organism Value: Zea mays
  misc_feature: MA Experiment 20000533 PARAMETER Experiment Name: Zm_0.001percent_MeJA_P Parameter: Plant Line Value: 35A19
  misc_feature: MA Experiment 20000533 PARAMETER Experiment Name: Zm_0.001percent_MeJA_P Parameter: Timepoint (hr) Value: 72
  misc_feature: MA Experiment 20000533 PARAMETER Experiment Name: Zm_0.001percent_MeJA_P Parameter: Tissue Value: Aerial
  misc_feature: MA Experiment 20000533 PARAMETER Experiment Name: Zm_0.001percent_MeJA_P Parameter: Treatment Value: 0.001percent MeJA vs. No Treatment
  misc_feature: MA Experiment ID: 20000534 Result: Down-regulated in Transcription
  misc_feature: MA Experiment 20000534 PARAMETER Experiment Name: Zm_Hybrid_Pollen_P Parameter: Age (day) Value: 8
  misc_feature: MA Experiment 20000534 PARAMETER Experiment Name: Zm_Hybrid_Pollen_P Parameter: Organism Value: Zea mays
  misc_feature: MA Experiment 20000534 PARAMETER Experiment Name: Zm_Hybrid_Pollen_P Parameter: Plant Line Value: 35A19
  misc_feature: MA Experiment 20000534 PARAMETER Experiment Name: Zm_Hybrid_Pollen_P Parameter: Tissue Value: Pollen vs. Aerial
  misc_feature: MA Experiment ID: 20000535 Result: Up-regulated in Transcription
  misc_feature: MA Experiment 20000535 PARAMETER Experiment Name: Zm_Hybrid_Seed_Dev_P Parameter: DAP Value: 30 vs. 12
  misc_feature: MA Experiment 20000535 PARAMETER Experiment Name: Zm_Hybrid_Seed_Dev_P Parameter: Organism Value: Zea mays
  misc_feature: MA Experiment 20000535 PARAMETER Experiment Name: Zm_Hybrid_Seed_Dev_P Parameter: Plant Line Value: 35A19
  misc_feature: MA Experiment 20000535 PARAMETER Experiment Name: Zm_Hybrid_Seed_Dev_P Parameter: Tissue Value: Embryo vs. Unfert Floret
  misc_feature: MA Experiment ID: 20000626 Result: Down-regulated in Transcription
  misc_feature: MA Experiment 20000626 PARAMETER Experiment Name: Zm_Herbicide-Treatments_P Parameter: Timepoint (hr) Value: 12
  misc_feature: MA Experiment 20000626 PARAMETER Experiment Name: Zm_Herbicide-Treatments_P Parameter: Tissue Value: Aerial
  misc_feature: MA Experiment 20000626 PARAMETER Experiment Name: Zm_Herbicide-Treatments_P Parameter: Treatment Value: Roundup vs. No Treatment
  misc_feature: MA Experiment ID: 20000627 Result: Down-regulated in Transcription
  misc_feature: MA Experiment 20000627 PARAMETER Experiment Name: Zm_Herbicide-Treatments_P Parameter: Timepoint (hr) Value: 12
  misc_feature: MA Experiment 20000627 PARAMETER Experiment Name: Zm_Herbicide-Treatments_P Parameter: Tissue Value: Aerial
  misc_feature: MA Experiment 20000627 PARAMETER Experiment Name: Zm_Herbicide-Treatments_P Parameter: Treatment Value: Finale vs. No Treatment
  misc_feature: MA Experiment ID: 20000629 Result: Down-regulated in Transcription
  misc_feature: MA Experiment 20000629 PARAMETER Experiment Name: Zm_Herbicide-Treatments_P Parameter: Timepoint (hr) Value: 12
  misc_feature: MA Experiment 20000629 PARAMETER Experiment Name: Zm_Herbicide-Treatments_P Parameter: Tissue Value: Aerial
  misc_feature: MA Experiment 20000629 PARAMETER Experiment Name: Zm_Herbicide-Treatments_P Parameter: Treatment Value: Trimec vs. No Treatment
  misc_feature: MA Experiment ID: 20001614 Result: Up-regulated in Transcription
  misc_feature: MA Experiment 20001614 PARAMETER Experiment Name: Zm_50ppm_KNO3_L-to-H_P Parameter: Age (day) Value: 21
  misc_feature: MA Experiment 20001614 PARAMETER Experiment Name: Zm_50ppm_KNO3_L-to-H_P Parameter: Organism Value: Zea mays
  misc_feature: MA Experiment 20001614 PARAMETER Experiment Name: Zm_50ppm_KNO3_L-to-H_P Parameter: Plant Line Value: 35A19
  misc_feature: MA Experiment 20001614 PARAMETER Experiment Name: Zm_50ppm_KNO3_L-to-H_P Parameter: Timepoint (hr) Value: 48
  misc_feature: MA Experiment 20001614 PARAMETER Experiment Name: Zm_50ppm_KNO3_L-to-H_P Parameter: Tissue Value: Roots
  misc_feature: MA Experiment 20001614 PARAMETER Experiment Name: Zm_50ppm_KNO3_L-to-H_P Parameter: Treatment Value: 50ppm KNO3 vs. 50ppm KCl
acacacacccacacaccccgcttcacgttctcaataatggcgccgttcccacgtcgtcttccggccgccgtgccacttctcctcctcctcggcgccgcagtggccagcgccggcgcggaggacaccgatggcggcaactcccgccggcggcactcccgcttgctgttcgcgttcggcaactcgctcaccgacacgggaaacggggccatcttcccggtgactgcaggcgggccattcacccggccgccgtacggggagaccttcttcggtcgtcccagcggccgggcttgcaacggcaggctcgtcctcgacttcctcgtggaggagctgaaggtgccagagccgacgccgtacctggccggcagtacggccgccgactttgcgaagaacggggccaactttgcgctgggtggtgcaacggcgctcgaccaggcgttcttagcaagcaaggggataaagtcgttcgtgcccatctctctcatcaacgagacgagctggttccagaacgtttcgaagctactggacgcgtcacactacgatgagcgtaagatcatggcgaagtcgatcttctacgtcggggagatcggtgtcaacgactacttcgccgccctaagcaacaacgactccgtcgacgtcgcggtcagcctggtgccgcacatcatcgacaccatccgttcggccctgaccgtcatgatcgatgccggggcgaggacagtggtgatcacggggatgctaccgatcggctgcgagccgcagcagctggcccagttcgcaggcggccccggccggcgactacgaccctaccaccggctgcatcacgcggttcaaccagctcgccgagcaccacaaccacatgctgaggatgatgctgagggagctgcggaccaagtaccgcaggcgcaggcccctcaccctccactacgccgacatctaccgccccgtgatcgaggccgtcgcgtcccccgcctcgtacggcttcggcgacacgccgctggcagcgtgctgcgggggcggtggcggccccaacaacttcaacttcatcgccttctgcggcacgccggcgtcgaccacgtgcaccgacccgtccaagttcgtctcctgggacgggatccacttcaccgaggctaccaacaggcttctcgctcgtaaaatgcttcaggaactgctaagccgtggagcttacaatgttgcaatctgatttttctatgcccgcgagtcgtatcaacgtgtttcccatagcggatcggacctagcgtggaacctcttgtgtaataaaataataagtgtc

SEQ ID NO: 11915 - protein, 382 aa, Zea mays subsp. mays
  peptide (1)..(382): Ceres Seq. ID no. 12351737
  misc_feature (55)..(267): Pfam Name: GDSL-like Lipase/Acylhydrolase Pfam Description: GDSL-like Lipase/Acylhydrolase
  misc_feature (14)..(267): Homolog of NCBI NO: 37533976 NR Description: putative lipase [Oryza sativa (japonica >gi|15451639|gb|AAK98763.1| Putative lipase [Oryza sativa]
  misc_feature (13)..(260): Homolog of NCBI NO: 37533968 NR Description: putative lipase [Oryza sativa (japonica >gi|15451635|gb|AAK98759.1| Putative lipase [Oryza sativa]
  misc_feature (13)..(262): Homolog of NCBI NO: 37533980 NR Description: putative lipase [Oryza sativa (japonica >gi|15451640|gb|AAK98764.1| Putative lipase [Oryza sativa]
  misc_feature (26)..(263): Homolog of NCBI NO: 37533984 NR Description: putative lipase [Oryza sativa (japonica
  misc_feature (26)..(263): Homolog of NCBI NO: 15451642 NR Description: Putative lipase [Oryza sativa]
  misc_feature (26)..(257): Homolog of NCBI NO: 15218751 NR Description: lipase, putative; protein id: At1g28640.1
  misc_feature (58)..(257): Homolog of NCBI NO: 25405771 NR Description: hypothetical protein T22H22.20 [imported] - thaliana >gi|3776573|gb|AAC64890.1| Similar to nodulins and homolog F14J9.5 gi|3482914 from Arabidopsis thaliana BAC
  misc_feature (18)..(229): Homolog of NCBI NO: 34912612 NR Description: P0046B10.23 [Oryza sativa (japonica
  misc_feature (20)..(255): Homolog of NCBI NO: 34894838 NR Description: putative lipase homolog [Oryza sativa (japonica group)] >gi|13365800|dbj|BAB39238.1| putative lipase homolog
  misc_feature (55)..(260): Homolog of NCBI NO: 34911826 NR Description: lipase-like protein [Oryza sativa (japonica
THTHTPRFTFSIMAPFPRRLPAAVPLLLLLGAAVASAGAEDTDGGNSRRRHSRLLFAFGNSLTDTGNGAIFPVTAGGPFTRPPYGETFFGRPSGRACNGRLVLDFLVEELKVPEPTPYLAGSTAADFAKNGANFALGGATALDQAFLASKGIKSFVPISLINETSWFQNVSKLLDASHYDERKIMAKSIFYVGEIGVNDYFAALSNNDSVDVAVSLVPHIIDTIRSALTVMIDAGARTVVITGMLPIGCEPQQLAQFAGGPGRRLRPYHRLHHAVQPARRAPQPHAEDDAEGAADQVPQAQAPHPPLRRHLPPRDRGRRVPRLVRLRRHAAGSVLRGRWRPQQLQLHRLLRHAGVDHVHRPVQVRLLGRDPLHRGYQQASRS

SEQ ID NO: 11916 - protein, 370 aa, Zea mays subsp. mays
  peptide (1)..(370): Ceres Seq. ID no. 12351738
  misc_feature (43)..(255): Pfam Name: GDSL-like Lipase/Acylhydrolase Pfam Description: GDSL-like Lipase/Acylhydrolase
  misc_feature (2)..(255): Homolog of NCBI NO: 37533976 NR Description: putative lipase [Oryza sativa (japonica >gi|15451639|gb|AAK98763.1| Putative lipase [Oryza sativa]
  misc_feature (1)..(248): Homolog of NCBI NO: 37533968 NR Description: putative lipase [Oryza sativa (japonica >gi|15451635|gb|AAK98759.1| Putative lipase [Oryza sativa]
  misc_feature (1)..(250): Homolog of NCBI NO: 37533980 NR Description: putative lipase [Oryza sativa (japonica >gi|15451640|gb|AAK98764.1| Putative lipase [Oryza sativa]
  misc_feature (14)..(251): Homolog of NCBI NO: 37533984 NR Description: putative lipase [Oryza sativa (japonica
  misc_feature (14)..(251): Homolog of NCBI NO: 15451642 NR Description: Putative lipase [Oryza sativa]
  misc_feature (14)..(245): Homolog of NCBI NO: 15218751 NR Description: lipase, putative; protein id: At1g28640.1
  misc_feature (46)..(245): Homolog of NCBI NO: 25405771 NR Description: hypothetical protein T22H22.20 [imported] - thaliana >gi|3776573|gb|AAC64890.1| Similar to nodulins and homolog F14J9.5 gi|3482914 from Arabidopsis thaliana BAC
  misc_feature (6)..(217): Homolog of NCBI NO: 34912612 NR Description: P0046B10.23 [Oryza sativa (japonica
  misc_feature (8)..(243): Homolog of NCBI NO: 34894838 NR Description: putative lipase homolog [Oryza sativa (japonica group)] >gi|13365800|dbj|BAB39238.1| putative lipase homolog
  misc_feature (43)..(248): Homolog of NCBI NO: 34911826 NR Description: lipase-like protein [Oryza sativa (japonica
MAPFPRRLPAAVPLLLLLGAAVASAGAEDTDGGNSRRRHSRLLFAFGNSLTDTGNGAIFPVTAGGPFTRPPYGETFFGRPSGRACNGRLVLDFLVEELKVPEPTPYLAGSTAADFAKNGANFALGGATALDQAFLASKGIKSFVPISLINETSWFQNVSKLLDASHYDERKIMAKSIFYVGEIGVNDYFAALSNNDSVDVAVSLVPHIIDTIRSALTVMIDAGARTVVITGMLPIGCEPQQLAQFAGGPGRRLRPYHRLHHAVQPARRAPQPHAEDDAEGAADQVPQAQAPHPPLRRHLPPRDRGRRVPRLVRLRRHAAGSVLRGRWRPQQLQLHRLLRHAGVDHVHRPVQVRLLGRDPLHRGYQQASRS

SEQ ID NO: 11917 - protein, 198 aa, Zea mays subsp. mays
  peptide (1)..(198): Ceres Seq. ID no. 12351739
  misc_feature (1)..(83): Pfam Name: GDSL-like Lipase/Acylhydrolase Pfam Description: GDSL-like Lipase/Acylhydrolase
  misc_feature (1)..(83): Homolog of NCBI NO: 37533976 NR Description: putative lipase [Oryza sativa (japonica >gi|15451639|gb|AAK98763.1| Putative lipase [Oryza sativa]
  misc_feature (1)..(76): Homolog of NCBI NO: 37533968 NR Description: putative lipase [Oryza sativa (japonica >gi|15451635|gb|AAK98759.1| Putative lipase [Oryza sativa]
  misc_feature (1)..(78): Homolog of NCBI NO: 37533980 NR Description: putative lipase [Oryza sativa (japonica >gi|15451640|gb|AAK98764.1| Putative lipase [Oryza sativa]
  misc_feature (1)..(79): Homolog of NCBI NO: 37533984 NR Description: putative lipase [Oryza sativa (japonica
  misc_feature (1)..(79): Homolog of NCBI NO: 15451642 NR Description: Putative lipase [Oryza sativa]
  misc_feature (1)..(73): Homolog of NCBI NO: 15218751 NR Description: lipase, putative; protein id: At1g28640.1
  misc_feature (1)..(73): Homolog of NCBI NO: 25405771 NR Description: hypothetical protein T22H22.20 [imported] - thaliana >gi|3776573|gb|AAC64890.1| Similar to nodulins and homolog F14J9.5 gi|3482914 from Arabidopsis thaliana BAC
  misc_feature (1)..(45): Homolog of NCBI NO: 34912612 NR Description: P0046B10.23 [Oryza sativa (japonica
  misc_feature (1)..(71): Homolog of NCBI NO: 34894838 NR Description: putative lipase homolog [Oryza sativa (japonica group)] >gi|13365800|dbj|BAB39238.1| putative lipase homolog
  misc_feature (1)..(76): Homolog of NCBI NO: 34911826 NR Description: lipase-like protein [Oryza sativa (japonica
MAKSIFYVGEIGVNDYFAALSNNDSVDVAVSLVPHIIDTIRSALTVMIDAGARTVVITGMLPIGCEPQQLAQFAGGPGRRLRPYHRLHHAVQPARRAPQPHAEDDAEGAADQVPQAQAPHPPLRRHLPPRDRGRRVPRLVRLRRHAAGSVLRGRWRPQQLQLHRLLRHAGVDHVHRPVQVRLLGRDPLHRGYQQASRS

SEQ ID NO: 11918 - DNA, 1942 bp, Zea mays subsp. mays
  misc_feature (1)..(1942): Ceres Seq. ID no. 12348812
  misc_feature: MA Experiment ID: 108527 Result: Down-regulated in Transcription
  misc_feature: MA Experiment 108527 PARAMETER Experiment Name: Zm_5mM_NO_P Parameter: Age (day) Value: 8
  misc_feature: MA Experiment 108527 PARAMETER Experiment Name: Zm_5mM_NO_P Parameter: Organism Value: Zea mays
  misc_feature: MA Experiment 108527 PARAMETER Experiment Name: Zm_5mM_NO_P Parameter: Plant Line Value: 35A19
  misc_feature: MA Experiment 108527 PARAMETER Experiment Name: Zm_5mM_NO_P Parameter: Timepoint (hr) Value: 6
  misc_feature: MA Experiment 108527 PARAMETER Experiment Name: Zm_5mM_NO_P Parameter: Tissue Value: Aerial
  misc_feature: MA Experiment 108527 PARAMETER Experiment Name: Zm_5mM_NO_P Parameter: Treatment Value: 5mM NO vs. No Treatment
  misc_feature: MA Experiment ID: 108528 Result: Up-regulated in Transcription
  misc_feature: MA Experiment 108528 PARAMETER Experiment Name: Zm_Imbibed_Seeds_P Parameter: Age (day) Value: 5 vs. 2
  misc_feature: MA Experiment 108528 PARAMETER Experiment Name: Zm_Imbibed_Seeds_P Parameter: Organism Value: Zea mays
  misc_feature: MA Experiment 108528 PARAMETER Experiment Name: Zm_Imbibed_Seeds_P Parameter: Plant Line Value: 35A19
  misc_feature: MA Experiment 108528 PARAMETER Experiment Name: Zm_Imbibed_Seeds_P Parameter: Tissue Value: Aerial vs. Embryo
  misc_feature: MA Experiment ID: 108530 Result: Up-regulated in Transcription
  misc_feature: MA Experiment 108530 PARAMETER Experiment Name: Zm_Imbibed_Seeds_P Parameter: Age (day) Value: 6 vs. 2
  misc_feature: MA Experiment 108530 PARAMETER Experiment Name: Zm_Imbibed_Seeds_P Parameter: Organism Value: Zea mays
  misc_feature: MA Experiment 108530 PARAMETER Experiment Name: Zm_Imbibed_Seeds_P Parameter: Plant Line Value: 35A19
  misc_feature: MA Experiment 108530 PARAMETER Experiment Name: Zm_Imbibed_Seeds_P Parameter: Tissue Value: Aerial vs. Embryo
  misc_feature: MA Experiment ID: 108547 Result: Up-regulated in Transcription
  misc_feature: MA Experiment 108547 PARAMETER Experiment Name: Zm_Imbibed_Seeds_P Parameter: Age (day) Value: 4 vs. 2
  misc_feature: MA Experiment 108547 PARAMETER Experiment Name: Zm_Imbibed_Seeds_P Parameter: Organism Value: Zea mays
  misc_feature: MA Experiment 108547 PARAMETER Experiment Name: Zm_Imbibed_Seeds_P Parameter: Plant Line Value: 35A19
  misc_feature: MA Experiment 108547 PARAMETER Experiment Name: Zm_Imbibed_Seeds_P Parameter: Tissue Value: Aerial vs. Embryo
  misc_feature: MA Experiment ID: 108559 Result: Down-regulated in Transcription
  misc_feature: MA Experiment 108559 PARAMETER Experiment Name: Zm_5mM_NO_P Parameter: Age (day) Value: 8
  misc_feature: MA Experiment 108559 PARAMETER Experiment Name: Zm_5mM_NO_P Parameter: Organism Value: Zea mays
  misc_feature: MA Experiment 108559 PARAMETER Experiment Name: Zm_5mM_NO_P Parameter: Plant Line Value: 35A19
  misc_feature: MA Experiment 108559 PARAMETER Experiment Name: Zm_5mM_NO_P Parameter: Timepoint (hr) Value: 12
  misc_feature: MA Experiment 108559 PARAMETER Experiment Name: Zm_5mM_NO_P Parameter: Tissue Value: Aerial
  misc_feature: MA Experiment 108559 PARAMETER Experiment Name: Zm_5mM_NO_P Parameter: Treatment Value: 5mM NO vs. No Treatment
  misc_feature: MA Experiment ID: 108687 Result: Down-regulated in Transcription
  misc_feature: MA Experiment 108687 PARAMETER Experiment Name: Zm_Embryos-Flowers__P Parameter: Tissue Value: Embryo vs. Aerial+
  misc_feature: MA Experiment ID: 20000534 Result: Down-regulated in Transcription
  misc_feature: MA Experiment 20000534 PARAMETER Experiment Name: Zm_Hybrid_Pollen_P Parameter: Age (day) Value: 8
  misc_feature: MA Experiment 20000534 PARAMETER Experiment Name: Zm_Hybrid_Pollen_P Parameter: Organism Value: Zea mays
  misc_feature: MA Experiment 20000534 PARAMETER Experiment Name: Zm_Hybrid_Pollen_P Parameter: Plant Line Value: 35A19
  misc_feature: MA Experiment 20000534 PARAMETER Experiment Name: Zm_Hybrid_Pollen_P Parameter: Tissue Value: Pollen vs. Aerial
gcggatgatttcctctcgtctcgtctctcccatactccagtcccgtccgtcttcacctgcgttccccgggtcccgacaagccgctgtaccagtcccgcccgcctgcgcacttctcccacccccgcgccgccttcggcgccggcgagccctcccgacgctcctcgagcgatccgtccctctcgcggcccttctctcagccgcttccagcccaaggggaggagagggagaggatgtggtcgtcgagccaggcgagcacgaggggcgtcgtggagatggggagggtggaggccgggccgtcgcatttccctaagagacccgcgcctcagaactccgccagggtcaatctgtcaaggacacacacagttaaacctacctctgctggcaaccgttcaggaatttctgttaaatgcaacttggggtggtcttctcaaccatcgcctgacttgaggcatcactttagaggatactcatcagcatcagaggcagttcttacttcccaatctgatgtgagaaaactgtttgttggcaatgaaaaaatcggtgttctcttgctgaatcttgggggcccagagactcttgacgatgtgcagcctttcttgtttaatctttttgcagatccggacattatccgtcttcctaggctctttcgctttctgcagaagccacttgcaaaattcatatcggtagtgagagcaccaaaaagtaaggaaggttatgcatccataggtggcggttctcctctacgacaaattactgatgcacaggctgaagcactgagggaggcattacatgggaaagatgttcctgccaacgtgtatgttggaatgcggtattggcatcccttcactgaagaagccatagaacaaataaaacgggatggaatcacgaaacttgttgtgttgcctctataccctcagttctccatatcaactagtggttcaagtctccgtttattggagagcatattcagagaggatgagtatctcgtgaatatgcaacatacagttataccttcctggtaccaacgtgaaggatatatcaaggctatggcaactttgattgaaaacgaattgacaaaatttcaagaaccccaaaaggttatgatatttttcagtgctcatggagttcctctggcatatgttgaagaagctggtgatccatataaagcagaaatggaagagtgtatcgatcttatcatggaagaactggaaaaaagaggaataacaaatccgtgcatacttgcttatcagagccgagttggaccagtggaatggctgaaaccgtacactgatgagacaattattgagcttgggcagaaaggggtaaagagcctgcttgctgttcctattagttttgttagcgaacacattgaaactttggaagaaatcgatgtggagtacaaagagttggctttagaatctggcatcaagcactggggacgggttccagcactaggttgtgaacccacattcatttcggatcttgctgatgctgttattgaaagcctaccttatgttggggcaatggcagtttccaatcttgaggctcggcagtctctcgtacccctcgggagcgtggaggagctgctagcagcatacgactcgaagcgcgatgagctccctccacccgtaatcgtgtgggagtggggctggacaaagagcgcggagacctggaatggccgtgcggcgatgctggccgtgctggctctcctggtgctggaagtgaccaccggcgaagggttcctgcatcaatggggaatcctgcctctgttccgctgagccgacaattctgttcatgatggggtcataattttgctgcagccgaaggaagttttgaacttctgatgctgtatatgaatcaatttgccttaaatcgtcgagggggaaagaggagaaaatggtaaaatatggacagaattcgacggtatatcatgttatattgt

SEQ ID NO: 11919 - protein, 515 aa, Zea mays subsp. mays
  peptide (1)..(515): Ceres Seq. ID no. 12348813
  misc_feature (102)..(426): Pfam Name: Ferrochelatase Pfam Description: Ferrochelatase
  misc_feature (33)..(514): Homolog of NCBI NO: 3913808 NR Description: Ferrochelatase II, chloroplast precursor ferro- lyase) (Heme synthetase) >gi|2429618|dbj|BAA22284.1|
  misc_feature (98)..(514): Homolog of NCBI NO: 12082085 NR Description: ferrochelatase [Cucumis sativus]
  misc_feature (52)..(515): Homolog of NCBI NO: 15147828 NR Description: ferrochelatase [Nicotiana tabacum]
  misc_feature (82)..(512): Homolog of NCBI NO: 15227742 NR Description: putative ferrochelatase precusor; protein id: [Arabidopsis thaliana] >gi|3913871|sp|O04921|HMZ2_ARATH
  misc_feature (82)..(512): Homolog of NCBI NO: 2623990 NR Description: ferrochelatase [Arabidopsis thaliana]
  misc_feature (59)..(486): Homolog of NCBI NO: 7437212 NR Description: probable ferrochelatase (EC 4.99.1.1) - potato
  misc_feature (101)..(505): Homolog of NCBI NO: 13249285 NR Description: ferrochelatase [Chlamydomonas reinhardtii]
  misc_feature (69)..(442): Homolog of NCBI NO: 7437214 NR Description: probable ferrochelatase (EC 4.99.1.1) - barley
  misc_feature (69)..(442): Homolog of NCBI NO: 1170242 NR Description: Ferrochelatase II, chloroplast precursor ferro- lyase) (Heme synthetase) >gi|7437215|pir||T05736 probable
  misc_feature (78)..(433): Homolog of NCBI NO: 1170239 NR Description: Ferrochelatase II, chloroplast precursor
MWSSSQASTRGVVEMGRVEAGPSHFPKRPAPQNSARVNLSRTHTVKPTSAGNRSGISVKCNLGWSSQPSPDLRHHFRGYSSASEAVLTSQSDVRKLFVGNEKIGVLLLNLGGPETLDDVQPFLFNLFADPDIIRLPRLFRFLQKPLAKFISVVRAPKSKEGYASIGGGSPLRQITDAQAEALREALHGKDVPANVYVGMRYWHPFTEEAIEQIKRDGITKLVVLPLYPQFSISTSGSSLRLLESIFREDEYLVNMQHTVIPSWYQREGYIKAMATLIENELTKFQEPQKVMIFFSAHGVPLAYVEEAGDPYKAEMEECIDLIMEELEKRGITNPCILAYQSRVGPVEWLKPYTDETIIELGQKGVKSLLAVPISFVSEHIETLEEIDVEYKELALESGIKHWGRVPALGCEPTFISDLADAVIESLPYVGAMAVSNLEARQSLVPLGSVEELLAAYDSKRDELPPPVIVWEWGWTKSAETWNGRAAMLAVLALLVLEVTTGEGFLHQWGILPLFR

SEQ ID NO: 11920 - protein, 501 aa, Zea mays subsp. mays
  peptide (1)..(501): Ceres Seq. ID no. 12348814
  misc_feature (88)..(412): Pfam Name: Ferrochelatase Pfam Description: Ferrochelatase
  misc_feature (19)..(500): Homolog of NCBI NO: 3913808 NR Description: Ferrochelatase II, chloroplast precursor ferro- lyase) (Heme synthetase) >gi|2429618|dbj|BAA22284.1|
  misc_feature (84)..(500): Homolog of NCBI NO: 12082085 NR Description: ferrochelatase [Cucumis sativus]
  misc_feature (38)..(501): Homolog of NCBI NO: 15147828 NR Description: ferrochelatase [Nicotiana tabacum]
  misc_feature (68)..(498): Homolog of NCBI NO: 15227742 NR Description: putative ferrochelatase precusor; protein id: [Arabidopsis thaliana] >gi|3913871|sp|O04921|HMZ2_ARATH
  misc_feature (68)..(498): Homolog of NCBI NO: 2623990 NR Description: ferrochelatase [Arabidopsis thaliana]
  misc_feature (45)..(472): Homolog of NCBI NO: 7437212 NR Description: probable ferrochelatase (EC 4.99.1.1) - potato
  misc_feature (87)..(491): Homolog of NCBI NO: 13249285 NR Description: ferrochelatase [Chlamydomonas reinhardtii]
  misc_feature (55)..(428): Homolog of NCBI NO: 7437214 NR Description: probable ferrochelatase (EC 4.99.1.1) - barley
  misc_feature (55)..(428): Homolog of NCBI NO: 1170242 NR Description: Ferrochelatase II, chloroplast precursor ferro- lyase) (Heme synthetase) >gi|7437215|pir||T05736 probable
  misc_feature (64)..(419): Homolog of NCBI NO: 1170239 NR Description: Ferrochelatase II, chloroplast precursor
MGRVEAGPSHFPKRPAPQNSARVNLSRTHTVKPTSAGNRSGISVKCNLGWSSQPSPDLRHHFRGYSSASEAVLTSQSDVRKLFVGNEKIGVLLLNLGGPETLDDVQPFLFNLFADPDIIRLPRLFRFLQKPLAKFISVVRAPKSKEGYASIGGGSPLRQITDAQAEALREALHGKDVPANVYVGMRYWHPFTEEAIEQIKRDGITKLVVLPLYPQFSISTSGSSLRLLESIFREDEYLVNMQHTVIPSWYQREGYIKAMATLIENELTKFQEPQKVMIFFSAHGVPLAYVEEAGDPYKAEMEECIDLIMEELEKRGITNPCILAYQSRVGPVEWLKPYTDETIIELGQKGVKSLLAVPISFVSEHIETLEEIDVEYKELALESGIKHWGRVPALGCEPTFISDLADAVIESLPYVGAMAVSNLEARQSLVPLGSVEELLAAYDSKRDELPPPVIVWEWGWTKSAETWNGRAAMLAVLALLVLEVTTGEGFLHQWGILPLFR

SEQ ID NO: 11921 - protein, 317 aa, Zea mays subsp. mays
  peptide (1)..(317): Ceres Seq. ID no. 12348815
  misc_feature (1)..(228): Pfam Name: Ferrochelatase Pfam Description: Ferrochelatase
  misc_feature (1)..(316): Homolog of NCBI NO: 3913808 NR Description: Ferrochelatase II, chloroplast precursor ferro- lyase) (Heme synthetase) >gi|2429618|dbj|BAA22284.1|
  misc_feature (1)..(316): Homolog of NCBI NO: 12082085 NR Description: ferrochelatase [Cucumis sativus]
  misc_feature (1)..(317): Homolog of NCBI NO: 15147828 NR Description: ferrochelatase [Nicotiana tabacum]
  misc_feature (1)..(314): Homolog of NCBI NO: 15227742 NR Description: putative ferrochelatase precusor; protein id: [Arabidopsis thaliana] >gi|3913871|sp|O04921|HMZ2_ARATH
  misc_feature (1)..(314): Homolog of NCBI NO: 2623990 NR Description: ferrochelatase [Arabidopsis thaliana]
  misc_feature (1)..(288): Homolog of NCBI NO: 7437212 NR Description: probable ferrochelatase (EC 4.99.1.1) - potato
  misc_feature (1)..(307): Homolog of NCBI NO: 13249285 NR Description: ferrochelatase [Chlamydomonas reinhardtii]
  misc_feature (1)..(244): Homolog of NCBI NO: 7437214 NR Description: probable ferrochelatase (EC 4.99.1.1) - barley
  misc_feature (1)..(244): Homolog of NCBI NO: 1170242 NR Description: Ferrochelatase II, chloroplast precursor ferro- lyase) (Heme synthetase) >gi|7437215|pir||T05736 probable
  misc_feature (1)..(235): Homolog of NCBI NO: 1170239 NR Description: Ferrochelatase II, chloroplast precursor
MRYWHPFTEEAIEQIKRDGITKLVVLPLYPQFSISTSGSSLRLLESIFREDEYLVNMQHTVIPSWYQREGYIKAMATLIENELTKFQEPQKVMIFFSAHGVPLAYVEEAGDPYKAEMEECIDLIMEELEKRGITNPCILAYQSRVGPVEWLKPYTDETIIELGQKGVKSLLAVPISFVSEHIETLEEIDVEYKELALESGIKHWGRVPALGCEPTFISDLADAVIESLPYVGAMAVSNLEARQSLVPLGSVEELLAAYDSKRDELPPPVIVWEWGWTKSAETWNGRAAMLAVLALLVLEVTTGEGFLHQWGILPLFR

SEQ ID NO: 11922 - DNA, 818 bp, Zea mays subsp. mays
  misc_feature (1)..(818): Ceres Seq. ID no. 12403859
  misc_feature: MA Experiment ID: 108504 Result: Up-regulated in Transcription
  misc_feature: MA Experiment 108504 PARAMETER Experiment Name: Zm_Drought_P Parameter: Age (day) Value: 8
  misc_feature: MA Experiment 108504 PARAMETER Experiment Name: Zm_Drought_P Parameter: Organism Value: Zea mays
  misc_feature: MA Experiment 108504 PARAMETER Experiment Name: Zm_Drought_P Parameter: Plant Line Value: 35A19
  misc_feature: MA Experiment 108504 PARAMETER Experiment Name: Zm_Drought_P Parameter: Timepoint (hr) Value: 12
  misc_feature: MA Experiment 108504 PARAMETER Experiment Name: Zm_Drought_P Parameter: Tissue Value: Aerial
  misc_feature: MA Experiment 108504 PARAMETER Experiment Name: Zm_Drought_P Parameter: Treatment Value: Drought vs. No Drought
  misc_feature: MA Experiment ID: 108522 Result: Up-regulated in Transcription
  misc_feature: MA Experiment 108522 PARAMETER Experiment Name: Zm_42deg_Heat_P Parameter: Age (day) Value: 8
  misc_feature: MA Experiment 108522 PARAMETER Experiment Name: Zm_42deg_Heat_P Parameter: Organism Value: Zea mays
  misc_feature: MA Experiment 108522 PARAMETER Experiment Name: Zm_42deg_Heat_P Parameter: Plant Line Value: 35A19
  misc_feature: MA Experiment 108522 PARAMETER Experiment Name: Zm_42deg_Heat_P Parameter: Temperature (deg C) Value: 42 vs. 22
  misc_feature: MA Experiment 108522 PARAMETER Experiment Name: Zm_42deg_Heat_P Parameter: Timepoint (hr) Value: 1
  misc_feature: MA Experiment 108522 PARAMETER Experiment Name: Zm_42deg_Heat_P Parameter: Tissue Value: Aerial
  misc_feature: MA Experiment ID: 108523 Result: Up-regulated in Transcription
  misc_feature: MA Experiment 108523 PARAMETER Experiment Name: Zm_42deg_Heat_P Parameter: Age (day) Value: 8
  misc_feature: MA Experiment 108523 PARAMETER Experiment Name: Zm_42deg_Heat_P Parameter: Organism Value: Zea mays
  misc_feature: MA Experiment 108523 PARAMETER Experiment Name: Zm_42deg_Heat_P Parameter: Plant Line Value: 35A19
  misc_feature: MA Experiment 108523 PARAMETER Experiment Name: Zm_42deg_Heat_P Parameter: Temperature (deg C) Value: 42 vs. 22
  misc_feature: MA Experiment 108523 PARAMETER Experiment Name: Zm_42deg_Heat_P Parameter: Timepoint (hr) Value: 6
  misc_feature: MA Experiment 108523 PARAMETER Experiment Name: Zm_42deg_Heat_P Parameter: Tissue Value: Aerial
  misc_feature: MA Experiment ID: 108529 Result: Down-regulated in Transcription
  misc_feature: MA Experiment 108529 PARAMETER Experiment Name: Zm_Imbibed_Seeds_P Parameter: Age (day) Value: 5 vs. 2
  misc_feature: MA Experiment 108529 PARAMETER Experiment Name: Zm_Imbibed_Seeds_P Parameter: Organism Value: Zea mays
  misc_feature: MA Experiment 108529 PARAMETER Experiment Name: Zm_Imbibed_Seeds_P Parameter: Plant Line Value: 35A19
  misc_feature: MA Experiment 108529 PARAMETER Experiment Name: Zm_Imbibed_Seeds_P Parameter: Tissue Value: Roots vs. Embryo
  misc_feature: MA Experiment ID: 108530 Result: Down-regulated in Transcription
  misc_feature: MA Experiment 108530 PARAMETER Experiment Name: Zm_Imbibed_Seeds_P Parameter: Age (day) Value: 6 vs. 2
  misc_feature: MA Experiment 108530 PARAMETER Experiment Name: Zm_Imbibed_Seeds_P Parameter: Organism Value: Zea mays
  misc_feature: MA Experiment 108530 PARAMETER Experiment Name: Zm_Imbibed_Seeds_P Parameter: Plant Line Value: 35A19
  misc_feature: MA Experiment 108530 PARAMETER Experiment Name: Zm_Imbibed_Seeds_P Parameter: Tissue Value: Aerial vs. Embryo
  misc_feature: MA Experiment ID: 108540 Result: Up-regulated in Transcription
  misc_feature: MA Experiment 108540 PARAMETER Experiment Name: Zm_20percent_PEG_P Parameter: Age (day) Value: 8
  misc_feature: MA Experiment 108540 PARAMETER Experiment Name: Zm_20percent_PEG_P Parameter: Organism Value: Zea mays
  misc_feature: MA Experiment 108540 PARAMETER Experiment Name: Zm_20percent_PEG_P Parameter: Plant Line Value: 35A19
  misc_feature: MA Experiment 108540 PARAMETER Experiment Name: Zm_20percent_PEG_P Parameter: Timepoint (hr) Value: 6
  misc_feature: MA Experiment 108540 PARAMETER Experiment Name: Zm_20percent_PEG_P Parameter: Tissue Value: Aerial
  misc_feature: MA Experiment 108540 PARAMETER Experiment Name: Zm_20percent_PEG_P Parameter: Treatment Value: 20percent PEG vs. No Treatment
  misc_feature: MA Experiment ID: 108544 Result: Up-regulated in Transcription
  misc_feature: MA Experiment ID: 108545 Result: Down-regulated in Transcription
  misc_feature: MA Experiment 108545 PARAMETER Experiment Name: Zm_Imbibed_Seeds_P Parameter: Age (day) Value: 3 vs. 2
  misc_feature: MA Experiment 108545 PARAMETER Experiment Name: Zm_Imbibed_Seeds_P Parameter: Organism Value: Zea mays
  misc_feature: MA Experiment 108545 PARAMETER Experiment Name: Zm_Imbibed_Seeds_P Parameter: Plant Line Value: 35A19
  misc_feature: MA Experiment 108545 PARAMETER Experiment Name: Zm_Imbibed_Seeds_P Parameter: Tissue Value: Aerial vs. Embryo
  misc_feature: MA Experiment ID: 108546 Result: Down-regulated in Transcription
  misc_feature: MA Experiment 108546 PARAMETER Experiment Name: Zm_Imbibed_Seeds_P Parameter: Age (day) Value: 3 vs. 2
  misc_feature: MA Experiment 108546 PARAMETER Experiment Name: Zm_Imbibed_Seeds_P Parameter: Organism Value: Zea mays
  misc_feature: MA Experiment 108546 PARAMETER Experiment Name: Zm_Imbibed_Seeds_P Parameter: Plant Line Value: 35A19
  misc_feature: MA Experiment 108546 PARAMETER Experiment Name: Zm_Imbibed_Seeds_P Parameter: Tissue Value: Roots vs. Embryo
  misc_feature: MA Experiment ID: 108547 Result: Down-regulated in Transcription
  misc_feature: MA Experiment 108547 PARAMETER Experiment Name: Zm_Imbibed_Seeds_P Parameter: Age (day) Value: 4 vs. 2
  misc_feature: MA Experiment 108547 PARAMETER Experiment Name: Zm_Imbibed_Seeds_P Parameter: Organism Value: Zea mays
  misc_feature: MA Experiment 108547 PARAMETER Experiment Name: Zm_Imbibed_Seeds_P Parameter: Plant Line Value: 35A19
  misc_feature: MA Experiment 108547 PARAMETER Experiment Name: Zm_Imbibed_Seeds_P Parameter: Tissue Value: Aerial vs. Embryo
  misc_feature: MA Experiment ID: 108556 Result: Up-regulated in Transcription
  misc_feature: MA Experiment 108556 PARAMETER Experiment Name: Zm_Drought_P Parameter: Age (day) Value: 9
  misc_feature: MA Experiment 108556 PARAMETER Experiment Name: Zm_Drought_P Parameter: Organism Value: Zea mays
  misc_feature: MA Experiment 108556 PARAMETER Experiment Name: Zm_Drought_P Parameter: Plant Line Value: 35A19
  misc_feature: MA Experiment 108556 PARAMETER Experiment Name: Zm_Drought_P Parameter: Timepoint (hr) Value: 24
  misc_feature: MA Experiment 108556 PARAMETER Experiment Name: Zm_Drought_P Parameter: Tissue Value: Aerial
  misc_feature: MA Experiment 108556 PARAMETER Experiment Name: Zm_Drought_P Parameter: Treatment Value: Drought vs. No Drought
  misc_feature: MA Experiment ID: 108597 Result: Up-regulated in Transcription
  misc_feature: MA Experiment 108597 PARAMETER Experiment Name: Zm_100uM_ABA_P Parameter: Age (day) Value: 9
  misc_feature: MA Experiment 108597 PARAMETER Experiment Name: Zm_100uM_ABA_P Parameter: Organism Value: Zea mays
  misc_feature: MA Experiment 108597 PARAMETER Experiment Name: Zm_100uM_ABA_P Parameter: Plant Line Value: 35A19
  misc_feature: MA Experiment 108597 PARAMETER Experiment Name: Zm_100uM_ABA_P Parameter: Timepoint (hr) Value: 24
  misc_feature: MA Experiment 108597 PARAMETER Experiment Name: Zm_100uM_ABA_P Parameter: Tissue Value: Aerial
  misc_feature: MA Experiment 108597 PARAMETER Experiment Name: Zm_100uM_ABA_P Parameter: Treatment Value: 100uM ABA vs. No Treatment
  misc_feature: MA Experiment ID: 20000492 Result: Down-regulated in Transcription
  misc_feature: MA Experiment 20000492 PARAMETER Experiment Name: Zm_Hybrid_Seed_Dev_P Parameter: DAP Value: 12
  misc_feature: MA Experiment 20000492 PARAMETER Experiment Name: Zm_Hybrid_Seed_Dev_P Parameter: Organism Value: Zea mays
  misc_feature: MA Experiment 20000492 PARAMETER Experiment Name: Zm_Hybrid_Seed_Dev_P Parameter: Plant Line Value: 35A19
  misc_feature: MA Experiment 20000492 PARAMETER Experiment Name: Zm_Hybrid_Seed_Dev_P Parameter: Tissue Value: Fert Kernel vs. Unfert Floret
  misc_feature: MA Experiment ID: 20000533 Result: Up-regulated in Transcription
  misc_feature: MA Experiment 20000533 PARAMETER Experiment Name: Zm_0.001percent_MeJA_P Parameter: Age (day) Value: 11
  misc_feature: MA Experiment 20000533 PARAMETER Experiment Name: Zm_0.001percent_MeJA_P Parameter: Organism Value: Zea mays
  misc_feature: MA Experiment 20000533 PARAMETER Experiment Name: Zm_0.001percent_MeJA_P Parameter: Plant Line Value: 35A19
  misc_feature: MA Experiment 20000533 PARAMETER Experiment Name: Zm_0.001percent_MeJA_P Parameter: Timepoint (hr) Value: 72
  misc_feature: MA Experiment 20000533 PARAMETER Experiment Name: Zm_0.001percent_MeJA_P Parameter: Tissue Value: Aerial
  misc_feature: MA Experiment 20000533 PARAMETER Experiment Name: Zm_0.001percent_MeJA_P Parameter: Treatment Value: 0.001percent MeJA vs. No Treatment
ggaggattggtcctataaataacctgccacgcacaggttgctgcaacctacgccaaggagaaattgcaaacctgtcactagcgaagcatacttcgtcgagcacactcttgcaattaatccaccgagttcggtttagtagcatagcatcgacaataaatgtcgctcgtgagtcggcgcagcagcaacgtgttcgaccccttctccctcgacctctgggaccccttcgacatgttccgctccatcgtcccgtcggcggcctcctccggcggcggttccgagaccgccgccttcgccaacgcccgcgtggactggaaggagacgcccgaggcgcacgtgttcaaggccgacctccccggcatcaagaaggaggaggtcaaggtcgaggtggaggacggcaacgtgctcgtcatcagcggcaagcgcagcagggaggaggaggacaagaacgacaagtggcaccgcgtcgagcgcagcagcggccagttcatgaggcgcttccgcctgcctgagaacgccaaggtcgacgaggtgaaggctggcctcgagaacggcgtgctcacggtcaccgtgcccaagacggaggtgaagaagcccgaggtgaaggctatcgagatctctggttgaccgtccgttggacgtcgattggagctccgttgtactgctactggtccgtggatgtcctgcatgttgcactgcagcggaggatgttcgctgcgtcttctacgcatttgctctgtttgtgctgtggtcgtcttccccgtatatggtttgtgtattgtcccttatcgataataataaataaaatcaggctttacgtc

SEQ ID NO: 11923 - protein, 168 aa, Zea mays subsp. mays
  peptide (1)..(168): Ceres Seq. ID no. 12403860
RIGPINNLPRTGCCNLRQGEIANLSLAKHTSSSTLLQLIHRVRFSSIASTINVARESAQQQRVRPLLPRPLGPLRHVPLHRPVGGLLRRRFRDRRLRQRPRGLEGDARGARVQGRPPRHQEGGGQGRGGGRQRARHQRQAQQGGGGQERQVAPRRAQQRPVHEALPPA

SEQ ID NO: 11924 - protein, 155 aa, Zea mays subsp. mays
  peptide (1)..(155): Ceres Seq. ID no. 12403861
  misc_feature (1)..(155): Homolog of NCBI NO: 100883 NR Description: heat shock protein 17.2 - maize
  misc_feature (1)..(155): Homolog of NCBI NO: 123543 NR Description: 16.9 KD CLASS I HEAT SHOCK PROTEIN
  misc_feature (1)..(155): Homolog of NCBI NO: 123545 NR Description: 16.9 KD CLASS I HEAT SHOCK PROTEIN (LOW MOLECULAR HEAT SHOCK PROTEIN) (HEAT SHOCK PROTEIN 17) (HSP 16.9)
  misc_feature (1)..(155): Homolog of NCBI NO: 169799 NR Description: 16.9 kDa heat shock protein
  misc_feature (1)..(155): Homolog of NCBI NO: 7441298 NR Description: heat shock protein 17.0 - pearl millet
  misc_feature (1)..(155): Homolog of NCBI NO: 17942916 NR Description: Chain A, Crystal Structure And Assembly Of An Small Heat Shock Protein >gi|17942917|pdb|1GME|B Chain B, Crystal And Assembly Of An Eukaryotic Small Heat Shock Protein Shock
  misc_feature (1)..(154): Homolog of NCBI NO: 445136 NR Description: heat shock protein 16.9
  misc_feature (1)..(155): Homolog of NCBI NO: 7441297 NR Description: heat shock protein 16.9 - pearl millet
  misc_feature (1)..(155): Homolog of NCBI NO: 100789 NR Description: heat shock protein 16.9B - wheat
  misc_feature (1)..(155): Homolog of NCBI NO: 1536911 NR Description: 17 kDa class I small heat shock protein [Hordeum
MSLVSRRSSNVFDPFSLDLWDPFDMFRSIVPSAASSGGGSETAAFANARVDWKETPEAHVFKADLPGIKKEEVKVEVEDGNVLVISGKRSREEEDKNDKWHRVERSSGQFMRRFRLPENAKVDEVKAGLENGVLTVTVPKTEVKKPEVKAIEISG

SEQ ID NO: 11925 - protein, 131 aa, Zea mays subsp. mays
  peptide (1)..(131): Ceres Seq. ID no. 12403862
  misc_feature (1)..(131): Homolog of NCBI NO: 17942916 NR Description: Chain A, Crystal Structure And Assembly Of An Small Heat Shock Protein >gi|17942917|pdb|1GME|B Chain B, Crystal And Assembly Of An Eukaryotic Small Heat Shock Protein Shock
  misc_feature (1)..(130): Homolog of NCBI NO: 445136 NR Description: heat shock protein 16.9
  misc_feature (1)..(131): Homolog of NCBI NO: 7441297 NR Description: heat shock protein 16.9 - pearl millet
  misc_feature (1)..(131): Homolog of NCBI NO: 100789 NR Description: heat shock protein 16.9B - wheat
  misc_feature (1)..(131): Homolog of NCBI NO: 1536911 NR Description: 17 kDa class I small heat shock protein [Hordeum
  misc_feature (1)..(131): Homolog of NCBI NO: 100883 NR Description: heat shock protein 17.2 - maize
  misc_feature (1)..(131): Homolog of NCBI NO: 123543 NR Description: 16.9 KD CLASS I HEAT SHOCK PROTEIN
  misc_feature (1)..(131): Homolog of NCBI NO: 123545 NR Description: 16.9 KD CLASS I HEAT SHOCK PROTEIN (LOW MOLECULAR HEAT SHOCK PROTEIN) (HEAT SHOCK PROTEIN 17) (HSP 16.9)
  misc_feature (1)..(131): Homolog of NCBI NO: 169799 NR Description: 16.9 kDa heat shock protein
  misc_feature (1)..(131): Homolog of NCBI NO: 7441298 NR Description: heat shock protein 17.0 - pearl millet
MFRSIVPSAASSGGGSETAAFANARVDWKETPEAHVFKADLPGIKKEEVKVEVEDGNVLVISGKRSREEEDKNDKWHRVERSSGQFMRRFRLPENAKVDEVKAGLENGVLTVTVPKTEVKKPEVKAIEISG

SEQ ID NO: 11926 - DNA, 770 bp, Zea mays subsp. mays
  misc_feature (1)..(770): Ceres Seq. ID no. 12348776
  misc_feature: MA Experiment ID: 108528 Result: Down-regulated in Transcription
  misc_feature: MA Experiment 108528 PARAMETER Experiment Name: Zm_Imbibed_Seeds_P Parameter: Age (day) Value: 5 vs. 2
  misc_feature: MA Experiment 108528 PARAMETER Experiment Name: Zm_Imbibed_Seeds_P Parameter: Organism Value: Zea mays
  misc_feature: MA Experiment 108528 PARAMETER Experiment Name: Zm_Imbibed_Seeds_P Parameter: Plant Line Value: 35A19
  misc_feature: MA Experiment 108528 PARAMETER Experiment Name: Zm_Imbibed_Seeds_P Parameter: Tissue Value: Aerial vs. Embryo
  misc_feature: MA Experiment ID: 108530 Result: Down-regulated in Transcription
  misc_feature: MA Experiment 108530 PARAMETER Experiment Name: Zm_Imbibed_Seeds_P Parameter: Age (day) Value: 6 vs. 2
  misc_feature: MA Experiment 108530 PARAMETER Experiment Name: Zm_Imbibed_Seeds_P Parameter: Organism Value: Zea mays
  misc_feature: MA Experiment 108530 PARAMETER Experiment Name: Zm_Imbibed_Seeds_P Parameter: Plant Line Value: 35A19
  misc_feature: MA Experiment 108530 PARAMETER Experiment Name: Zm_Imbibed_Seeds_P Parameter: Tissue Value: Aerial vs. Embryo
  misc_feature: MA Experiment ID: 108535 Result: Up-regulated in Transcription
  misc_feature: MA Experiment 108535 PARAMETER Experiment Name: Zm_Meristem_P Parameter: Age (day) Value: 8
  misc_feature: MA Experiment 108535 PARAMETER Experiment Name: Zm_Meristem_P Parameter: Organism Value: Zea mays
  misc_feature: MA Experiment 108535 PARAMETER Experiment Name: Zm_Meristem_P Parameter: Plant Line Value: 35A19
  misc_feature: MA Experiment 108535 PARAMETER Experiment Name: Zm_Meristem_P Parameter: Tissue Value: Root Meristem vs. Above Root Meristem
  misc_feature: MA Experiment ID: 20000488 Result: Up-regulated in Transcription
  misc_feature: MA Experiment 20000488 PARAMETER Experiment Name: Zm_50mM_NH4NO3_L_to_H_P Parameter: Organism Value: Zea mays
  misc_feature: MA Experiment 20000488 PARAMETER Experiment Name: Zm_50mM_NH4NO3_L_to_H_P Parameter: Timepoint (hr) Value: 8
  misc_feature: MA Experiment 20000488 PARAMETER Experiment Name: Zm_50mM_NH4NO3_L_to_H_P Parameter: Tissue Value: Leaves
  misc_feature: MA Experiment 20000488 PARAMETER Experiment Name: Zm_50mM_NH4NO3_L_to_H_P Parameter: Treatment Value: 50mM NH4NO3 vs. 100mM Mannitol
  misc_feature: MA Experiment ID: 20001606 Result: Up-regulated in Transcription
  misc_feature: MA Experiment 20001606 PARAMETER Experiment Name: Zm_50ppm_KNO3_L-to-H_P Parameter: Age (day) Value: 19
  misc_feature: MA Experiment 20001606 PARAMETER Experiment Name: Zm_50ppm_KNO3_L-to-H_P Parameter: Organism Value: Zea mays
  misc_feature: MA Experiment 20001606 PARAMETER Experiment Name: Zm_50ppm_KNO3_L-to-H_P Parameter: Plant Line Value: 35A19
  misc_feature: MA Experiment 20001606 PARAMETER Experiment Name: Zm_50ppm_KNO3_L-to-H_P Parameter: Timepoint (hr) Value: 8
  misc_feature: MA Experiment 20001606 PARAMETER Experiment Name: Zm_50ppm_KNO3_L-to-H_P Parameter: Tissue Value: Shoots
  misc_feature: MA Experiment 20001606 PARAMETER Experiment Name: Zm_50ppm_KNO3_L-to-H_P Parameter: Treatment Value: 50ppm KNO3 vs. 50ppm KCl
  misc_feature: MA Experiment ID: 20001612 Result: Up-regulated in Transcription
  misc_feature: MA Experiment 20001612 PARAMETER Experiment Name: Zm_50ppm_KNO3_L-to-H_P Parameter: Age (day) Value: 19
  misc_feature: MA Experiment 20001612 PARAMETER Experiment Name: Zm_50ppm_KNO3_L-to-H_P Parameter: Organism Value: Zea mays
  misc_feature: MA Experiment 20001612 PARAMETER Experiment Name: Zm_50ppm_KNO3_L-to-H_P Parameter: Plant Line Value: 35A19
  misc_feature: MA Experiment 20001612 PARAMETER Experiment Name: Zm_50ppm_KNO3_L-to-H_P Parameter: Timepoint (hr) Value: 8
  misc_feature: MA Experiment 20001612 PARAMETER Experiment Name: Zm_50ppm_KNO3_L-to-H_P Parameter: Tissue Value: Roots
  misc_feature: MA Experiment 20001612 PARAMETER Experiment Name: Zm_50ppm_KNO3_L-to-H_P Parameter: Treatment Value: 50ppm KNO3 vs. 50ppm KCl
agtcgcctccttcctgcgccgccgccgccgccgccgccgccgctaccaccgcctcgcggccgcctgcggctccgcgtttccgcacggaagttggtgaaggtttcttgaggctgagaacatggtgctgaagacggaactttgccgcttcagcggccagaagatttatcctgggaaaggcattagatttatccgtgctgattctcaggtcttcctttttgccaactcgaaatgcaagcgctacttccacaaccgcctgaagcctgcaaagcttacctggacagcaatgtacaggaagcagcacaagaaggatatccatgctgaagcggtaaagaagaggcgccgcgccaccaagaagccatactccaggtcaattgtgggtgcttccttggaagtaatccagaagaagagagctgagaagccagaggtccgcgatgctgctagagaagctgctcttcgtgagatcaaggagcgcatcaagaagaccaaggatgagaagaaagcgaagaaggcggaggtgagcaagtcccagaagacgcagacaaagggtgcggtccagaagggttccaagggccccaagttgggcggcggtggtgggaagcgctgaaagaacttagtgtcgtttctcgacattgcagtcgttccttagccaaagccactttcgtagaacctgtgttgaatttgcaagacttattcaagcgttgcttttgcgtgctaaataccatggcaagagaacggatttatatttatgcctgaaaaaaatgaccgttcat

SEQ ID NO: 11927 - protein, 161 aa, Zea mays subsp. mays; identical to SEQ ID NO: 1700
  peptide (1)..(161): Ceres Seq. ID no. 12348777
  misc_feature (3)..(73): Pfam Name: Ribosomal protein L24e Pfam Description: Ribosomal protein L24e
  misc_feature (1)..(161): Homolog of NCBI NO: 1710521 NR Description: 60S RIBOSOMAL PROTEIN L24 >gi|7440778|pir||T06178
  misc_feature (4)..(161): Homolog of NCBI NO: 34900364 NR Description: putative 60S ribosomal protein L24 [Oryza sativa
  misc_feature (1)..(160): Homolog of NCBI NO: 6094040 NR Description: 60S ribosomal protein L24
  misc_feature (1)..(156): Homolog of NCBI NO: 10180025 NR Description: 60S ribosomal protein L24 [Prunus avium]
  misc_feature (1)..(161): Homolog of NCBI NO: 18404176 NR Description: 60S ribosomal protein L24; protein id: supported by cDNA: 14564., supported by cDNA: gi_16604375, by cDNA: gi_18252830 [Arabidopsis thaliana]
  misc_feature (1)..(161): Homolog of NCBI NO: 15231730 NR Description: 60S ribosomal protein - like; protein id: supported by cDNA: gi_16648705, supported by cDNA: gi_20260561 thaliana] >gi|26454659|sp|P38666|RL24_ARATH 60S ribosomal protein
  misc_feature (5)..(161): Homolog of NCBI NO: 25295112 NR Description: 60S ribosomal protein L24 [imported] -
  misc_feature (3)..(150): Homolog of NCBI NO: 19075214 NR Description: 60s ribosomal protein L24 [Schizosaccharomyces
  misc_feature (3)..(150): Homolog of NCBI NO: 19115030 NR Description: 60S ribosomal protein L24 [Schizosaccharomyces
  misc_feature (10)..(154): Homolog of NCBI NO: 40741063 NR Description: conserved hypothetical protein [Aspergillus

SEQ ID NO: 11928 - protein, 106 aa, Zea mays subsp. mays; identical to SEQ ID NO: 1701
  peptide (1)..(106): Ceres Seq. ID no. 12348778
  misc_feature (1)..(106): Homolog of NCBI NO: 1710521 NR Description: 60S RIBOSOMAL PROTEIN L24 >gi|7440778|pir||T06178
  misc_feature (1)..(106): Homolog of NCBI NO: 34900364 NR Description: putative 60S ribosomal protein L24 [Oryza sativa
  misc_feature (1)..(105): Homolog of NCBI NO: 6094040 NR Description: 60S ribosomal protein L24
  misc_feature (1)..(101): Homolog of NCBI NO: 10180025 NR Description: 60S ribosomal protein L24 [Prunus avium]
  misc_feature (1)..(106): Homolog of NCBI NO: 18404176 NR Description: 60S ribosomal protein L24; protein id: supported by cDNA: 14564., supported by cDNA: gi_16604375, by cDNA: gi_18252830 [Arabidopsis thaliana]
  misc_feature (1)..(106): Homolog of NCBI NO: 15231730 NR Description: 60S ribosomal protein - like; protein id: supported by cDNA: gi_16648705, supported by cDNA: gi_20260561 thaliana] >gi|26454659|sp|P38666|RL24_ARATH 60S ribosomal protein
  misc_feature (1)..(106): Homolog of NCBI NO: 25295112 NR Description: 60S ribosomal protein L24 [imported] -
  misc_feature (1)..(95): Homolog of NCBI NO: 19075214 NR Description: 60s ribosomal protein L24 [Schizosaccharomyces
  misc_feature (1)..(95): Homolog of NCBI NO: 19115030 NR Description: 60S ribosomal protein L24 [Schizosaccharomyces
  misc_feature (1)..(99): Homolog of NCBI NO: 40741063 NR Description: conserved hypothetical protein [Aspergillus

SEQ ID NO: 11929 - DNA, 1605 bp, Zea mays subsp. mays
  misc_feature (1)..(1605): Ceres Seq. ID no. 12350452
  misc_feature: MA Experiment ID: 20000108 Result: Up-regulated in Transcription
  misc_feature: MA Experiment 20000108 PARAMETER Experiment Name: Zm_Root-Tips_P Parameter: Age (day) Value: 12
  misc_feature: MA Experiment 20000108 PARAMETER Experiment Name: Zm_Root-Tips_P Parameter: Organism Value: Zea mays
  misc_feature: MA Experiment 20000108 PARAMETER Experiment Name: Zm_Root-Tips_P Parameter: Tissue Value: Root tips vs. Root mid region    35
  misc_feature: MA Experiment 20000108 PARAMETER Experiment Name: Zm_Root-Tips_P Parameter: Tissue Value: Root tips vs. Root mid region   Sequence Listing-Misc Features (4)
agggcgacgaacgatggctggctggccgtccgtgattgttttggaacgggcagcgtgtttggttggtgcctgtgctgtgccgccgttcgtctctgggtagcgtagcgacggcgccacggcggcttccggctcgtgcgcgcgcgcgcgtgtccgggcgagaagagctgccaagggatggaggcgctgaggaagcaggcgagcaagttcaaggagcaggtcgccaagcagcagcaggctgttataaagcaattcagtactactggctatgagcggtcagattccattgtaattgatgaggttgaactacagagacatcaacagcttgagaaattgtatacttctactcgttctgtaagggatttccagaaggacatagttagagcagctgaaggtttggtgtctattggaaacaaacatattgaagtgggaacaaaattttctgaggactgctatagatatggaagcgaaaataatgcaagcgacgaagcccttagaaaagcagcatcactatacggaggtgctttgagaaatattgagaaagagtatgaagatttcaacagaattttatcttctcagactatagacccattgagagcaatggctatgggtggacccctggaagatgctcgtggtcttgcacagcgctatagcaggatgagacatgaagctgagatcctctctactgaaattgctagaagaaaggcacgggtaagagaagctccaattgctgagcacactacaaagcttcagcaatcagaagctagaatgatagagcacaaagcaagcatggccgtgttagggaaggaagcagcagctgcacttgcagctgtcgagtctcaacagcaacgagtgacccttcagaggctggttggcacggcggaagcagaaaagttattccatctgagattagctgctatacttgatgacgttgaggcagagatgtcctctgagaagcaaaggagagaatctgcaccacctatcatatcttcacataagcgtgctgagaaagctcagtacttccttgctgaggtaatgcataatttcaatggaaccacggagaaggaactgagcttaattgttggcgattatgttgttgttcgtcagattgctcccaacggctgggcggaaggagaatgccgagggaaggctggctggtttccggctgcctatgttgagaggcgcgagaatatccccccgaataaagttttccctcaagtataagatcataagaggggtcatctgtttccactgataagcagtttggtttggcattgaggagctgcaaggctgtatctaacttctgattggtttgatgctccgtatggcgtatcttgtgcatcctatgttcttgtggtggtctagacttggaataagatatgtcggcacgtgctctgcgcctgtgcctgcgcgcacattgatgaagatgtcgctttgcatgtgtccgcagtgtgctactgcttgcggcagcgtaggtcatgttgaatgagctttcctttactgacagatttcgagtgtaaattggttcttgcacttttttttcgttagggtgtatcagtagttctgtacaatatgtttttaatgagaccattcggccatcagagcttt

SEQ ID NO: 11930 - protein, 348 aa, Zea mays subsp. mays
  peptide (1)..(348): Ceres Seq. ID no. 12350453
  misc_feature (282)..(336): Pfam Name: SH3 domain Pfam Description: SH3 domain
  misc_feature (1)..(347): Homolog of NCBI NO: 22093679 NR Description: putative SH3(Src homology) domain-containing
  misc_feature (1)..(348): Homolog of NCBI NO: 21928139 NR Description: AT4g18060/F15J5_30 [Arabidopsis thaliana]
  misc_feature (1)..(348): Homolog of NCBI NO: 22328762 NR Description: putative protein; protein id: At4g18060.1,
  misc_feature (1)..(348): Homolog of NCBI NO: 16974680 NR Description: SH3 domain-containing protein 3 [Arabidopsis
  misc_feature (1)..(272): Homolog of NCBI NO: 38344978 NR Description: OSJNBa0011L07.8 [Oryza sativa (japonica
  misc_feature (281)..(348): Homolog of NCBI NO: 38344978 NR Description: OSJNBa0011L07.8 [Oryza sativa (japonica
  misc_feature (1)..(260): Homolog of NCBI NO: 7485521 NR Description: hypothetical protein F15J5.30 - Arabidopsis >gi|5816992|emb|CAB53647.1| putative protein [Arabidopsis >gi|7268558|emb|CAB78808.1| putative protein [Arabidopsis
  misc_feature (1)..(273): Homolog of NCBI NO: 15221714 NR Description: unknown protein; protein id: At1g31440.1, by cDNA: gi_16974675, supported by cDNA: gi_19424042, supported
  misc_feature (276)..(344): Homolog of NCBI NO: 15221714 NR Description: unknown protein; protein id: At1g31440.1, by cDNA: gi_16974675, supported by cDNA: gi_19424042, supported
  misc_feature (1)..(272): Homolog of NCBI NO: 18418491 NR Description: putative protein; protein id: At4g34660.1, by cDNA: 32357., supported by cDNA: gi_18175937, supported by
MEALRKQASKFKEQVAKQQQAVIKQFSTTGYERSDSIVIDEVELQRHQQLEKLYTSTRSVRDFQKDIVRAAEGLVSIGNKHIEVGTKFSEDCYRYGSENNASDEALRKAASLYGGALRNIEKEYEDFNRILSSQTIDPLRAMAMGGPLEDARGLAQRYSRMRHEAEILSTEIARRKARVREAPIAEHTTKLQQSEARMIEHKASMAVLGKEAAAALAAVESQQQRVTLQRLVGTAEAEKLFHLRLAAILDDVEAEMSSEKQRRESAPPIISSHKRAEKAQYFLAEVMHNFNGTTEKELSLIVGDYVVVRQIAPNGWAEGECRGKAGWFPAAYVERRENIPPNKVFPQV

SEQ ID NO: 11931 - protein, 207 aa, Zea mays subsp. mays; identical to SEQ ID NO: 6174
  peptide (1)..(207): Ceres Seq. ID no. 12350454
  misc_feature (141)..(195): Pfam Name: SH3 domain Pfam Description: SH3 domain
  misc_feature (1)..(206): Homolog of NCBI NO: 22093679 NR Description: putative SH3(Src homology) domain-containing
  misc_feature (1)..(207): Homolog of NCBI NO: 21928139 NR Description: AT4g18060/F15J5_30 [Arabidopsis thaliana]
  misc_feature (1)..(207): Homolog of NCBI NO: 22328762 NR Description: putative protein; protein id: At4g18060.1,
  misc_feature (1)..(207): Homolog of NCBI NO: 16974680 NR Description: SH3 domain-containing protein 3 [Arabidopsis
  misc_feature (1)..(131): Homolog of NCBI NO: 38344978 NR Description: OSJNBa0011L07.8 [Oryza sativa (japonica
  misc_feature (140)..(207): Homolog of NCBI NO: 38344978 NR Description: OSJNBa0011L07.8 [Oryza sativa (japonica
  misc_feature (1)..(119): Homolog of NCBI NO: 7485521 NR Description: hypothetical protein F15J5.30 - Arabidopsis >gi|5816992|emb|CAB53647.1| putative protein [Arabidopsis >gi|7268558|emb|CAB78808.1| putative protein [Arabidopsis
  misc_feature (1)..(132): Homolog of NCBI NO: 15221714 NR Description: unknown protein; protein id: At1g31440.1, by cDNA: gi_16974675, supported by cDNA: gi_19424042, supported
  misc_feature (135)..(203): Homolog of NCBI NO: 15221714 NR Description: unknown protein; protein id: At1g31440.1, by cDNA: gi_16974675, supported by cDNA: gi_19424042, supported
  misc_feature (1)..(131): Homolog of NCBI NO: 18418491 NR Description: putative protein; protein id: At4g34660.1, by cDNA: 32357., supported by cDNA: gi_18175937, supported by

SEQ ID NO: 11932 - protein, 205 aa, Zea mays subsp. mays; identical to SEQ ID NO: 6175
  peptide (1)..(205): Ceres Seq. ID no. 12350455
  misc_feature (139)..(193): Pfam Name: SH3 domain Pfam Description: SH3 domain
  misc_feature (1)..(204): Homolog of NCBI NO: 22093679 NR Description: putative SH3(Src homology) domain-containing
  misc_feature (1)..(205): Homolog of NCBI NO: 21928139 NR Description: AT4g18060/F15J5_30 [Arabidopsis thaliana]
  misc_feature (1)..(205): Homolog of NCBI NO: 22328762 NR Description: putative protein; protein id: At4g18060.1,
  misc_feature (1)..(205): Homolog of NCBI NO: 16974680 NR Description: SH3 domain-containing protein 3 [Arabidopsis
  misc_feature (1)..(129): Homolog of NCBI NO: 38344978 NR Description: OSJNBa0011L07.8 [Oryza sativa (japonica
  misc_feature (138)..(205): Homolog of NCBI NO: 38344978 NR Description: OSJNBa0011L07.8 [Oryza sativa (japonica
  misc_feature (1)..(117): Homolog of NCBI NO: 7485521 NR Description: hypothetical protein F15J5.30 - Arabidopsis >gi|5816992|emb|CAB53647.1| putative protein [Arabidopsis >gi|7268558|emb|CAB78808.1| putative protein [Arabidopsis
  misc_feature (1)..(130): Homolog of NCBI NO: 15221714 NR Description: unknown protein; protein id: At1g31440.1, by cDNA: gi_16974675, supported by cDNA: gi_19424042, supported
  misc_feature (133)..(201): Homolog of NCBI NO: 15221714 NR Description: unknown protein; protein id: At1g31440.1, by cDNA: gi_16974675, supported by cDNA: gi_19424042, supported
  misc_feature (1)..(129): Homolog of NCBI NO: 18418491 NR Description: putative protein; protein id: At4g34660.1, by cDNA: 32357., supported by cDNA: gi_18175937, supported by

SEQ ID NO: 11933 - DNA, 1402 bp, Zea mays subsp. mays
  misc_feature (1)..(1402): Ceres Seq. ID no. 13492514
  misc_feature: MA Experiment ID: 20000534 Result: Down-regulated in Transcription
  misc_feature: MA Experiment 20000534 PARAMETER Experiment Name: Zm_Hybrid_Pollen_P Parameter: Age (day) Value: 8
  misc_feature: MA Experiment 20000534 PARAMETER Experiment Name: Zm_Hybrid_Pollen_P Parameter: Organism Value: Zea mays
  misc_feature: MA Experiment 20000534 PARAMETER Experiment Name: Zm_Hybrid_Pollen_P Parameter: Plant Line Value: 35A19
  misc_feature: MA Experiment 20000534 PARAMETER Experiment Name: Zm_Hybrid_Pollen_P Parameter: Tissue Value: Pollen vs. Aerial
  misc_feature: MA Experiment ID: 20000535 Result: Down-regulated in Transcription
  misc_feature: MA Experiment 20000535 PARAMETER Experiment Name: Zm_Hybrid_Seed_Dev_P Parameter: DAP Value: 30 vs. 12
  misc_feature: MA Experiment 20000535 PARAMETER Experiment Name: Zm_Hybrid_Seed_Dev_P Parameter: Organism Value: Zea mays
  misc_feature: MA Experiment 20000535 PARAMETER Experiment Name: Zm_Hybrid_Seed_Dev_P Parameter: Plant Line Value: 35A19
  misc_feature: MA Experiment 20000535 PARAMETER Experiment Name: Zm_Hybrid_Seed_Dev_P Parameter: Tissue Value: Embryo vs. Unfert Floret
atgtgacagttcgggcaccgacgtccgtctccgtacttccggctgtgtgcgaaactgcgaacgcgtgatatctccgcgtacgcaaacgcgacgcgaaggtcagcacggacaactctacccctccgcctcgaccctgaccccccacctcgtcggcgatgagttcctcttccaacggcgggaagaagccggctcccggcggcggccgcaggggtcccgccatccgcacgctcgctgacataagccgtgggcccaccggcttcccaggtgccggaggcggcgacagcggcagcgacgacgacgagccacaggaatactacaccggtggcgagaagagtggaatgcttgttcaagatccaacaagaagaaatgatgtggatgcgatatttgaacaagccagacaagcgggtatcaaaggaatgcctcctcttcttgatggcgagtcttccagctctaggagctttacagggactgggccgacttcttacaggggagacaatatcatctgctgcacctcaggaaccagtaccaattcgagtacgccacaatatacatttgtggaacaatggctttagtgtggatgatggtccactgagatactacgacgatcctgaaaatgcagagttccttgagagccttaagatgtcaaagtgccccaaggagctggtgcctactgatggagaacatgttgatgcgtctgttattagaaggatggaagattacagggaacctgtaaggcctcgatcagctttccagggtgttggaagaacccttggtggtggaccttccccagatgagagcgcaacagctgctcctgcatcagcggcccctgctgcttcgaggtccgctggcgttgtcgtggatgactcccagccatttacgtccatacagctgaggctggctgacggcactcgcatggtcgcccggttcaacatgcaccacaccgtgggagacatcaggtcctttatagacgcagctcggcctggagctgcaaggccttatcagctgcagacgggtttccctcccaagcagctggctgacccaacgcagaccgtggagcaagctgggcttgcaaactctgttatcatgcagaagatgtaaatgcttcggctggcaacctggggagctcggatgcatcgtactgcatcttctgaaaaccgtaatattatggttgatcatgttatcagatactgctctggtgcatcattctcagtcatggttacttacagtagcatctggtgcctcgttgggagcacaggagtttataattcatctaggaactgaagtatgctttcttgcatcactattgcatcacttttttcatttttaatattggtgttatgatatttcgtgtttccatggccgcttccttgcaagttgaagcgcgactcgcaagtcgcagcat

SEQ ID NO: 11934 - protein, 243 aa, Zea mays subsp. mays
  peptide (1)..(243): Ceres Seq. ID no. 13492515
  misc_feature (165)..(242): Pfam Name: UBX domain Pfam Description: UBX domain
  misc_feature (34)..(242): Homolog of NCBI NO: 13123657 NR Description: phosphatase-like protein Mtc923 [Medicago
  misc_feature (34)..(243): Homolog of NCBI NO: 13123659 NR Description: phosphatase-like protein Psc923 [Pisum sativum]
  misc_feature (27)..(242): Homolog of NCBI NO: 18412499 NR Description: membrane trafficking factor -related [Arabidopsis >gi|20268692|gb|AAM14050.1| putative membrane trafficking factor thaliana] >gi|21553471|gb|AAM62564.1| putative membrane
  misc_feature (27)..(242): Homolog of NCBI NO: 7487458 NR Description: hypothetical protein T27D20.10 - Arabidopsis >gi|3377843|gb|AAC28225.1| contains similarity to rat p47 protein
  misc_feature (34)..(242): Homolog of NCBI NO: 15234731 NR Description: expressed protein [Arabidopsis thaliana]
  misc_feature (25)..(242): Homolog of NCBI NO: 18414442 NR Description: phosphatase like protein [Arabidopsis thaliana]
  misc_feature (25)..(242): Homolog of NCBI NO: 15292665 NR Description: putative phosphatase [Arabidopsis thaliana]
  misc_feature (25)..(239): Homolog of NCBI NO: 7485149 NR Description: hypothetical protein - Arabidopsis thaliana phosphatase like protein [Arabidopsis thaliana]
  misc_feature (48)..(243): Homolog of NCBI NO: 29568099 NR Description: p47 protein [Homo sapiens]
  misc_feature (61)..(243): Homolog of NCBI NO: 20149635 NR Description: p47 protein [Homo sapiens] dJ776F14.1 (P47 protein) [Homo sapiens]
MMWMRYLNKPDKRVSKECLLFLMASLPALGALQGLGRLLTGETISSAAPQEPVPIRVRHNIHLWNNGFSVDDGPLRYYDDPENAEFLESLKMSKCPKELVPTDGEHVDASVIRRMEDYREPVRPRSAFQGVGRTLGGGPSPDESATAAPASAAPAASRSAGVVVDDSQPFTSIQLRLADGTRMVARFNMHHTVGDIRSFIDAARPGAARPYQLQTGFPPKQLADPTQTVEQAGLANSVIMQKM

SEQ ID NO: 11935 - protein, 242 aa, Zea mays subsp. mays
  peptide (1)..(242): Ceres Seq. ID no. 13492516
  misc_feature (164)..(241): Pfam Name: UBX domain Pfam Description: UBX domain
  misc_feature (33)..(241): Homolog of NCBI NO: 13123657 NR Description: phosphatase-like protein Mtc923 [Medicago
  misc_feature (33)..(242): Homolog of NCBI NO: 13123659 NR Description: phosphatase-like protein Psc923 [Pisum sativum]
  misc_feature (26)..(241): Homolog of NCBI NO: 18412499 NR Description: membrane trafficking factor -related [Arabidopsis >gi|20268692|gb|AAM14050.1| putative membrane trafficking factor thaliana] >gi|21553471|gb|AAM62564.1| putative membrane
  misc_feature (26)..(241): Homolog of NCBI NO: 7487458 NR Description: hypothetical protein T27D20.10 - Arabidopsis >gi|3377843|gb|AAC28225.1| contains similarity to rat p47 protein
  misc_feature (33)..(241): Homolog of NCBI NO: 15234731 NR Description: expressed protein [Arabidopsis thaliana]
  misc_feature (24)..(241): Homolog of NCBI NO: 18414442 NR Description: phosphatase like protein [Arabidopsis thaliana]
  misc_feature (24)..(241): Homolog of NCBI NO: 15292665 NR Description: putative phosphatase [Arabidopsis thaliana]
  misc_feature (24)..(238): Homolog of NCBI NO: 7485149 NR Description: hypothetical protein - Arabidopsis thaliana phosphatase like protein [Arabidopsis thaliana]
  misc_feature (47)..(242): Homolog of NCBI NO: 29568099 NR Description: p47 protein [Homo sapiens]
  misc_feature (60)..(242): Homolog of NCBI NO: 20149635 NR Description: p47 protein [Homo sapiens] dJ776F14.1 (P47 protein) [Homo sapiens]
MWMRYLNKPDKRVSKECLLFLMASLPALGALQGLGRLLTGETISSAAPQEPVPIRVRHNIHLWNNGFSVDDGPLRYYDDPENAEFLESLKMSKCPKELVPTDGEHVDASVIRRMEDYREPVRPRSAFQGVGRTLGGGPSPDESATAAPASAAPAASRSAGVVVDDSQPFTSIQLRLADGTRMVARFNMHHTVGDIRSFIDAARPGAARPYQLQTGFPPKQLADPTQTVEQAGLANSVIMQKM

SEQ ID NO: 11936 - protein, 240 aa, Zea mays subsp. mays
  peptide (1)..(240): Ceres Seq. ID no. 13492517
  misc_feature (162)..(239): Pfam Name: UBX domain Pfam Description: UBX domain
  misc_feature (31)..(239): Homolog of NCBI NO: 13123657 NR Description: phosphatase-like protein Mtc923 [Medicago
  misc_feature (31)..(240): Homolog of NCBI NO: 13123659 NR Description: phosphatase-like protein Psc923 [Pisum sativum]
  misc_feature (24)..(239): Homolog of NCBI NO: 18412499 NR Description: membrane trafficking factor -related [Arabidopsis >gi|20268692|gb|AAM14050.1| putative membrane trafficking factor thaliana] >gi|21553471|gb|AAM62564.1| putative membrane
  misc_feature (24)..(239): Homolog of NCBI NO: 7487458 NR Description: hypothetical protein T27D20.10 - Arabidopsis >gi|3377843|gb|AAC28225.1| contains similarity to rat p47 protein
  misc_feature (31)..(239): Homolog of NCBI NO: 15234731 NR Description: expressed protein [Arabidopsis thaliana]
  misc_feature (22)..(239): Homolog of NCBI NO: 18414442 NR Description: phosphatase like protein [Arabidopsis thaliana]
  misc_feature (22)..(239): Homolog of NCBI NO: 15292665 NR Description: putative phosphatase [Arabidopsis thaliana]
  misc_feature (22)..(236): Homolog of NCBI NO: 7485149 NR Description: hypothetical protein - Arabidopsis thaliana phosphatase like protein [Arabidopsis thaliana]
  misc_feature (45)..(240): Homolog of NCBI NO: 29568099 NR Description: p47 protein [Homo sapiens]
  misc_feature (58)..(240): Homolog of NCBI NO: 20149635 NR Description: p47 protein [Homo sapiens] dJ776F14.1 (P47 protein) [Homo sapiens]
MRYLNKPDKRVSKECLLFLMASLPALGALQGLGRLLTGETISSAAPQEPVPIRVRHNIHLWNNGFSVDDGPLRYYDDPENAEFLESLKMSKCPKELVPTDGEHVDASVIRRMEDYREPVRPRSAFQGVGRTLGGGPSPDESATAAPASAAPAASRSAGVVVDDSQPFTSIQLRLADGTRMVARFNMHHTVGDIRSFIDAARPGAARPYQLQTGFPPKQLADPTQTVEQAGLANSVIMQKM

SEQ ID NO: 11937 - DNA, 1276 bp, Zea mays subsp. mays
  misc_feature (1)..(1276): Ceres Seq. ID no. 12341164
  misc_feature: MA Experiment ID: 108523 Result: Down-regulated in Transcription
  misc_feature: MA Experiment 108523 PARAMETER Experiment Name: Zm_42deg_Heat_P Parameter: Age (day) Value: 8
  misc_feature: MA Experiment 108523 PARAMETER Experiment Name: Zm_42deg_Heat_P Parameter: Organism Value: Zea mays
  misc_feature: MA Experiment 108523 PARAMETER Experiment Name: Zm_42deg_Heat_P Parameter: Plant Line Value: 35A19
  misc_feature: MA Experiment 108523 PARAMETER Experiment Name: Zm_42deg_Heat_P Parameter: Temperature (deg C) Value: 42 vs. 22
  misc_feature: MA Experiment 108523 PARAMETER Experiment Name: Zm_42deg_Heat_P Parameter: Timepoint (hr) Value: 6
  misc_feature: MA Experiment 108523 PARAMETER Experiment Name: Zm_42deg_Heat_P Parameter: Tissue Value: Aerial
  misc_feature: MA Experiment ID: 108527 Result: Down-regulated in Transcription
  misc_feature: MA Experiment 108527 PARAMETER Experiment Name: Zm_5mM_NO_P Parameter: Age (day) Value: 8
  misc_feature: MA Experiment 108527 PARAMETER Experiment Name: Zm_5mM_NO_P Parameter: Organism Value: Zea mays
  misc_feature: MA Experiment 108527 PARAMETER Experiment Name: Zm_5mM_NO_P Parameter: Plant Line Value: 35A19
  misc_feature: MA Experiment 108527 PARAMETER Experiment Name: Zm_5mM_NO_P Parameter: Timepoint (hr) Value: 6
  misc_feature: MA Experiment 108527 PARAMETER Experiment Name: Zm_5mM_NO_P Parameter: Tissue Value: Aerial
  misc_feature: MA Experiment 108527 PARAMETER Experiment Name: Zm_5mM_NO_P Parameter: Treatment Value: 5mM NO vs. No Treatment
  misc_feature: MA Experiment ID: 20000492 Result: Down-regulated in Transcription
  misc_feature: MA Experiment 20000492 PARAMETER Experiment Name: Zm_Hybrid_Seed_Dev_P Parameter: DAP Value: 12
  misc_feature: MA Experiment 20000492 PARAMETER Experiment Name: Zm_Hybrid_Seed_Dev_P Parameter: Organism Value: Zea mays
  misc_feature: MA Experiment 20000492 PARAMETER Experiment Name: Zm_Hybrid_Seed_Dev_P Parameter: Plant Line Value: 35A19
  misc_feature: MA Experiment 20000492 PARAMETER Experiment Name: Zm_Hybrid_Seed_Dev_P Parameter: Tissue Value: Fert Kernel vs. Unfert Floret
  misc_feature: MA Experiment ID: 20000535 Result: Down-regulated in Transcription
  misc_feature: MA Experiment 20000535 PARAMETER Experiment Name: Zm_Hybrid_Seed_Dev_P Parameter: DAP Value: 30 vs. 12
  misc_feature: MA Experiment 20000535 PARAMETER Experiment Name: Zm_Hybrid_Seed_Dev_P Parameter: Organism Value: Zea mays
  misc_feature: MA Experiment 20000535 PARAMETER Experiment Name: Zm_Hybrid_Seed_Dev_P Parameter: Plant Line Value: 35A19
  misc_feature: MA Experiment 20000535 PARAMETER Experiment Name: Zm_Hybrid_Seed_Dev_P Parameter: Tissue Value: Embryo vs. Unfert Floret
attaagattagcaaaattgtgggccagcagcaggagcgccccccgtctccctccaccctcctctgtcagggtcctccgagtcggacttcctcacggccgccgcgccaaatcccgtctcgttgctccggtccgctgcgcatcctcaggaatggaacttggcgccaccactgccctctaccctctgcaccgctgcaaaaccatttacctggtcaggcatgcccagggcattcacaatgtcgcgggggagaaggactttggtgcatacatgtcacatgatctgttcgatgctcagctcactcctttgggttggaaccaagtcgatggtctgcgggagcatgtgaagaaaagtgggcttgcagaaaagattgaattagttatttcttcccctttactgaggactatgcaaactgcagttggtgtctttggtggtgaaaagtatattgatggtgtaaatgcacctccactaatggtcgaaaatgccggacacagtggtcgtccggcagtttcaagtttgaactgccccccatttattgcagtcgaaacctgcagagagcacttgggtgtccatccctgtgacaagaggaggagcataacagaataccggcctctctttcctgcgattgatttttcattgatagagaatgatgaagatgttctttgggaaccagatgtgagagaaccaaatgaggctgtcgctttgaggggtatgaagttcatggactggttgtggacaagagaagagaaagagatagctattgtcagtcacagtggtttcttgtttcacaccttaagcatgtacagtaaggagtgtcatccaaccataagagacgaagttggcaagcactttgcaaactgcgagctacggtcgatggtgttggttgacagaagcatgcttggatcatattcttcaagattcaactatgctggcaagaatccaaccggactagatgtgcctagtgatattgcagataagaagcaggttgacgaagctcagaagaactgaggcaacctcgaaagcataccatatatgacttggattatcaagaaattctgacctttgcgaagcttgtttgctttgaagaggacaagctaagagggcatctacagatagagtttacgcataccattttgttagtcaagttgaactacgcagcaatgtattagcatgtctgctcttttgtctcagcctacattgagattcagggccttggactacgattatctatttatgataataataaccggatcacctacattcaccaggtgatgcatggcc

SEQ ID NO: 11938 - protein, 333 aa, Zea mays subsp. mays
  peptide (1)..(333): Ceres Seq. ID no. 12341165
  misc_feature (65)..(303): Pfam Name: Phosphoglycerate mutase family Pfam Description: Phosphoglycerate mutase family
  misc_feature (55)..(322): Homolog of NCBI NO: 38344765 NR Description: OSJNBa0068L06.8 [Oryza sativa (japonica
LRLAKLWASSRSAPRLPPPSSVRVLRVGLPHGRRAKSRLVAPVRCASSGMELGATTALYPLHRCKTIYLVRHAQGIHNVAGEKDFGAYMSHDLFDAQLTPLGWNQVDGLREHVKKSGLAEKIELVISSPLLRTMQTAVGVFGGEKYIDGVNAPPLMVENAGHSGRPAVSSLNCPPFIAVETCREHLGVHPCDKRRSITEYRPLFPAIDFSLIENDEDVLWEPDVREPNEAVALRGMKFMDWLWTREEKEIAIVSHSGFLFHTLSMYSKECHPTIRDEVGKHFANCELRSMVLVDRSMLGSYSSRFNYAGKNPTGLDVPSDIADKKQVDEAQKN

SEQ ID NO: 11939 - protein, 284 aa, Zea mays subsp. mays
  peptide (1)..(284): Ceres Seq. ID no. 12341166
  misc_feature (16)..(254): Pfam Name: Phosphoglycerate mutase family Pfam Description: Phosphoglycerate mutase family
  misc_feature (6)..(273): Homolog of NCBI NO: 38344765 NR Description: OSJNBa0068L06.8 [Oryza sativa (japonica
MELGATTALYPLHRCKTIYLVRHAQGIHNVAGEKDFGAYMSHDLFDAQLTPLGWNQVDGLREHVKKSGLAEKIELVISSPLLRTMQTAVGVFGGEKYIDGVNAPPLMVENAGHSGRPAVSSLNCPPFIAVETCREHLGVHPCDKRRSITEYRPLFPAIDFSLIENDEDVLWEPDVREPNEAVALRGMKFMDWLWTREEKEIAIVSHSGFLFHTLSMYSKECHPTIRDEVGKHFANCELRSMVLVDRSMLGSYSSRFNYAGKNPTGLDVPSDIADKKQVDEAQKN

SEQ ID NO: 11940 - protein, 245 aa, Zea mays subsp. mays
  peptide (1)..(245): Ceres Seq. ID no. 12341167
  misc_feature (1)..(215): Pfam Name: Phosphoglycerate mutase family Pfam Description: Phosphoglycerate mutase family
  misc_feature (1)..(234): Homolog of NCBI NO: 38344765 NR Description: OSJNBa0068L06.8 [Oryza sativa (japonica
MSHDLFDAQLTPLGWNQVDGLREHVKKSGLAEKIELVISSPLLRTMQTAVGVFGGEKYIDGVNAPPLMVENAGHSGRPAVSSLNCPPFIAVETCREHLGVHPCDKRRSITEYRPLFPAIDFSLIENDEDVLWEPDVREPNEAVALRGMKFMDWLWTREEKEIAIVSHSGFLFHTLSMYSKECHPTIRDEVGKHFANCELRSMVLVDRSMLGSYSSRFNYAGKNPTGLDVPSDIADKKQVDEAQKN

SEQ ID NO: 11941 - DNA, 1304 bp, Zea mays subsp. mays; identical to SEQ ID NO: 2273
  misc_feature (1)..(1304): Ceres Seq. ID no. 12347730
  misc_feature: MA Experiment ID: 108687 Result: Down-regulated in Transcription
  misc_feature: MA Experiment 108687 PARAMETER Experiment Name: Zm_Embryos-Flowers__P Parameter: Tissue Value: Embryo vs. Aerial+

SEQ ID NO: 11942 - protein, 254 aa, Zea mays subsp. mays; identical to SEQ ID NO: 2274
  peptide (1)..(254): Ceres Seq. ID no. 12347731
  misc_feature (198)..(248): Pfam Name: PHD-finger Pfam Description: PHD-finger
  misc_feature (3)..(254): Homolog of NCBI NO: 34907474 NR Description: nucleic acid binding protein [Oryza sativa
  misc_feature (3)..(254): Homolog of NCBI NO: 4091080 NR Description: nucleic acid binding protein [Oryza sativa]
  misc_feature (3)..(254): Homolog of NCBI NO: 11281498 NR Description: nucleic acid binding protein [imported] - rice
  misc_feature (8)..(250): Homolog of NCBI NO: 15223786 NR Description: nucleic acid binding protein (alfin-1), putative;
  misc_feature (4)..(253): Homolog of NCBI NO: 15226967 NR Description: putative PHD-type zinc finger protein; protein
  misc_feature (4)..(253): Homolog of NCBI NO: 21593407 NR Description: putative PHD-type zinc finger protein
  misc_feature (32)..(250): Homolog of NCBI NO: 25346630 NR Description: F14L17.29 protein - Arabidopsis thaliana
  misc_feature (8)..(30): Homolog of NCBI NO: 25346630 NR Description: F14L17.29 protein - Arabidopsis thaliana
  misc_feature (1)..(254): Homolog of NCBI NO: 15239624 NR Description: nucleic acid binding protein - like; protein id:
  misc_feature (1)..(253): Homolog of NCBI NO: 30687843 NR Description: zinc finger protein - like [Arabidopsis thaliana]

SEQ ID NO: 11943 - protein, 231 aa, Zea mays subsp. mays; identical to SEQ ID NO: 2275
  peptide (1)..(231): Ceres Seq. ID no. 12347732
  misc_feature (175)..(225): Pfam Name: PHD-finger Pfam Description: PHD-finger
  misc_feature (1)..(231): Homolog of NCBI NO: 11281498 NR Description: nucleic acid binding protein [imported] - rice
  misc_feature (1)..(227): Homolog of NCBI NO: 15223786 NR Description: nucleic acid binding protein (alfin-1), putative;
  misc_feature (1)..(230): Homolog of NCBI NO: 15226967 NR Description: putative PHD-type zinc finger protein; protein
  misc_feature (1)..(230): Homolog of NCBI NO: 21593407 NR Description: putative PHD-type zinc finger protein
  misc_feature (1)..(231): Homolog of NCBI NO: 34907474 NR Description: nucleic acid binding protein [Oryza sativa
  misc_feature (1)..(231): Homolog of NCBI NO: 4091080 NR Description: nucleic acid binding protein [Oryza sativa]
  misc_feature (9)..(227): Homolog of NCBI NO: 25346630 NR Description: F14L17.29 protein - Arabidopsis thaliana
  misc_feature (1)..(231): Homolog of NCBI NO: 15239624 NR Description: nucleic acid binding protein - like; protein id:
  misc_feature (1)..(230): Homolog of NCBI NO: 30687843 NR Description: zinc finger protein - like [Arabidopsis thaliana]
  misc_feature (1)..(223): Homolog of NCBI NO: 7488751 NR Description: probable zinc finger protein - alfalfa (fragment)

SEQ ID NO: 11944 - protein, 172 aa, Zea mays subsp. mays; identical to SEQ ID NO: 2276
  peptide (1)..(172): Ceres Seq. ID no. 12347733
  misc_feature (116)..(166): Pfam Name: PHD-finger Pfam Description: PHD-finger
  misc_feature (1)..(172): Homolog of NCBI NO: 34907474 NR Description: nucleic acid binding protein [Oryza sativa
  misc_feature (1)..(172): Homolog of NCBI NO: 4091080 NR Description: nucleic acid binding protein [Oryza sativa]
  misc_feature (1)..(172): Homolog of NCBI NO: 11281498 NR Description: nucleic acid binding protein [imported] - rice
  misc_feature (1)..(168): Homolog of NCBI NO: 15223786 NR Description: nucleic acid binding protein (alfin-1), putative;
  misc_feature (1)..(171): Homolog of NCBI NO: 15226967 NR Description: putative PHD-type zinc finger protein; protein
  misc_feature (1)..(171): Homolog of NCBI NO: 21593407 NR Description: putative PHD-type zinc finger protein
  misc_feature (1)..(168): Homolog of NCBI NO: 25346630 NR Description: F14L17.29 protein - Arabidopsis thaliana
  misc_feature (1)..(172): Homolog of NCBI NO: 15239624 NR Description: nucleic acid binding protein - like; protein id:
  misc_feature (1)..(171): Homolog of NCBI NO: 30687843 NR Description: zinc finger protein - like [Arabidopsis thaliana]
  misc_feature (1)..(164): Homolog of NCBI NO: 7488751 NR Description: probable zinc finger protein - alfalfa (fragment)

SEQ ID NO: 11945 - DNA, 1499 bp, Zea mays subsp. mays
  misc_feature (1)..(1499): Ceres Seq. ID no. 12350250
  misc_feature: MA Experiment ID: 108535 Result: Up-regulated in Transcription
  misc_feature: MA Experiment 108535 PARAMETER Experiment Name: Zm_Meristem_P Parameter: Age (day) Value: 8
  misc_feature: MA Experiment 108535 PARAMETER Experiment Name: Zm_Meristem_P Parameter: Organism Value: Zea mays
  misc_feature: MA Experiment 108535 PARAMETER Experiment Name: Zm_Meristem_P Parameter: Plant Line Value: 35A19
  misc_feature: MA Experiment 108535 PARAMETER Experiment Name: Zm_Meristem_P Parameter: Tissue Value: Root Meristem vs. Above Root Meristem
  misc_feature: MA Experiment ID: 20000487 Result: Up-regulated in Transcription
  misc_feature: MA Experiment 20000487 PARAMETER Experiment Name: Zm_50mM_NH4NO3_L_to_H_P Parameter: Organism Value: Zea mays
  misc_feature: MA Experiment 20000487 PARAMETER Experiment Name: Zm_50mM_NH4NO3_L_to_H_P Parameter: Timepoint (hr) Value: 4
  misc_feature: MA Experiment 20000487 PARAMETER Experiment Name: Zm_50mM_NH4NO3_L_to_H_P Parameter: Tissue Value: Leaves
  misc_feature: MA Experiment 20000487 PARAMETER Experiment Name: Zm_50mM_NH4NO3_L_to_H_P Parameter: Treatment Value: 50mM NH4NO3 vs. 100mM Mannitol
  misc_feature: MA Experiment ID: 20000488 Result: Up-regulated in Transcription
  misc_feature: MA Experiment 20000488 PARAMETER Experiment Name: Zm_50mM_NH4NO3_L_to_H_P Parameter: Organism Value: Zea mays
  misc_feature: MA Experiment 20000488 PARAMETER Experiment Name: Zm_50mM_NH4NO3_L_to_H_P Parameter: Timepoint (hr) Value: 8
  misc_feature: MA Experiment 20000488 PARAMETER Experiment Name: Zm_50mM_NH4NO3_L_to_H_P Parameter: Tissue Value: Leaves
  misc_feature: MA Experiment 20000488 PARAMETER Experiment Name: Zm_50mM_NH4NO3_L_to_H_P Parameter: Treatment Value: 50mM NH4NO3 vs. 100mM Mannitol
  misc_feature: MA Experiment ID: 20000534 Result: Down-regulated in Transcription
  misc_feature: MA Experiment 20000534 PARAMETER Experiment Name: Zm_Hybrid_Pollen_P Parameter: Age (day) Value: 8
  misc_feature: MA Experiment 20000534 PARAMETER Experiment Name: Zm_Hybrid_Pollen_P Parameter: Organism Value: Zea mays
  misc_feature: MA Experiment 20000534 PARAMETER Experiment Name: Zm_Hybrid_Pollen_P Parameter: Plant Line Value: 35A19
  misc_feature: MA Experiment 20000534 PARAMETER Experiment Name: Zm_Hybrid_Pollen_P Parameter: Tissue Value: Pollen vs. Aerial
  misc_feature: MA Experiment ID: 20001606 Result: Up-regulated in Transcription
  misc_feature: MA Experiment 20001606 PARAMETER Experiment Name: Zm_50ppm_KNO3_L-to-H_P Parameter: Age (day) Value: 19
  misc_feature: MA Experiment 20001606 PARAMETER Experiment Name: Zm_50ppm_KNO3_L-to-H_P Parameter: Organism Value: Zea mays
  misc_feature: MA Experiment 20001606 PARAMETER Experiment Name: Zm_50ppm_KNO3_L-to-H_P Parameter: Plant Line Value: 35A19
  misc_feature: MA Experiment 20001606 PARAMETER Experiment Name: Zm_50ppm_KNO3_L-to-H_P Parameter: Timepoint (hr) Value: 8
  misc_feature: MA Experiment 20001606 PARAMETER Experiment Name: Zm_50ppm_KNO3_L-to-H_P Parameter: Tissue Value: Shoots
  misc_feature: MA Experiment 20001606 PARAMETER Experiment Name: Zm_50ppm_KNO3_L-to-H_P Parameter: Treatment Value: 50ppm KNO3 vs. 50ppm KCl
atggaacaggttctctgtcctcataactccaaccaaacaacggcagctagcgagctcccgcggtcccgccgccgccccctggtcctccaaaaaacggctgaaccctaaaccctccctagctcccgccgcctcgcttaaccgcgcccatggccgccgccgctcgcgccgccctcccgcggccccacctctctcttttttcgtcctcccaccgcagcccccatctgtccctcacgccctcctccgcccctcgcctgcgcagcggcgctgccacctcccctgcgctgcagcagcaccaccaggtcaccacgcgcctgggcgacgtgatcgaggcgcagcagttcgaccgggacgcgctgaacgagatcttcgaggtggcgcgggagatggaggccgtggagaggggttcccacggcgcccccagccgcgtcctcgaggggtacctcatggccacgcttttctacgagccctccacgcgcacgcgcctctccttcgaggctgctatgcggaggctcggcggggaggtcctcaccaccgagaatgcgcgcgagttctcttccgccgccaagggggagacactcgaagataccataagaaccgttgagggttattccgatattattgtactgagacattttgaaagtggagctgcaagaaaagcagcagatactgcaaatattcctgttattaatgcaggtgatggaccagggcaacatccaacccaggctttgttggatgtgtacacaataaagagagaaattggcacactagatggaattaaacttggtttggttggtgaccttgctaatgggaggacagttcgttctctggcttacttgattgctaagtaccagaacattaagatatactttgtatctcctgatgttgttaaaatgaaggatgatatcaagaactacttaaattccaaaggtgttgaatgggaagaaagttcagatttgttggaggtggcatccaagtgtgatgttatttatcaaacacgtattcaaaaagaaagatttggtgagaggattgacctttatgaagctgctcgtggcaagtacatcatggataaaaaggtcttagatgtgctgccaaaacatgctgtcatcatgcatccccttccaaggcttgatgagatcacagtagaagttgatagtgatccaagagctgcatattttaggcaggctaagaatggcctctacataaggatggcattgctcaaacttctgcttgttggtcactgacatttcggctagtgctttagcttgtgctgcgtcaagggattagaaggtattattcttaatataatgatcgaggctgtcttactcacgcaggtcgagtttttagaaacatgtactaataatcagcagcttgtgtcaaaattcaatgttcgctgttgcaggtaataaaagtctgcatccatgcgaatgtgcagcgatgtttggcagagtttggtgttctcatgtgctgtgagaacatggaacataattaattttgcctgc

SEQ ID NO: 11946 - protein, 364 aa, Zea mays subsp. mays; identical to SEQ ID NO: 6074
  peptide (1)..(364): Ceres Seq. ID no. 12350251
  misc_feature (207)..(361): Pfam Name: Aspartate/ornithine carbamoyltransferase, Pfam Description: Aspartate/ornithine carbamoyltransferase,
  misc_feature (3)..(363): Homolog of NCBI NO: 9453916 NR Description: aspartate carbamoyl transferase [Oryza sativa
  misc_feature (55)..(363): Homolog of NCBI NO: 3914501 NR Description: Aspartate carbamoyltransferase 3, chloroplast (Aspartate transcarbamylase 3) (ATCase 3) >gi|7433584|pir||T06425
  misc_feature (55)..(363): Homolog of NCBI NO: 3914503 NR Description: Aspartate carbamoyltransferase 2, chloroplast (Aspartate transcarbamylase 2) (ATCase 2) >gi|7433605|pir||T10181
  misc_feature (45)..(363): Homolog of NCBI NO: 21535795 NR Description: aspartate carbamoyltransferase [Solanum tuberosum]
  misc_feature (56)..(363): Homolog of NCBI NO: 15231112 NR Description: aspartate carbamoyltransferase precursor transcarbamylase); protein id: At3g20330.1, supported by cDNA: supported by cDNA: gi_19699265 [Arabidopsis thaliana] chloroplast
  misc_feature (55)..(363): Homolog of NCBI NO: 3914502 NR Description: Aspartate carbamoyltransferase 1, chloroplast (Aspartate transcarbamylase 1) (ATCase 1) >gi|7433585|pir||T06484
  misc_feature (56)..(363): Homolog of NCBI NO: 1076293 NR Description: aspartate carbamoyltransferase (EC 2.1.3.2) - thaliana >gi|443820|emb|CAA50687.1| aspartate
  misc_feature (56)..(363): Homolog of NCBI NO: 15215706 NR Description: AT3g20330/MQC12_8 [Arabidopsis thaliana]
  misc_feature (97)..(363): Homolog of NCBI NO: 479713 NR Description: aspartate carbamoyltransferase (EC 2.1.3.2) -
  misc_feature (97)..(363): Homolog of NCBI NO: 397385 NR Description: aspartate carbamoyltransferase [Lycopersicon

SEQ ID NO: 11947 - protein, 285 aa, Zea mays subsp. mays; identical to SEQ ID NO: 6075
  peptide (1)..(285): Ceres Seq. ID no. 12350252
  misc_feature (128)..(282): Pfam Name: Aspartate/ornithine carbamoyltransferase, Pfam Description: Aspartate/ornithine carbamoyltransferase,
  misc_feature (1)..(284): Homolog of NCBI NO: 9453916 NR Description: aspartate carbamoyl transferase [Oryza sativa
  misc_feature (1)..(284): Homolog of NCBI NO: 3914501 NR Description: Aspartate carbamoyltransferase 3, chloroplast (Aspartate transcarbamylase 3) (ATCase 3) >gi|7433584|pir||T06425
  misc_feature (1)..(284): Homolog of NCBI NO: 3914503 NR Description: Aspartate carbamoyltransferase 2, chloroplast (Aspartate transcarbamylase 2) (ATCase 2) >gi|7433605|pir||T10181
  misc_feature (1)..(284): Homolog of NCBI NO: 21535795 NR Description: aspartate carbamoyltransferase [Solanum tuberosum]
  misc_feature (1)..(284): Homolog of NCBI NO: 15231112 NR Description: aspartate carbamoyltransferase precursor transcarbamylase); protein id: At3g20330.1, supported by cDNA: supported by cDNA: gi_19699265 [Arabidopsis thaliana] chloroplast
  misc_feature (1)..(284): Homolog of NCBI NO: 3914502 NR Description: Aspartate carbamoyltransferase 1, chloroplast (Aspartate transcarbamylase 1) (ATCase 1) >gi|7433585|pir||T06484
  misc_feature (1)..(284): Homolog of NCBI NO: 1076293 NR Description: aspartate carbamoyltransferase (EC 2.1.3.2) - thaliana >gi|443820|emb|CAA50687.1| aspartate
  misc_feature (1)..(284): Homolog of NCBI NO: 15215706 NR Description: AT3g20330/MQC12_8 [Arabidopsis thaliana]
  misc_feature (18)..(284): Homolog of NCBI NO: 479713 NR Description: aspartate carbamoyltransferase (EC 2.1.3.2) -
  misc_feature (18)..(284): Homolog of NCBI NO: 397385 NR Description: aspartate carbamoyltransferase [Lycopersicon

SEQ ID NO: 11948 - protein, 265 aa, Zea mays subsp. mays; identical to SEQ ID NO: 6076
  peptide (1)..(265): Ceres Seq. ID no. 12350253
  misc_feature (108)..(262): Pfam Name: Aspartate/ornithine carbamoyltransferase, Pfam Description: Aspartate/ornithine carbamoyltransferase,
  misc_feature (1)..(264): Homolog of NCBI NO: 9453916 NR Description: aspartate carbamoyl transferase [Oryza sativa
  misc_feature (1)..(264): Homolog of NCBI NO: 3914501 NR Description: Aspartate carbamoyltransferase 3, chloroplast (Aspartate transcarbamylase 3) (ATCase 3) >gi|7433584|pir||T06425
  misc_feature (1)..(264): Homolog of NCBI NO: 3914503 NR Description: Aspartate carbamoyltransferase 2, chloroplast (Aspartate transcarbamylase 2) (ATCase 2) >gi|7433605|pir||T10181
  misc_feature (1)..(264): Homolog of NCBI NO: 21535795 NR Description: aspartate carbamoyltransferase [Solanum tuberosum]
  misc_feature (1)..(264): Homolog of NCBI NO: 15231112 NR Description: aspartate carbamoyltransferase precursor transcarbamylase); protein id: At3g20330.1, supported by cDNA: supported by cDNA: gi_19699265 [Arabidopsis thaliana] chloroplast
  misc_feature (1)..(264): Homolog of NCBI NO: 3914502 NR Description: Aspartate carbamoyltransferase 1, chloroplast (Aspartate transcarbamylase 1) (ATCase 1) >gi|7433585|pir||T06484
  misc_feature (1)..(264): Homolog of NCBI NO: 1076293 NR Description: aspartate carbamoyltransferase (EC 2.1.3.2) - thaliana >gi|443820|emb|CAA50687.1| aspartate
  misc_feature (1)..(264): Homolog of NCBI NO: 15215706 NR Description: AT3g20330/MQC12_8 [Arabidopsis thaliana]
  misc_feature (1)..(264): Homolog of NCBI NO: 479713 NR Description: aspartate carbamoyltransferase (EC 2.1.3.2) -
  misc_feature (1)..(264): Homolog of NCBI NO: 397385 NR Description: aspartate carbamoyltransferase [Lycopersicon

SEQ ID NO: 11949 - DNA, 836 bp, Zea mays subsp. mays
  misc_feature (1)..(836): Ceres Seq. ID no. 13498286
  misc_feature: MA Experiment ID: 108527 Result: Down-regulated in Transcription
  misc_feature: MA Experiment 108527 PARAMETER Experiment Name: Zm_5mM_NO_P Parameter: Age (day) Value: 8
  misc_feature: MA Experiment 108527 PARAMETER Experiment Name: Zm_5mM_NO_P Parameter: Organism Value: Zea mays
  misc_feature: MA Experiment 108527 PARAMETER Experiment Name: Zm_5mM_NO_P Parameter: Plant Line Value: 35A19
  misc_feature: MA Experiment 108527 PARAMETER Experiment Name: Zm_5mM_NO_P Parameter: Timepoint (hr) Value: 6
  misc_feature: MA Experiment 108527 PARAMETER Experiment Name: Zm_5mM_NO_P Parameter: Tissue Value: Aerial
  misc_feature: MA Experiment 108527 PARAMETER Experiment Name: Zm_5mM_NO_P Parameter: Treatment Value: 5mM NO vs. No Treatment
  misc_feature: MA Experiment ID: 108528 Result: Up-regulated in Transcription
  misc_feature: MA Experiment 108528 PARAMETER Experiment Name: Zm_Imbibed_Seeds_P Parameter: Age (day) Value: 5 vs. 2
  misc_feature: MA Experiment 108528 PARAMETER Experiment Name: Zm_Imbibed_Seeds_P Parameter: Organism Value: Zea mays
  misc_feature: MA Experiment 108528 PARAMETER Experiment Name: Zm_Imbibed_Seeds_P Parameter: Plant Line Value: 35A19
  misc_feature: MA Experiment 108528 PARAMETER Experiment Name: Zm_Imbibed_Seeds_P Parameter: Tissue Value: Aerial vs. Embryo
  misc_feature: MA Experiment ID: 108530 Result: Up-regulated in Transcription
  misc_feature: MA Experiment 108530 PARAMETER Experiment Name: Zm_Imbibed_Seeds_P Parameter: Age (day) Value: 6 vs. 2
  misc_feature: MA Experiment 108530 PARAMETER Experiment Name: Zm_Imbibed_Seeds_P Parameter: Organism Value: Zea mays
  misc_feature: MA Experiment 108530 PARAMETER Experiment Name: Zm_Imbibed_Seeds_P Parameter: Plant Line Value: 35A19
  misc_feature: MA Experiment 108530 PARAMETER Experiment Name: Zm_Imbibed_Seeds_P Parameter: Tissue Value: Aerial vs. Embryo
  misc_feature: MA Experiment ID: 108536 Result: Down-regulated in Transcription
  misc_feature: MA Experiment 108536 PARAMETER Experiment Name: Zm_Meristem_P Parameter: Age (day) Value: 8
  misc_feature: MA Experiment 108536 PARAMETER Experiment Name: Zm_Meristem_P Parameter: Organism Value: Zea mays
  misc_feature: MA Experiment 108536 PARAMETER Experiment Name: Zm_Meristem_P Parameter: Plant Line Value: 35A19
  misc_feature: MA Experiment 108536 PARAMETER Experiment Name: Zm_Meristem_P Parameter: Tissue Value: Shoot Meristem vs. Above Shoot Meristem
  misc_feature: MA Experiment ID: 108544 Result: Up-regulated in Transcription
  misc_feature: MA Experiment ID: 108547 Result: Up-regulated in Transcription
  misc_feature: MA Experiment 108547 PARAMETER Experiment Name: Zm_Imbibed_Seeds_P Parameter: Age (day) Value: 4 vs. 2
  misc_feature: MA Experiment 108547 PARAMETER Experiment Name: Zm_Imbibed_Seeds_P Parameter: Organism Value: Zea mays
  misc_feature: MA Experiment 108547 PARAMETER Experiment Name: Zm_Imbibed_Seeds_P Parameter: Plant Line Value: 35A19
  misc_feature: MA Experiment 108547 PARAMETER Experiment Name: Zm_Imbibed_Seeds_P Parameter: Tissue Value: Aerial vs. Embryo
  misc_feature: MA Experiment ID: 108559 Result: Down-regulated in Transcription
  misc_feature: MA Experiment 108559 PARAMETER Experiment Name: Zm_5mM_NO_P Parameter: Age (day) Value: 8
  misc_feature: MA Experiment 108559 PARAMETER Experiment Name: Zm_5mM_NO_P Parameter: Organism Value: Zea mays
  misc_feature: MA Experiment 108559 PARAMETER Experiment Name: Zm_5mM_NO_P Parameter: Plant Line Value: 35A19
  misc_feature: MA Experiment 108559 PARAMETER Experiment Name: Zm_5mM_NO_P Parameter: Timepoint (hr) Value: 12
  misc_feature: MA Experiment 108559 PARAMETER Experiment Name: Zm_5mM_NO_P Parameter: Tissue Value: Aerial
  misc_feature: MA Experiment 108559 PARAMETER Experiment Name: Zm_5mM_NO_P Parameter: Treatment Value: 5mM NO vs. No Treatment
  misc_feature: MA Experiment ID: 20000535 Result: Down-regulated in Transcription
  misc_feature: MA Experiment 20000535 PARAMETER Experiment Name: Zm_Hybrid_Seed_Dev_P Parameter: DAP Value: 30 vs. 12
  misc_feature: MA Experiment 20000535 PARAMETER Experiment Name: Zm_Hybrid_Seed_Dev_P Parameter: Organism Value: Zea mays
  misc_feature: MA Experiment 20000535 PARAMETER Experiment Name: Zm_Hybrid_Seed_Dev_P Parameter: Plant Line Value: 35A19
  misc_feature: MA Experiment 20000535 PARAMETER Experiment Name: Zm_Hybrid_Seed_Dev_P Parameter: Tissue Value: Embryo vs. Unfert Floret
agaaaaagaaaaagaaaagccaaaggcaaaggcaaaggaatcccaatcaggcaagcaaaaggaagaaccagctgctgcggccggagatgtcgtcgcagctgatcgaggagcaccggtcgggcgcggaggtgcacgtcgggcacgagctgtgcgagcgcaagtcgcgcgagttcatggtggagctgggcctccccgacgggctcctcccgctgcccagcctggacgaggtgggctacaaccggtcgacggggttcgtgtggctgcggcaggccgccggcctgacccacaccttcggctccatcggcaagcaggtgtggtacgacagggaggtgacggcgttcgtggagcccgggcggatgcacggcctcgccggggtgaagagcaaggagctcctcatctgggtcaccatctccgagatcgtcctcagcccctccggcaccaagatcgtgttccgcacccccgcggggctcggccgcgccttccctgtcaccgccttccagctcgagcccgcggcggcggagggggaccacaaggaggaggccgaggacgccgccgccgcggccgccaactgatctgctctagcttccggcggcggcggccgtgcgtgggctgctcgatccggtagtggcagtggctttgtgagacagtcgagtcgattgtggtttcccctcctccgccatgtgcgtgtagtggatgatgatgcaggaataaacggtgtccctggatccagaactcacggttcgatccatccagtttatctcatgcttgtgtatctctatgtatgcattgcctgtttgttcgctggaatctactacttgcagcggcctcgtctcttc

SEQ ID NO: 11950 - protein, 207 aa, Zea mays subsp. mays
  peptide (1)..(207): Ceres Seq. ID no. 13498287
EKEKEKPKAKAKESQSGKQKEEPAAAAGDVVAADRGAPVGRGGARRARAVRAQVARVHGGAGPPRRAPPAAQPGRGGLQPVDGVRVAAAGRRPDPHLRLHRQAGVVRQGGDGVRGARADARPRRGEEQGAPHLGHHLRDRPQPLRHQDRVPHPRGARPRLPCHRLPARARGGGGGPQGGGRGRRRRGRQLICSSFRRRRPCVGCSIR

SEQ ID NO: 11951 - protein, 189 aa, Zea mays subsp. mays
  peptide (1)..(189): Ceres Seq. ID no. 13498288
  misc_feature (74)..(177): Pfam Name: Protein of unknown function, DUF538 Pfam Description: Protein of unknown function, DUF538
  misc_feature (74)..(189): Homolog of NCBI NO: 18644694 NR Description: susceptibility homeodomain transciption factor
  misc_feature (29)..(189): Homolog of NCBI NO: 34903866 NR Description: unnamed protein product [Oryza sativa (japonica group)] >gi|8096574|dbj|BAA96147.1| unnamed protein product
  misc_feature (35)..(187): Homolog of NCBI NO: 18391006 NR Description: expressed protein [Arabidopsis thaliana]
  misc_feature (35)..(185): Homolog of NCBI NO: 18405887 NR Description: expressed protein [Arabidopsis thaliana]
  misc_feature (29)..(167): Homolog of NCBI NO: 34915410 NR Description: hypothetical protein~similar to Arabidopsis
  misc_feature (29)..(166): Homolog of NCBI NO: 18422648 NR Description: expressed protein [Arabidopsis thaliana] gene_id:MPL12.1~unknown protein [Arabidopsis thaliana]
  misc_feature (29)..(167): Homolog of NCBI NO: 34915376 NR Description: hypothetical protein~similar to Oryza sativa
  misc_feature (29)..(167): Homolog of NCBI NO: 34915422 NR Description: hypothetical protein~similar to Arabidopsis
  misc_feature (29)..(167): Homolog of NCBI NO: 33146557 NR Description: unknown protein [Oryza sativa (japonica
  misc_feature (29)..(167): Homolog of NCBI NO: 34915418 NR Description: hypothetical protein~similar to Arabidopsis
KKKKKSQRQRQRNPNQASKRKNQLLRPEMSSQLIEEHRSGAEVHVGHELCERKSREFMVELGLPDGLLPLPSLDEVGYNRSTGFVWLRQAAGLTHTFGSIGKQVWYDREVTAFVEPGRMHGLAGVKSKELLIWVTISEIVLSPSGTKIVFRTPAGLGRAFPVTAFQLEPAAAEGDHKEEAEDAAAAAAN

SEQ ID NO: 11952 - protein, 161 aa, Zea mays subsp. mays
  peptide (1)..(161): Ceres Seq. ID no. 13498289
  misc_feature (46)..(149): Pfam Name: Protein of unknown function, DUF538 Pfam Description: Protein of unknown function, DUF538
  misc_feature (46)..(161): Homolog of NCBI NO: 18644694 NR Description: susceptibility homeodomain transciption factor
  misc_feature (1)..(161): Homolog of NCBI NO: 34903866 NR Description: unnamed protein product [Oryza sativa (japonica group)] >gi|8096574|dbj|BAA96147.1| unnamed protein product
  misc_feature (7)..(159): Homolog of NCBI NO: 18391006 NR Description: expressed protein [Arabidopsis thaliana]
  misc_feature (7)..(157): Homolog of NCBI NO: 18405887 NR Description: expressed protein [Arabidopsis thaliana]
  misc_feature (1)..(139): Homolog of NCBI NO: 34915410 NR Description: hypothetical protein~similar to Arabidopsis
  misc_feature (1)..(138): Homolog of NCBI NO: 18422648 NR Description: expressed protein [Arabidopsis thaliana] gene_id:MPL12.1~unknown protein [Arabidopsis thaliana]
  misc_feature (1)..(139): Homolog of NCBI NO: 34915376 NR Description: hypothetical protein~similar to Oryza sativa
  misc_feature (1)..(139): Homolog of NCBI NO: 34915422 NR Description: hypothetical protein~similar to Arabidopsis
  misc_feature (1)..(139): Homolog of NCBI NO: 33146557 NR Description: unknown protein [Oryza sativa (japonica
  misc_feature (1)..(139): Homolog of NCBI NO: 34915418 NR Description: hypothetical protein~similar to Arabidopsis
MSSQLIEEHRSGAEVHVGHELCERKSREFMVELGLPDGLLPLPSLDEVGYNRSTGFVWLRQAAGLTHTFGSIGKQVWYDREVTAFVEPGRMHGLAGVKSKELLIWVTISEIVLSPSGTKIVFRTPAGLGRAFPVTAFQLEPAAAEGDHKEEAEDAAAAAAN

SEQ ID NO: 11953 - DNA, 1233 bp, Zea mays subsp. mays
  misc_feature (1)..(1233): Ceres Seq. ID no. 13498172
  misc_feature: MA Experiment ID: 20000492 Result: Up-regulated in Transcription
  misc_feature: MA Experiment 20000492 PARAMETER Experiment Name: Zm_Hybrid_Seed_Dev_P Parameter: DAP Value: 12
  misc_feature: MA Experiment 20000492 PARAMETER Experiment Name: Zm_Hybrid_Seed_Dev_P Parameter: Organism Value: Zea mays
  misc_feature: MA Experiment 20000492 PARAMETER Experiment Name: Zm_Hybrid_Seed_Dev_P Parameter: Plant Line Value: 35A19
  misc_feature: MA Experiment 20000492 PARAMETER Experiment Name: Zm_Hybrid_Seed_Dev_P Parameter: Tissue Value: Fert Kernel vs. Unfert Floret
gattcgattcaaaatccacgtatccaaatcgcaaggccacacccacacctccctcctcccctccacccagagcgagcccgcccgcccgcatcggatcacatcgcgccggagcctgacgccgtgccgtcaacgaatccatgggacccacgccgccgcacacggacgacactagggttgcgcagctcccgctccccggcggcgccgaagattacgtgcgcgactccatccacgcctccctgggcctccccgtctccgatcgctccctccgcctcaagctcctcgcctccgaggagcagcgccaccgcctccaggaccacgtcttctcgctcgaggaagacctccgcgcagcccagcgccgcatcgacctcctcaaggccgaggccgccatgaacgccgccggcctccgccgctgcgtcgaggaaaaggaggccgtggccgccgcatacgccgacctctccgacaagagcagcaaggagtgtcggctctacgagcgggacctcgagcgcgccatggagtcctgtgacgacctcgccagggagaacgacgacctccgcgcacgcctaaaccagaacacagatttggcagcattgatggtgcaagtgcaagaactacataaggaaaaggagattctgaagatgaatcttgatacggcggaggcagaggtcgtgacactgagtgaggacaacagggctcttgatgaagagatcaaaaggctgctgagtttgttggagaaggagcgacagcgccggtctgaaagaaagaaatctgccagtacatccaccaagaacaagcgcaagtcgtctagcttgagggatggcaacacagctggcagggctcttgatttcggctgtgcagattcttcaaggcatccattgtccccattgccccacaactccccagactacagggcgcacaagaagtgaaggcaagaaccaacaaaccaaccattcagagcatttccagattaccttgtgcgcaacgcgagtgttgcatcatgccgctaatgatctgattcaaatatggtccctgctaattttctttctttcctgtttcggttgctgcgatgtttttagaccaggagcaaatttatcagcaaatgtatgcttgcttcgcttgcattctattacattggtagaggttgctgttgtttttgtgatggttcttaaagaaatgagaaggcacatggtttgtttatggcttgatgtatcatgtatgatatgaaagcagcttctc

SEQ ID NO: 11954 - protein, 261 aa, Zea mays subsp. mays
  peptide (1)..(261): Ceres Seq. ID no. 13498173
  misc_feature (23)..(195): Homolog of NCBI NO: 15233676 NR Description: expressed protein [Arabidopsis thaliana]
  misc_feature (23)..(219): Homolog of NCBI NO: 15223854 NR Description: hypothetical protein [Arabidopsis thaliana]
  misc_feature (50)..(255): Homolog of NCBI NO: 15233676 NR Description: expressed protein [Arabidopsis thaliana]
MGPTPPHTDDTRVAQLPLPGGAEDYVRDSIHASLGLPVSDRSLRLKLLASEEQRHRLQDHVFSLEEDLRAAQRRIDLLKAEAAMNAAGLRRCVEEKEAVAAAYADLSDKSSKECRLYERDLERAMESCDDLARENDDLRARLNQNTDLAALMVQVQELHKEKEILKMNLDTAEAEVVTLSEDNRALDEEIKRLLSLLEKERQRRSERKKSASTSTKNKRKSSSLRDGNTAGRALDFGCADSSRHPLSPLPHNSPDYRAHKK

SEQ ID NO: 11955 - protein, 178 aa, Zea mays subsp. mays
  peptide (1)..(178): Ceres Seq. ID no. 13498174
  misc_feature (1)..(112): Homolog of NCBI NO: 15233676 NR Description: expressed protein [Arabidopsis thaliana]
  misc_feature (1)..(136): Homolog of NCBI NO: 15223854 NR Description: hypothetical protein [Arabidopsis thaliana]
  misc_feature (1)..(172): Homolog of NCBI NO: 15233676 NR Description: expressed protein [Arabidopsis thaliana]
MNAAGLRRCVEEKEAVAAAYADLSDKSSKECRLYERDLERAMESCDDLARENDDLRARLNQNTDLAALMVQVQELHKEKEILKMNLDTAEAEVVTLSEDNRALDEEIKRLLSLLEKERQRRSERKKSASTSTKNKRKSSSLRDGNTAGRALDFGCADSSRHPLSPLPHNSPDYRAHKK

SEQ ID NO: 11956 - protein, 137 aa, Zea mays subsp. mays
  peptide (1)..(137): Ceres Seq. ID no. 13498175
  misc_feature (1)..(71): Homolog of NCBI NO: 15233676 NR Description: expressed protein [Arabidopsis thaliana]
  misc_feature (1)..(95): Homolog of NCBI NO: 15223854 NR Description: hypothetical protein [Arabidopsis thaliana]
  misc_feature (1)..(131): Homolog of NCBI NO: 15233676 NR Description: expressed protein [Arabidopsis thaliana]
MESCDDLARENDDLRARLNQNTDLAALMVQVQELHKEKEILKMNLDTAEAEVVTLSEDNRALDEEIKRLLSLLEKERQRRSERKKSASTSTKNKRKSSSLRDGNTAGRALDFGCADSSRHPLSPLPHNSPDYRAHKK

SEQ ID NO: 11957 - DNA, 1246 bp, Zea mays subsp. mays
  misc_feature (1)..(1246): Ceres Seq. ID no. 12365011
  misc_feature: MA Experiment ID: 108527 Result: Down-regulated in Transcription
  misc_feature: MA Experiment 108527 PARAMETER Experiment Name: Zm_5mM_NO_P Parameter: Age (day) Value: 8
  misc_feature: MA Experiment 108527 PARAMETER Experiment Name: Zm_5mM_NO_P Parameter: Organism Value: Zea mays
  misc_feature: MA Experiment 108527 PARAMETER Experiment Name: Zm_5mM_NO_P Parameter: Plant Line Value: 35A19
  misc_feature: MA Experiment 108527 PARAMETER Experiment Name: Zm_5mM_NO_P Parameter: Timepoint (hr) Value: 6
  misc_feature: MA Experiment 108527 PARAMETER Experiment Name: Zm_5mM_NO_P Parameter: Tissue Value: Aerial
  misc_feature: MA Experiment 108527 PARAMETER Experiment Name: Zm_5mM_NO_P Parameter: Treatment Value: 5mM NO vs. No Treatment
aacaagccgactccgacggcgccgtccacgacgacgggcggcggactgcgcgccatggatctgtacgagaagctggagaaggtgggggagggcacgtacgggaaggtgtacaaggcccgggagaaggcgacgggccggatcgtggcgctcaagaagacgcggctccccgaggacgacgagggcgtgccgcccaccgcgctgcgggaggtctcgctgctgcggatgctgtcgcaggacccgcacgtggtccgcctgctcgacctcaagcagggcgtcaacaaggaggggcagaccatcctgtacctcgtcttcgagtacatggacaccgacctgaagaagttcatccggggctatcgcgccaaccacgagaagatccccgcacaaaccgtcaagatcctgatgtaccagcttgcaagggcgtgggttttgttcacggccgcggggtgctccaccgtgatctgaaaccgcacaacctgctcatggaccgcaagaccatggcgctcaagatcgctgacctcggactcagccgtgccatcaccgtccctgtaaagaagtacacgcacgagattctgacgctgtggtacagggcgcccgaggttcttcttggcgccacacactactccacgccggttgacatttggtccgtggggtgcatatttactgagttggttactaatcagccacttttccctggcgactccgagttgcagcagctcctccacatcttcaagttgctgggcaccccaaatgaggagatgtggccaggagtaggcaagctgccgaactggcacgtgtacccccagtggaagcccactaagctgtccactcttgtccctggtcttgactccgatggctatgatttacttgagaaaatgcttgcatatgagccagggaagcgggtctcggcgaagaaggccctggagcacccgtacttcaatgatgttaacaaggaggtgtactgaagcgacccgagtagtagggttcatcgagagaggatcattgtcaccttattcttcgcttagtgtgttaatatggctaccctgaagcagtacttgaagtatctctgtgttcaagctgctacttttctatttgttgtgccattcactttggttgtgatggataaggcagggagagttttcagcatgagtgagcttatgttgacactgtttcttgcaaattgtagccggaaagcttgcgatcatcttccatttgatttataaagcttcactatatggctctgaagctc

SEQ ID NO: 11958 - protein, 319 aa, Zea mays subsp. mays
  peptide (1)..(319): Ceres Seq. ID no. 12365012
  misc_feature (137)..(311): Pfam Name: Protein kinase domain Pfam Description: Protein kinase domain
  misc_feature (137)..(319): Homolog of NCBI NO: 7489567 NR Description: protein kinase cdc2 homolog - rice
  misc_feature (137)..(316): Homolog of NCBI NO: 11125685 NR Description: B2-type cyclin dependent kinase [Lycopersicon
  misc_feature (137)..(316): Homolog of NCBI NO: 7434327 NR Description: probable cdc2-like protein kinase cdc2MsF -
  misc_feature (137)..(314): Homolog of NCBI NO: 14488071 NR Description: At1g76540/F14G6_14 [Arabidopsis thaliana]
  misc_feature (137)..(314): Homolog of NCBI NO: 15223081 NR Description: Cyclin-dependent kinase B2;1; protein id: supported by cDNA: 1241., supported by cDNA: gi_14488070, by cDNA: gi_14717829 [Arabidopsis thaliana]
  misc_feature (137)..(314): Homolog of NCBI NO: 15218072 NR Description: Cyclin-dependent kinase B2;2; protein id: supported by cDNA: 108339. [Arabidopsis thaliana]
  misc_feature (137)..(314): Homolog of NCBI NO: 21536682 NR Description: putative cell division control protein cdc2
  misc_feature (137)..(314): Homolog of NCBI NO: 21537217 NR Description: putative cell division control protein cdc2
  misc_feature (137)..(316): Homolog of NCBI NO: 5921447 NR Description: CELL DIVISION CONTROL PROTEIN 2 HOMOLOG D
  misc_feature (138)..(319): Homolog of NCBI NO: 2190494 NR Description: cyclin dependent kinase [Petunia x hybrida]
QADSDGAVHDDGRRTARHGSVREAGEGGGGHVREGVQGPGEGDGPDRGAQEDAAPRGRRGRAAHRAAGGLAAADAVAGPARGPPARPQAGRQQGGADHPVPRLRVHGHRPEEVHPGLSRQPREDPRTNRQDPDVPACKGVGFVHGRGVLHRDLKPHNLLMDRKTMALKIADLGLSRAITVPVKKYTHEILTLWYRAPEVLLGATHYSTPVDIWSVGCIFTELVTNQPLFPGDSELQQLLHIFKLLGTPNEEMWPGVGKLPNWHVYPQWKPTKLSTLVPGLDSDGYDLLEKMLAYEPGKRVSAKKALEHPYFNDVNKEVY

SEQ ID NO: 11959 - protein, 160 aa, Zea mays subsp. mays
  peptide (1)..(160): Ceres Seq. ID no. 12365013
  misc_feature (1)..(152): Pfam Name: Protein kinase domain Pfam Description: Protein kinase domain
  misc_feature (1)..(160): Homolog of NCBI NO: 7489567 NR Description: protein kinase cdc2 homolog - rice
  misc_feature (1)..(157): Homolog of NCBI NO: 11125685 NR Description: B2-type cyclin dependent kinase [Lycopersicon
  misc_feature (1)..(157): Homolog of NCBI NO: 7434327 NR Description: probable cdc2-like protein kinase cdc2MsF -
  misc_feature (1)..(155): Homolog of NCBI NO: 14488071 NR Description: At1g76540/F14G6_14 [Arabidopsis thaliana]
  misc_feature (1)..(155): Homolog of NCBI NO: 15218072 NR Description: Cyclin-dependent kinase B2;2; protein id: supported by cDNA: 108339. [Arabidopsis thaliana]
  misc_feature (1)..(155): Homolog of NCBI NO: 15223081 NR Description: Cyclin-dependent kinase B2;1; protein id: supported by cDNA: 1241., supported by cDNA: gi_14488070, by cDNA: gi_14717829 [Arabidopsis thaliana]
  misc_feature (1)..(155): Homolog of NCBI NO: 21536682 NR Description: putative cell division control protein cdc2
  misc_feature (1)..(155): Homolog of NCBI NO: 21537217 NR Description: putative cell division control protein cdc2
  misc_feature (1)..(157): Homolog of NCBI NO: 5921447 NR Description: CELL DIVISION CONTROL PROTEIN 2 HOMOLOG D
  misc_feature (1)..(160): Homolog of NCBI NO: 2190494 NR Description: cyclin dependent kinase [Petunia x hybrida]
MDRKTMALKIADLGLSRAITVPVKKYTHEILTLWYRAPEVLLGATHYSTPVDIWSVGCIFTELVTNQPLFPGDSELQQLLHIFKLLGTPNEEMWPGVGKLPNWHVYPQWKPTKLSTLVPGLDSDGYDLLEKMLAYEPGKRVSAKKALEHPYFNDVNKEVY

SEQ ID NO: 11960 - DNA, 1361 bp, Zea mays subsp. mays
  misc_feature (1)..(1361): Ceres Seq. ID no. 12355661
  misc_feature: MA Experiment ID: 108522 Result: Down-regulated in Transcription
  misc_feature: MA Experiment 108522 PARAMETER Experiment Name: Zm_42deg_Heat_P Parameter: Age (day) Value: 8
  misc_feature: MA Experiment 108522 PARAMETER Experiment Name: Zm_42deg_Heat_P Parameter: Organism Value: Zea mays
  misc_feature: MA Experiment 108522 PARAMETER Experiment Name: Zm_42deg_Heat_P Parameter: Plant Line Value: 35A19
  misc_feature: MA Experiment 108522 PARAMETER Experiment Name: Zm_42deg_Heat_P Parameter: Temperature (deg C) Value: 42 vs. 22
  misc_feature: MA Experiment 108522 PARAMETER Experiment Name: Zm_42deg_Heat_P Parameter: Timepoint (hr) Value: 1
  misc_feature: MA Experiment 108522 PARAMETER Experiment Name: Zm_42deg_Heat_P Parameter: Tissue Value: Aerial
  misc_feature: MA Experiment ID: 20000479 Result: Up-regulated in Transcription
  misc_feature: MA Experiment 20000479 PARAMETER Experiment Name: Zm_Drought_P Parameter: Age (day) Value: 10
  misc_feature: MA Experiment 20000479 PARAMETER Experiment Name: Zm_Drought_P Parameter: Organism Value: Zea mays
  misc_feature: MA Experiment 20000479 PARAMETER Experiment Name: Zm_Drought_P Parameter: Plant Line Value: 35A19
  misc_feature: MA Experiment 20000479 PARAMETER Experiment Name: Zm_Drought_P Parameter: Timepoint (hr) Value: 48
  misc_feature: MA Experiment 20000479 PARAMETER Experiment Name: Zm_Drought_P Parameter: Tissue Value: Aerial
  misc_feature: MA Experiment 20000479 PARAMETER Experiment Name: Zm_Drought_P Parameter: Treatment Value: Drought vs. No Drought
aaaaaaatacgggcccgtgtctcagcgcacacctcttcgtgctcgctcccatggaggccaccccgatctccatgaagccaccggcgccacccccggtcactctggagcccatagaattgtcaacgcatgccgtcggactgaccgagctggagcgatccagcatgaaccagctcgcaatagcgccggaccccaagcggcagagggtggaggaggctgcggatggcaacgggtgcaagcattgcgcctgcaagaagtccagatgcttgaagctctattgcccatgttttgctggaggtggttattgttccgataagtgtggctgccaaccatgtttcaacaaagaagccttttcagaaacagttcagactactcgcaaggtgttactttcaagacagaagcgcatgtcgatgaaaattaataggagacctgaggcaaatgctgaaccaatggaagatgctcaccattcttcttcttcaactccaccaaggagaggttgcaactgcaagaaatcaagttgcctgaagaaatactgcgattgctaccaggatgggaccggatgttccttgttttgccgttgcgacgattgccagaaccctttcgggaaaaatgacggcataattgctgatgacagtaagcgctatctgtacactggtgctgatttggatcacagcgagggcgaacatgacttcgttgtggagcgctcgcctcgtctgcagtcacccatgtcgaaggagtcttctttccaccagaccccaccccatctcagggcctcgagcagagacgcgcacgtgttcccgcaggcggtatcccagtggcaggcgctgccccgctcgtggcactgttccaacaagaggaacggcaacgacagggcgatggacgactcctccgccaacggcaactacaagagctcgagccatgactggcagatgtccaagctcgaggacggctacagcatatcgagatgcgtccagatcctgaacggcatggtggagctgtcgcaggtggagaagtcagttgcccccgacgtcttcctgctgccgggcaaccgggaaattttcgtctccctcggcggcgatgtgcgcgccatgtggctgaagcgcaagattcagcacctggcttaggggagggtgtgtttcattgcgccatgtgccgtcctctcgagtgaggagattggaggggaaattgagttttcttttagatcctgcatgttctgctgctggtcgtgggcgtgcacaggattctaggctcttttttcctgtttactgaggtgtatttatggattgacattacgtattgtctttgtagagatagcggtttcgagcctggtatcggatataataaaaaaatgagattatacaccc

SEQ ID NO: 11961 - protein, 372 aa, Zea mays subsp. mays
  peptide (1)..(372): Ceres Seq. ID no. 12355662
  misc_feature (162)..(201): Pfam Name: Tesmin/TSO1-like CXC domain Pfam Description: Tesmin/TSO1-like CXC domain
  misc_feature (35)..(211): Homolog of NCBI NO: 15028139 NR Description: putative DNA binding protein [Arabidopsis
  misc_feature (35)..(211): Homolog of NCBI NO: 23297130 NR Description: putative DNA binding protein [Arabidopsis
  misc_feature (52)..(267): Homolog of NCBI NO: 7767427 NR Description: CXC domain containing TSO1-like protein 1
  misc_feature (52)..(267): Homolog of NCBI NO: 18403510 NR Description: expressed protein; protein id: At3g22760.1, by cDNA: gi_20466373, supported by cDNA: gi_7767426 [Arabidopsis >gi|20466374|gb|AAM20504.1| unknown protein [Arabidopsis
  misc_feature (60)..(228): Homolog of NCBI NO: 34393829 NR Description: putative CXC domain protein TSO1 [Oryza sativa
  misc_feature (35)..(211): Homolog of NCBI NO: 6739821 NR Description: putative DNA binding protein [Arabidopsis >gi|7767425|gb|AAF69124.1|AF204059_1 CXC domain protein TSO1
  misc_feature (35)..(211): Homolog of NCBI NO: 30686784 NR Description: DNA binding protein -related [Arabidopsis
  misc_feature (61)..(265): Homolog of NCBI NO: 40241245 NR Description: cysteine-rich polycomb-like protein [Lotus
KNTGPCLSAHLFVLAPMEATPISMKPPAPPPVTLEPIELSTHAVGLTELERSSMNQLAIAPDPKRQRVEEAADGNGCKHCACKKSRCLKLYCPCFAGGGYCSDKCGCQPCFNKEAFSETVQTTRKVLLSRQKRMSMKINRRPEANAEPMEDAHHSSSSTPPRRGCNCKKSSCLKKYCDCYQDGTGCSLFCRCDDCQNPFGKNDGIIADDSKRYLYTGADLDHSEGEHDFVVERSPRLQSPMSKESSFHQTPPHLRASSRDAHVFPQAVSQWQALPRSWHCSNKRNGNDRAMDDSSANGNYKSSSHDWQMSKLEDGYSISRCVQILNGMVELSQVEKSVAPDVFLLPGNREIFVSLGGDVRAMWLKRKIQHLA

SEQ ID NO: 11962 - protein, 356 aa, Zea mays subsp. mays
  peptide (1)..(356): Ceres Seq. ID no. 12355663
  misc_feature (146)..(185): Pfam Name: Tesmin/TSO1-like CXC domain Pfam Description: Tesmin/TSO1-like CXC domain
  misc_feature (36)..(251): Homolog of NCBI NO: 7767427 NR Description: CXC domain containing TSO1-like protein 1
  misc_feature (36)..(251): Homolog of NCBI NO: 18403510 NR Description: expressed protein; protein id: At3g22760.1, by cDNA: gi_20466373, supported by cDNA: gi_7767426 [Arabidopsis >gi|20466374|gb|AAM20504.1| unknown protein [Arabidopsis
  misc_feature (44)..(212): Homolog of NCBI NO: 34393829 NR Description: putative CXC domain protein TSO1 [Oryza sativa
  misc_feature (19)..(195): Homolog of NCBI NO: 15028139 NR Description: putative DNA binding protein [Arabidopsis
  misc_feature (19)..(195): Homolog of NCBI NO: 23297130 NR Description: putative DNA binding protein [Arabidopsis
  misc_feature (19)..(195): Homolog of NCBI NO: 6739821 NR Description: putative DNA binding protein [Arabidopsis >gi|7767425|gb|AAF69124.1|AF204059_1 CXC domain protein TSO1
  misc_feature (19)..(195): Homolog of NCBI NO: 30686784 NR Description: DNA binding protein -related [Arabidopsis
  misc_feature (45)..(249): Homolog of NCBI NO: 40241245 NR Description: cysteine-rich polycomb-like protein [Lotus
MEATPISMKPPAPPPVTLEPIELSTHAVGLTELERSSMNQLAIAPDPKRQRVEEAADGNGCKHCACKKSRCLKLYCPCFAGGGYCSDKCGCQPCFNKEAFSETVQTTRKVLLSRQKRMSMKINRRPEANAEPMEDAHHSSSSTPPRRGCNCKKSSCLKKYCDCYQDGTGCSLFCRCDDCQNPFGKNDGIIADDSKRYLYTGADLDHSEGEHDFVVERSPRLQSPMSKESSFHQTPPHLRASSRDAHVFPQAVSQWQALPRSWHCSNKRNGNDRAMDDSSANGNYKSSSHDWQMSKLEDGYSISRCVQILNGMVELSQVEKSVAPDVFLLPGNREIFVSLGGDVRAMWLKRKIQHLA

SEQ ID NO: 11963 - protein, 349 aa, Zea mays subsp. mays
  peptide (1)..(349): Ceres Seq. ID no. 12355664
  misc_feature (139)..(178): Pfam Name: Tesmin/TSO1-like CXC domain Pfam Description: Tesmin/TSO1-like CXC domain
  misc_feature (12)..(188): Homolog of NCBI NO: 15028139 NR Description: putative DNA binding protein [Arabidopsis
  misc_feature (12)..(188): Homolog of NCBI NO: 23297130 NR Description: putative DNA binding protein [Arabidopsis
  misc_feature (29)..(244): Homolog of NCBI NO: 7767427 NR Description: CXC domain containing TSO1-like protein 1
  misc_feature (29)..(244): Homolog of NCBI NO: 18403510 NR Description: expressed protein; protein id: At3g22760.1, by cDNA: gi_20466373, supported by cDNA: gi_7767426 [Arabidopsis >gi|20466374|gb|AAM20504.1| unknown protein [Arabidopsis
  misc_feature (37)..(205): Homolog of NCBI NO: 34393829 NR Description: putative CXC domain protein TSO1 [Oryza sativa
  misc_feature (12)..(188): Homolog of NCBI NO: 6739821 NR Description: putative DNA binding protein [Arabidopsis >gi|7767425|gb|AAF69124.1|AF204059_1 CXC domain protein TSO1
  misc_feature (12)..(188): Homolog of NCBI NO: 30686784 NR Description: DNA binding protein -related [Arabidopsis
  misc_feature (38)..(242): Homolog of NCBI NO: 40241245 NR Description: cysteine-rich polycomb-like protein [Lotus
MKPPAPPPVTLEPIELSTHAVGLTELERSSMNQLAIAPDPKRQRVEEAADGNGCKHCACKKSRCLKLYCPCFAGGGYCSDKCGCQPCFNKEAFSETVQTTRKVLLSRQKRMSMKINRRPEANAEPMEDAHHSSSSTPPRRGCNCKKSSCLKKYCDCYQDGTGCSLFCRCDDCQNPFGKNDGIIADDSKRYLYTGADLDHSEGEHDFVVERSPRLQSPMSKESSFHQTPPHLRASSRDAHVFPQAVSQWQALPRSWHCSNKRNGNDRAMDDSSANGNYKSSSHDWQMSKLEDGYSISRCVQILNGMVELSQVEKSVAPDVFLLPGNREIFVSLGGDVRAMWLKRKIQHLA

SEQ ID NO: 11964 - DNA, 1224 bp, Zea mays subsp. mays
  misc_feature (1)..(1224): Ceres Seq. ID no. 12411717
  misc_feature: MA Experiment ID: 108528 Result: Up-regulated in Transcription
  misc_feature: MA Experiment 108528 PARAMETER Experiment Name: Zm_Imbibed_Seeds_P Parameter: Age (day) Value: 5 vs. 2
  misc_feature: MA Experiment 108528 PARAMETER Experiment Name: Zm_Imbibed_Seeds_P Parameter: Organism Value: Zea mays
  misc_feature: MA Experiment 108528 PARAMETER Experiment Name: Zm_Imbibed_Seeds_P Parameter: Plant Line Value: 35A19
  misc_feature: MA Experiment 108528 PARAMETER Experiment Name: Zm_Imbibed_Seeds_P Parameter: Tissue Value: Aerial vs. Embryo
  misc_feature: MA Experiment ID: 108530 Result: Up-regulated in Transcription
  misc_feature: MA Experiment 108530 PARAMETER Experiment Name: Zm_Imbibed_Seeds_P Parameter: Age (day) Value: 6 vs. 2
  misc_feature: MA Experiment 108530 PARAMETER Experiment Name: Zm_Imbibed_Seeds_P Parameter: Organism Value: Zea mays
  misc_feature: MA Experiment 108530 PARAMETER Experiment Name: Zm_Imbibed_Seeds_P Parameter: Plant Line Value: 35A19
  misc_feature: MA Experiment 108530 PARAMETER Experiment Name: Zm_Imbibed_Seeds_P Parameter: Tissue Value: Aerial vs. Embryo
  misc_feature: MA Experiment ID: 108536 Result: Down-regulated in Transcription
  misc_feature: MA Experiment 108536 PARAMETER Experiment Name: Zm_Meristem_P Parameter: Age (day) Value: 8
  misc_feature: MA Experiment 108536 PARAMETER Experiment Name: Zm_Meristem_P Parameter: Organism Value: Zea mays
  misc_feature: MA Experiment 108536 PARAMETER Experiment Name: Zm_Meristem_P Parameter: Plant Line Value: 35A19
  misc_feature: MA Experiment 108536 PARAMETER Experiment Name: Zm_Meristem_P Parameter: Tissue Value: Shoot Meristem vs. Above Shoot Meristem
  misc_feature: MA Experiment ID: 108545 Result: Up-regulated in Transcription
  misc_feature: MA Experiment 108545 PARAMETER Experiment Name: Zm_Imbibed_Seeds_P Parameter: Age (day) Value: 3 vs. 2
  misc_feature: MA Experiment 108545 PARAMETER Experiment Name: Zm_Imbibed_Seeds_P Parameter: Organism Value: Zea mays
  misc_feature: MA Experiment 108545 PARAMETER Experiment Name: Zm_Imbibed_Seeds_P Parameter: Plant Line Value: 35A19
  misc_feature: MA Experiment 108545 PARAMETER Experiment Name: Zm_Imbibed_Seeds_P Parameter: Tissue Value: Aerial vs. Embryo
  misc_feature: MA Experiment ID: 108547 Result: Up-regulated in Transcription
  misc_feature: MA Experiment 108547 PARAMETER Experiment Name: Zm_Imbibed_Seeds_P Parameter: Age (day) Value: 4 vs. 2
  misc_feature: MA Experiment 108547 PARAMETER Experiment Name: Zm_Imbibed_Seeds_P Parameter: Organism Value: Zea mays
  misc_feature: MA Experiment 108547 PARAMETER Experiment Name: Zm_Imbibed_Seeds_P Parameter: Plant Line Value: 35A19
  misc_feature: MA Experiment 108547 PARAMETER Experiment Name: Zm_Imbibed_Seeds_P Parameter: Tissue Value: Aerial vs. Embryo
  misc_feature: MA Experiment ID: 20000478 Result: Up-regulated in Transcription
  misc_feature: MA Experiment 20000478 PARAMETER Experiment Name: Zm_5mM_SA_P Parameter: Age (day) Value: 11
  misc_feature: MA Experiment 20000478 PARAMETER Experiment Name: Zm_5mM_SA_P Parameter: Organism Value: Zea mays
  misc_feature: MA Experiment 20000478 PARAMETER Experiment Name: Zm_5mM_SA_P Parameter: Plant Line Value: 35A19
  misc_feature: MA Experiment 20000478 PARAMETER Experiment Name: Zm_5mM_SA_P Parameter: Timepoint (hr) Value: 72
  misc_feature: MA Experiment 20000478 PARAMETER Experiment Name: Zm_5mM_SA_P Parameter: Tissue Value: Aerial
  misc_feature: MA Experiment 20000478 PARAMETER Experiment Name: Zm_5mM_SA_P Parameter: Treatment Value: 5mM SA vs. No Treatment
gccgtgccgtctcctctcctctcctctctcctctctcatccccaggtctcagcccacctagcaatgttctcctcctccccttccacatgaccagcgccgcgccgcgcagcgcagccatccttgttctgtcccgggtacgccgccacacacatcgcttcaagcgcttccctccgtccctcctctttgtggattggaatcgacgcctgaaagtggatgacgatggcgggttcttgcgccgcgccgcccgttgcctgtcttccctcgttgaggacgctgccgccaactcacgtcagacttagcggcttcttgccctgttcctcggccgcgcggagtcgcggcgccgccgtgctgggatgcgctctggggaccaagaggcagacgccgggtgttctgaaccggttgttctgtggatacatgcaaagagatgggcatgaaggagatgtaagctgtcaaggaagggatgacactgttatgtttggaccagatgatgatggtgtaaagattcctactcaggtagagactcttgtaaagggcactgcaatggttgctgaaccagaatacaaggctagcccagatctagattacctacaggagctgctggctattcagcagcaaggacctcgtgcaataggtttctttggaacccgcaacatgggatttatgcatcaacaacttattgagatcctgagctatgctatggtcataacaaaaaatcatatattcacatctggtgcttctggaacaaatgcagctgttatcaggggtgctttaagagctgaaaagccagagctgcttactgtaattttacctcaaagcctaaagaagcagcctcctgaaagccaagaactgttgtctaaagtacaaaacttgatcgagaaaccacagtatgatcatttgccactaattgaggctagcaggttatgcaatatggacatcatctccaaggtccaacaggtgatctgcttcgcgttccatgacagcaagctgctgatggaaacatgccaggaggccaagaaccttcggaagatcgtgacactcttctacttggattagctcctccgacatggatctattctccttttttttttgttcgtggcgtaggctaatgttggggggataaaaagcaagttggacggtttagttagtttcgaaatatactggataggtggtgggatgaccttccattggatgagaaagtcattttgtttcgcccattattactgg

SEQ ID NO: 11965 - protein, 279 aa, Zea mays subsp. mays
  peptide (1)..(279): Ceres Seq. ID no. 12411718
  misc_feature (84)..(279): Homolog of NCBI NO: 30689549 NR Description: predicted protein [Arabidopsis thaliana]
  misc_feature (70)..(279): Homolog of NCBI NO: 21537298 NR Description: unknown [Arabidopsis thaliana]
  misc_feature (70)..(279): Homolog of NCBI NO: 15232185 NR Description: putative protein; protein id: At3g59870.1, by cDNA: 12735. [Arabidopsis thaliana] >gi|11357602|pir||T47811
  misc_feature (84)..(255): Homolog of NCBI NO: 7486491 NR Description: hypothetical protein At2g43940 [imported] - thaliana >gi|3212851|gb|AAC23402.1| unknown protein [Arabidopsis
  misc_feature (62)..(220): Homolog of NCBI NO: 34894968 NR Description: B1088D01.6 [Oryza sativa (japonica
  misc_feature (125)..(279): Homolog of NCBI NO: 13812204 NR Description: hypothetical protein [Guillardia theta]
  misc_feature (120)..(279): Homolog of NCBI NO: 16331173 NR Description: unknown protein [Synechocystis sp. PCC 6803]
  misc_feature (129)..(279): Homolog of NCBI NO: 37522470 NR Description: hypothetical protein gll2901 [Gloeobacter
  misc_feature (143)..(279): Homolog of NCBI NO: 23043068 NR Description: hypothetical protein [Trichodesmium erythraeum
  misc_feature (147)..(279): Homolog of NCBI NO: 17232156 NR Description: hypothetical protein [Nostoc sp. PCC 7120]
MTMAGSCAAPPVACLPSLRTLPPTHVRLSGFLPCSSAARSRGAAVLGCALGTKRQTPGVLNRLFCGYMQRDGHEGDVSCQGRDDTVMFGPDDDGVKIPTQVETLVKGTAMVAEPEYKASPDLDYLQELLAIQQQGPRAIGFFGTRNMGFMHQQLIEILSYAMVITKNHIFTSGASGTNAAVIRGALRAEKPELLTVILPQSLKKQPPESQELLSKVQNLIEKPQYDHLPLIEASRLCNMDIISKVQQVICFAFHDSKLLMETCQEAKNLRKIVTLFYLD

SEQ ID NO: 11966 - protein, 277 aa, Zea mays subsp. mays
  peptide (1)..(277): Ceres Seq. ID no. 12411719
  misc_feature (82)..(277): Homolog of NCBI NO: 30689549 NR Description: predicted protein [Arabidopsis thaliana]
  misc_feature (68)..(277): Homolog of NCBI NO: 21537298 NR Description: unknown [Arabidopsis thaliana]
  misc_feature (68)..(277): Homolog of NCBI NO: 15232185 NR Description: putative protein; protein id: At3g59870.1, by cDNA: 12735. [Arabidopsis thaliana] >gi|11357602|pir||T47811
  misc_feature (82)..(253): Homolog of NCBI NO: 7486491 NR Description: hypothetical protein At2g43940 [imported] - thaliana >gi|3212851|gb|AAC23402.1| unknown protein [Arabidopsis
  misc_feature (60)..(218): Homolog of NCBI NO: 34894968 NR Description: B1088D01.6 [Oryza sativa (japonica
  misc_feature (123)..(277): Homolog of NCBI NO: 13812204 NR Description: hypothetical protein [Guillardia theta]
  misc_feature (118)..(277): Homolog of NCBI NO: 16331173 NR Description: unknown protein [Synechocystis sp. PCC 6803]
  misc_feature (127)..(277): Homolog of NCBI NO: 37522470 NR Description: hypothetical protein gll2901 [Gloeobacter
  misc_feature (141)..(277): Homolog of NCBI NO: 23043068 NR Description: hypothetical protein [Trichodesmium erythraeum
  misc_feature (145)..(277): Homolog of NCBI NO: 17232156 NR Description: hypothetical protein [Nostoc sp. PCC 7120]
MAGSCAAPPVACLPSLRTLPPTHVRLSGFLPCSSAARSRGAAVLGCALGTKRQTPGVLNRLFCGYMQRDGHEGDVSCQGRDDTVMFGPDDDGVKIPTQVETLVKGTAMVAEPEYKASPDLDYLQELLAIQQQGPRAIGFFGTRNMGFMHQQLIEILSYAMVITKNHIFTSGASGTNAAVIRGALRAEKPELLTVILPQSLKKQPPESQELLSKVQNLIEKPQYDHLPLIEASRLCNMDIISKVQQVICFAFHDSKLLMETCQEAKNLRKIVTLFYLD

SEQ ID NO: 11967 - protein, 212 aa, Zea mays subsp. mays
  peptide (1)..(212): Ceres Seq. ID no. 12411720
  misc_feature (17)..(212): Homolog of NCBI NO: 30689549 NR Description: predicted protein [Arabidopsis thaliana]
  misc_feature (3)..(212): Homolog of NCBI NO: 21537298 NR Description: unknown [Arabidopsis thaliana]
  misc_feature (3)..(212): Homolog of NCBI NO: 15232185 NR Description: putative protein; protein id: At3g59870.1, by cDNA: 12735. [Arabidopsis thaliana] >gi|11357602|pir||T47811
  misc_feature (17)..(188): Homolog of NCBI NO: 7486491 NR Description: hypothetical protein At2g43940 [imported] - thaliana >gi|3212851|gb|AAC23402.1| unknown protein [Arabidopsis
  misc_feature (1)..(153): Homolog of NCBI NO: 34894968 NR Description: B1088D01.6 [Oryza sativa (japonica
  misc_feature (58)..(212): Homolog of NCBI NO: 13812204 NR Description: hypothetical protein [Guillardia theta]
  misc_feature (53)..(212): Homolog of NCBI NO: 16331173 NR Description: unknown protein [Synechocystis sp. PCC 6803]
  misc_feature (62)..(212): Homolog of NCBI NO: 37522470 NR Description: hypothetical protein gll2901 [Gloeobacter
  misc_feature (76)..(212): Homolog of NCBI NO: 23043068 NR Description: hypothetical protein [Trichodesmium erythraeum
  misc_feature (80)..(212): Homolog of NCBI NO: 17232156 NR Description: hypothetical protein [Nostoc sp. PCC 7120]
MQRDGHEGDVSCQGRDDTVMFGPDDDGVKIPTQVETLVKGTAMVAEPEYKASPDLDYLQELLAIQQQGPRAIGFFGTRNMGFMHQQLIEILSYAMVITKNHIFTSGASGTNAAVIRGALRAEKPELLTVILPQSLKKQPPESQELLSKVQNLIEKPQYDHLPLIEASRLCNMDIISKVQQVICFAFHDSKLLMETCQEAKNLRKIVTLFYLD

SEQ ID NO: 11968 - DNA, 1351 bp, Zea mays subsp. mays
  misc_feature (1)..(1351): Ceres Seq. ID no. 12411713
  misc_feature: MA Experiment ID: 20000627 Result: Up-regulated in Transcription
  misc_feature: MA Experiment 20000627 PARAMETER Experiment Name: Zm_Herbicide-Treatments_P Parameter: Timepoint (hr) Value: 12
  misc_feature: MA Experiment 20000627 PARAMETER Experiment Name: Zm_Herbicide-Treatments_P Parameter: Tissue Value: Aerial
  misc_feature: MA Experiment 20000627 PARAMETER Experiment Name: Zm_Herbicide-Treatments_P Parameter: Treatment Value: Finale vs. No Treatment
gattgtaattctgtaattacgattagttggagagctgcaccgtgcagcactggctgaacaacagctccttgtcgccgtcctcggcgtcctcgggactcatcttgggtcggaagctgctccacgccggcgccagccctggtgcagcgctggtgtcgaagctgtgcactagcgagactgttcggaagctgtcgtcgcccgacggcacctggtagccggcgaggaagtagagctgcgtgccgacgacggccatggtgaggtagagccgctgagctgaagacgggagactggcgagcagcgacaggtcgggcagggcggagtggtccatgatgctctagatgttgagctcgccgtcgtagacctcgacgtgtcccttccagctggtgaggcagtcgccggagctgaacagcctgttggccaccgccacgatctggttcgggggcacgtcgagctgccacatccccggtagattttgtatctaaccatatctcgtgaggatgattgttgtgttggtttgttcaggcgtggctgaccccgtgaacttgccgtcgggaagtccagctgctgcggtttttgtggcgagcctttgcagttcgttctccagtgtaaccggcaacatcagctctgcaagaaccccagaataaaccctgacatcaagacactccactgatcactcttgtgctgctcctaccaatggagcaagagcatctccacctgacaatggtccactcgttgtattcatcactaagtccgctcgattccaccaataggtgttcatgcttacagttgaattggcaaactgagggaggtgccgggggagcaaaattttctcagtttggcgctgatttatcaacgatcatggataagcatttgaagacccttgccccagtctacgtgggaacaaaattcgtcaagcttgatgctgaatatgctccattctttgtggccaaactggcaatcaagacactgccatgtgtaatattgttcaagaaggatattgctgttgaccgattagttgggtttcaagatctcagaagtaaagacgattttctgacaagagcattggaacacattcttattctcaagacgaaagggataatcgatgagaagaagaaagatgacgacgatgacgatgaagaaagcgaggctaagaataggagggttaggtcctcaactgctcaagactctgactcagactgaacttgagatgaggattgaggactcaccgtttttgcactttggattttgtttgtttgtttgtttgttctgtgctgtgttgtactgtaattgatttgtgtaaccatgtatcggtaccagacaccacaacaagaacatgtacaagagattctttagc

SEQ ID NO: 11969 - protein, 168 aa, Zea mays subsp. mays
  peptide (1)..(168): Ceres Seq. ID no. 12411714
  misc_feature (55)..(168): Homolog of NCBI NO: 30693386 NR Description: expressed protein [Arabidopsis thaliana]
  misc_feature (55)..(168): Homolog of NCBI NO: 18425069 NR Description: putative protein; protein id: At5g66410.1,
  misc_feature (55)..(168): Homolog of NCBI NO: 10177522 NR Description: contains similarity to ATP binding protein
  misc_feature (55)..(168): Homolog of NCBI NO: 7485705 NR Description: hypothetical protein F18B3.240 - Arabidopsis >gi|4835247|emb|CAB42925.1| putative tRNA synthetase [Arabidopsis
  misc_feature (55)..(168): Homolog of NCBI NO: 15224267 NR Description: putative ATP binding protein; protein id: [Arabidopsis thaliana] >gi|5902677|sp|O64628|14P_ARATH Protein
  misc_feature (55)..(168): Homolog of NCBI NO: 40253924 NR Description: putative ATP binding protein associated with cell
  misc_feature (55)..(168): Homolog of NCBI NO: 18404574 NR Description: expressed protein; protein id: At3g25580.1, by cDNA: 6617. [Arabidopsis thaliana] >gi|9279739|dbj|BAB01329.1|
  misc_feature (55)..(168): Homolog of NCBI NO: 21594045 NR Description: putative ATP binding protein [Arabidopsis
  misc_feature (55)..(168): Homolog of NCBI NO: 26452365 NR Description: unknown protein [Arabidopsis thaliana]
  misc_feature (55)..(168): Homolog of NCBI NO: 39581010 NR Description: Hypothetical protein CBG19670 [Caenorhabditis
MEQEHLHLTMVHSLYSSLSPLDSTNRCSCLQLNWQTEGGAGGAKFSQFGADLSTIMDKHLKTLAPVYVGTKFVKLDAEYAPFFVAKLAIKTLPCVILFKKDIAVDRLVGFQDLRSKDDFLTRALEHILILKTKGIIDEKKKDDDDDDEESEAKNRRVRSSTAQDSDSD

SEQ ID NO: 11970 - protein, 159 aa, Zea mays subsp. mays
  peptide (1)..(159): Ceres Seq. ID no. 12411715
  misc_feature (46)..(159): Homolog of NCBI NO: 30693386 NR Description: expressed protein [Arabidopsis thaliana]
  misc_feature (46)..(159): Homolog of NCBI NO: 18425069 NR Description: putative protein; protein id: At5g66410.1,
  misc_feature (46)..(159): Homolog of NCBI NO: 10177522 NR Description: contains similarity to ATP binding protein
  misc_feature (46)..(159): Homolog of NCBI NO: 7485705 NR Description: hypothetical protein F18B3.240 - Arabidopsis >gi|4835247|emb|CAB42925.1| putative tRNA synthetase [Arabidopsis
  misc_feature (46)..(159): Homolog of NCBI NO: 15224267 NR Description: putative ATP binding protein; protein id: [Arabidopsis thaliana] >gi|5902677|sp|O64628|14P_ARATH Protein
  misc_feature (46)..(159): Homolog of NCBI NO: 40253924 NR Description: putative ATP binding protein associated with cell
  misc_feature (46)..(159): Homolog of NCBI NO: 18404574 NR Description: expressed protein; protein id: At3g25580.1, by cDNA: 6617. [Arabidopsis thaliana] >gi|9279739|dbj|BAB01329.1|
  misc_feature (46)..(159): Homolog of NCBI NO: 21594045 NR Description: putative ATP binding protein [Arabidopsis
  misc_feature (46)..(159): Homolog of NCBI NO: 26452365 NR Description: unknown protein [Arabidopsis thaliana]
  misc_feature (46)..(159): Homolog of NCBI NO: 39581010 NR Description: Hypothetical protein CBG19670 [Caenorhabditis
MVHSLYSSLSPLDSTNRCSCLQLNWQTEGGAGGAKFSQFGADLSTIMDKHLKTLAPVYVGTKFVKLDAEYAPFFVAKLAIKTLPCVILFKKDIAVDRLVGFQDLRSKDDFLTRALEHILILKTKGIIDEKKKDDDDDDEESEAKNRRVRSSTAQDSDSD

SEQ ID NO: 11971 - protein, 113 aa, Zea mays subsp. mays
  peptide (1)..(113): Ceres Seq. ID no. 12411716
  misc_feature (1)..(113): Homolog of NCBI NO: 30693386 NR Description: expressed protein [Arabidopsis thaliana]
  misc_feature (1)..(113): Homolog of NCBI NO: 18425069 NR Description: putative protein; protein id: At5g66410.1,
  misc_feature (1)..(113): Homolog of NCBI NO: 10177522 NR Description: contains similarity to ATP binding protein
  misc_feature (1)..(113): Homolog of NCBI NO: 7485705 NR Description: hypothetical protein F18B3.240 - Arabidopsis >gi|4835247|emb|CAB42925.1| putative tRNA synthetase [Arabidopsis
  misc_feature (1)..(113): Homolog of NCBI NO: 15224267 NR Description: putative ATP binding protein; protein id: [Arabidopsis thaliana] >gi|5902677|sp|O64628|14P_ARATH Protein
  misc_feature (1)..(113): Homolog of NCBI NO: 40253924 NR Description: putative ATP binding protein associated with cell
  misc_feature (1)..(113): Homolog of NCBI NO: 18404574 NR Description: expressed protein; protein id: At3g25580.1, by cDNA: 6617. [Arabidopsis thaliana] >gi|9279739|dbj|BAB01329.1|
  misc_feature (1)..(113): Homolog of NCBI NO: 21594045 NR Description: putative ATP binding protein [Arabidopsis
  misc_feature (1)..(113): Homolog of NCBI NO: 26452365 NR Description: unknown protein [Arabidopsis thaliana]
  misc_feature (1)..(113): Homolog of NCBI NO: 39581010 NR Description: Hypothetical protein CBG19670 [Caenorhabditis
MDKHLKTLAPVYVGTKFVKLDAEYAPFFVAKLAIKTLPCVILFKKDIAVDRLVGFQDLRSKDDFLTRALEHILILKTKGIIDEKKKDDDDDDEESEAKNRRVRSSTAQDSDSD

SEQ ID NO: 11972 - DNA, 1674 bp, Zea mays subsp. mays
  misc_feature (1)..(1674): Ceres Seq. ID no. 12355665
  misc_feature: MA Experiment ID: 20000534 Result: Down-regulated in Transcription
  misc_feature: MA Experiment 20000534 PARAMETER Experiment Name: Zm_Hybrid_Pollen_P Parameter: Age (day) Value: 8
  misc_feature: MA Experiment 20000534 PARAMETER Experiment Name: Zm_Hybrid_Pollen_P Parameter: Organism Value: Zea mays
  misc_feature: MA Experiment 20000534 PARAMETER Experiment Name: Zm_Hybrid_Pollen_P Parameter: Plant Line Value: 35A19
  misc_feature: MA Experiment 20000534 PARAMETER Experiment Name: Zm_Hybrid_Pollen_P Parameter: Tissue Value: Pollen vs. Aerial
cacttgcagaggttcgcgactcgcgacgcctccgcagccccagccccacgccccgcgacccaaaccctagccccctccaccgtaccgccaccgtcatggccgaaccatccgccgccgccgtcaccgcagctgaggtcggggaggagtccgatgccgccgcgatggaggaggtcgcggcggccgcgaagaggtggcccgggtggcccggggacagcgtgttccggctggtggtgccagtgctcaaggtcggaagcataatcgggcggaagggcgagctcatcaagcgccttgtcgaggggaccaaggccagagtccgcatcctcgagggccccgtcggcgccaccgagcgtatcgttttggtttctggaaaagaagatccaggcttggagctatctccagccatggatgctctcatgagagtttttaagcgtgtcattgggataacagatggagctgcggagggcactcaggctgctgctactcctggtgtatgtgctgcccgattgttggttcctggagctcaggcaattaacctaattgggaagcaaggtgccactatcaaagcaatccaggagagcacgggtgctacaatacgggtaatatcagtagatgaacatgagagaccattttatgtaactgacgatgaaaggatagttgagatacagggcgatacagagaaagttctaaaagcactgcaagcagtttctaaccatcttcggaagtttttggttgaccatagtgtacttccattatttgaaaaaactaatactgcagtgagccaagatcacaatgttggttggagtgatatgtcacatccttcaattggttctgcacaagtgaatcaaccaccttcagtggtagatgaatatattcttccagtgaagagggatactttgtatcttgaacgagaacctttgttagatcataacattcatcgctcaggcgtatcactttatgggcgggatccagccttgtcaacactacgaccacctggaatacatggtgctgggcccgctacttacacagataacccaaaccatgcaaatcccacttacctatgctgaagacattataggagttaaaggagcaaatattgcgtacatacgagctaatagtggagctgttgttacaattcaggagagtttgggtagtccagatgatattactgttgaaataaaggggacatcttcacaggtacaagctgcacagcagctcatccaggactcgttggctgcacaccgagaacctgtcagaagcagttatgtgggagcaggattagattcactgtataggtccagctactcacaatatggcagctccacctatccttcgtcatcactgccatcttattctagcatcgatgatgttagtaggtacccatcttcaggtcttggtggctatgggtcgagttacaggtactagtactagttcgtccttaggcttgaatgcttgatggcaccttgtatccattcctgggtgattattgtacaagtcagcaagttttctgctctgcgtgcttacgggcaggggatcattttacaagtcagcaagttctctgctttgtatgcttccgggcagggatctggtagattatactgcatcccaattcccagtacccagacttcggggtccaatttgctttgacaaacaatggaatcggaaatcgtgcttgtc

SEQ ID NO: 11973 - protein, 353 aa, Zea mays subsp. mays
  peptide (1)..(353): Ceres Seq. ID no. 12355666
  misc_feature (167)..(222): Pfam Name: KH domain Pfam Description: KH domain
  misc_feature (35)..(337): Homolog of NCBI NO: 37536904 NR Description: putative nucleic acid binding protein [Oryza
  misc_feature (1)..(341): Homolog of NCBI NO: 15236094 NR Description: KH domain protein; protein id: At4g26000.1, by cDNA: 33495., supported by cDNA: gi_15810498, supported by gi_20466385, supported by cDNA: gi_21280914 [Arabidopsis
  misc_feature (47)..(325): Homolog of NCBI NO: 15229321 NR Description: KH domain protein; protein id: At3g04610.1, by cDNA: gi_17979248 [Arabidopsis thaliana]
  misc_feature (47)..(340): Homolog of NCBI NO: 16924113 NR Description: putative RNA binding protein [Oryza sativa]
  misc_feature (58)..(200): Homolog of NCBI NO: 37534332 NR Description: unknown protein [Oryza sativa (japonica
  misc_feature (193)..(252): Homolog of NCBI NO: 37534332 NR Description: unknown protein [Oryza sativa (japonica
  misc_feature (68)..(289): Homolog of NCBI NO: 37535668 NR Description: putative RNA-binding protein [Oryza sativa
  misc_feature (26)..(282): Homolog of NCBI NO: 22328051 NR Description: KH domain protein; protein id: At5g64390.1
  misc_feature (26)..(282): Homolog of NCBI NO: 28261403 NR Description: HEN4 [Arabidopsis thaliana]
  misc_feature (65)..(238): Homolog of NCBI NO: 18921324 NR Description: putative nucleic acid binding protein [Oryza
LAEVRDSRRLRSPSPTPRDPNPSPLHRTATVMAEPSAAAVTAAEVGEESDAAAMEEVAAAAKRWPGWPGDSVFRLVVPVLKVGSIIGRKGELIKRLVEGTKARVRILEGPVGATERIVLVSGKEDPGLELSPAMDALMRVFKRVIGITDGAAEGTQAAATPGVCAARLLVPGAQAINLIGKQGATIKAIQESTGATIRVISVDEHERPFYVTDDERIVEIQGDTEKVLKALQAVSNHLRKFLVDHSVLPLFEKTNTAVSQDHNVGWSDMSHPSIGSAQVNQPPSVVDEYILPVKRDTLYLEREPLLDHNIHRSGVSLYGRDPALSTLRPPGIHGAGPATYTDNPNHANPTYLC

SEQ ID NO: 11974 - protein, 322 aa, Zea mays subsp. mays
  peptide (1)..(322): Ceres Seq. ID no. 12355667
  misc_feature (136)..(191): Pfam Name: KH domain Pfam Description: KH domain
  misc_feature (4)..(306): Homolog of NCBI NO: 37536904 NR Description: putative nucleic acid binding protein [Oryza
  misc_feature (1)..(310): Homolog of NCBI NO: 15236094 NR Description: KH domain protein; protein id: At4g26000.1, by cDNA: 33495., supported by cDNA: gi_15810498, supported by gi_20466385, supported by cDNA: gi_21280914 [Arabidopsis
  misc_feature (16)..(294): Homolog of NCBI NO: 15229321 NR Description: KH domain protein; protein id: At3g04610.1, by cDNA: gi_17979248 [Arabidopsis thaliana]
  misc_feature (16)..(309): Homolog of NCBI NO: 16924113 NR Description: putative RNA binding protein [Oryza sativa]
  misc_feature (27)..(169): Homolog of NCBI NO: 37534332 NR Description: unknown protein [Oryza sativa (japonica
  misc_feature (162)..(221): Homolog of NCBI NO: 37534332 NR Description: unknown protein [Oryza sativa (japonica
  misc_feature (37)..(258): Homolog of NCBI NO: 37535668 NR Description: putative RNA-binding protein [Oryza sativa
  misc_feature (1)..(251): Homolog of NCBI NO: 22328051 NR Description: KH domain protein; protein id: At5g64390.1
  misc_feature (1)..(251): Homolog of NCBI NO: 28261403 NR Description: HEN4 [Arabidopsis thaliana]
  misc_feature (34)..(207): Homolog of NCBI NO: 18921324 NR Description: putative nucleic acid binding protein [Oryza
MAEPSAAAVTAAEVGEESDAAAMEEVAAAAKRWPGWPGDSVFRLVVPVLKVGSIIGRKGELIKRLVEGTKARVRILEGPVGATERIVLVSGKEDPGLELSPAMDALMRVFKRVIGITDGAAEGTQAAATPGVCAARLLVPGAQAINLIGKQGATIKAIQESTGATIRVISVDEHERPFYVTDDERIVEIQGDTEKVLKALQAVSNHLRKFLVDHSVLPLFEKTNTAVSQDHNVGWSDMSHPSIGSAQVNQPPSVVDEYILPVKRDTLYLEREPLLDHNIHRSGVSLYGRDPALSTLRPPGIHGAGPATYTDNPNHANPTYLC

SEQ ID NO: 11975 - protein, 300 aa, Zea mays subsp. mays
  peptide (1)..(300): Ceres Seq. ID no. 12355668
  misc_feature (114)..(169): Pfam Name: KH domain Pfam Description: KH domain
  misc_feature (1)..(284): Homolog of NCBI NO: 37536904 NR Description: putative nucleic acid binding protein [Oryza
  misc_feature (1)..(288): Homolog of NCBI NO: 15236094 NR Description: KH domain protein; protein id: At4g26000.1, by cDNA: 33495., supported by cDNA: gi_15810498, supported by gi_20466385, supported by cDNA: gi_21280914 [Arabidopsis
  misc_feature (1)..(272): Homolog of NCBI NO: 15229321 NR Description: KH domain protein; protein id: At3g04610.1, by cDNA: gi_17979248 [Arabidopsis thaliana]
  misc_feature (1)..(287): Homolog of NCBI NO: 16924113 NR Description: putative RNA binding protein [Oryza sativa]
  misc_feature (5)..(147): Homolog of NCBI NO: 37534332 NR Description: unknown protein [Oryza sativa (japonica
  misc_feature (140)..(199): Homolog of NCBI NO: 37534332 NR Description: unknown protein [Oryza sativa (japonica
  misc_feature (15)..(236): Homolog of NCBI NO: 37535668 NR Description: putative RNA-binding protein [Oryza sativa
  misc_feature (1)..(229): Homolog of NCBI NO: 22328051 NR Description: KH domain protein; protein id: At5g64390.1
  misc_feature (1)..(229): Homolog of NCBI NO: 28261403 NR Description: HEN4 [Arabidopsis thaliana]
  misc_feature (12)..(185): Homolog of NCBI NO: 18921324 NR Description: putative nucleic acid binding protein [Oryza
MEEVAAAAKRWPGWPGDSVFRLVVPVLKVGSIIGRKGELIKRLVEGTKARVRILEGPVGATERIVLVSGKEDPGLELSPAMDALMRVFKRVIGITDGAAEGTQAAATPGVCAARLLVPGAQAINLIGKQGATIKAIQESTGATIRVISVDEHERPFYVTDDERIVEIQGDTEKVLKALQAVSNHLRKFLVDHSVLPLFEKTNTAVSQDHNVGWSDMSHPSIGSAQVNQPPSVVDEYILPVKRDTLYLEREPLLDHNIHRSGVSLYGRDPALSTLRPPGIHGAGPATYTDNPNHANPTYLC

SEQ ID NO: 11976 - DNA, 1383 bp, Zea mays subsp. mays
  misc_feature (1)..(1383): Ceres Seq. ID no. 12411698
  misc_feature: MA Experiment ID: 108528 Result: Down-regulated in Transcription
  misc_feature: MA Experiment 108528 PARAMETER Experiment Name: Zm_Imbibed_Seeds_P Parameter: Age (day) Value: 5 vs. 2
  misc_feature: MA Experiment 108528 PARAMETER Experiment Name: Zm_Imbibed_Seeds_P Parameter: Organism Value: Zea mays
  misc_feature: MA Experiment 108528 PARAMETER Experiment Name: Zm_Imbibed_Seeds_P Parameter: Plant Line Value: 35A19
  misc_feature: MA Experiment 108528 PARAMETER Experiment Name: Zm_Imbibed_Seeds_P Parameter: Tissue Value: Aerial vs. Embryo
  misc_feature: MA Experiment ID: 108529 Result: Down-regulated in Transcription
  misc_feature: MA Experiment 108529 PARAMETER Experiment Name: Zm_Imbibed_Seeds_P Parameter: Age (day) Value: 5 vs. 2
  misc_feature: MA Experiment 108529 PARAMETER Experiment Name: Zm_Imbibed_Seeds_P Parameter: Organism Value: Zea mays
  misc_feature: MA Experiment 108529 PARAMETER Experiment Name: Zm_Imbibed_Seeds_P Parameter: Plant Line Value: 35A19
  misc_feature: MA Experiment 108529 PARAMETER Experiment Name: Zm_Imbibed_Seeds_P Parameter: Tissue Value: Roots vs. Embryo
  misc_feature: MA Experiment ID: 108530 Result: Down-regulated in Transcription
  misc_feature: MA Experiment 108530 PARAMETER Experiment Name: Zm_Imbibed_Seeds_P Parameter: Age (day) Value: 6 vs. 2
  misc_feature: MA Experiment 108530 PARAMETER Experiment Name: Zm_Imbibed_Seeds_P Parameter: Organism Value: Zea mays
  misc_feature: MA Experiment 108530 PARAMETER Experiment Name: Zm_Imbibed_Seeds_P Parameter: Plant Line Value: 35A19
  misc_feature: MA Experiment 108530 PARAMETER Experiment Name: Zm_Imbibed_Seeds_P Parameter: Tissue Value: Aerial vs. Embryo
  misc_feature: MA Experiment ID: 108536 Result: Up-regulated in Transcription
  misc_feature: MA Experiment 108536 PARAMETER Experiment Name: Zm_Meristem_P Parameter: Age (day) Value: 8
  misc_feature: MA Experiment 108536 PARAMETER Experiment Name: Zm_Meristem_P Parameter: Organism Value: Zea mays
  misc_feature: MA Experiment 108536 PARAMETER Experiment Name: Zm_Meristem_P Parameter: Plant Line Value: 35A19
  misc_feature: MA Experiment 108536 PARAMETER Experiment Name: Zm_Meristem_P Parameter: Tissue Value: Shoot Meristem vs. Above Shoot Meristem
  misc_feature: MA Experiment ID: 108543 Result: Down-regulated in Transcription
  misc_feature: MA Experiment ID: 108544 Result: Down-regulated in Transcription
  misc_feature: MA Experiment ID: 108545 Result: Down-regulated in Transcription
  misc_feature: MA Experiment 108545 PARAMETER Experiment Name: Zm_Imbibed_Seeds_P Parameter: Age (day) Value: 3 vs. 2
  misc_feature: MA Experiment 108545 PARAMETER Experiment Name: Zm_Imbibed_Seeds_P Parameter: Organism Value: Zea mays
  misc_feature: MA Experiment 108545 PARAMETER Experiment Name: Zm_Imbibed_Seeds_P Parameter: Plant Line Value: 35A19
  misc_feature: MA Experiment 108545 PARAMETER Experiment Name: Zm_Imbibed_Seeds_P Parameter: Tissue Value: Aerial vs. Embryo
  misc_feature: MA Experiment ID: 108547 Result: Down-regulated in Transcription
  misc_feature: MA Experiment 108547 PARAMETER Experiment Name: Zm_Imbibed_Seeds_P Parameter: Age (day) Value: 4 vs. 2
  misc_feature: MA Experiment 108547 PARAMETER Experiment Name: Zm_Imbibed_Seeds_P Parameter: Organism Value: Zea mays
  misc_feature: MA Experiment 108547 PARAMETER Experiment Name: Zm_Imbibed_Seeds_P Parameter: Plant Line Value: 35A19
  misc_feature: MA Experiment 108547 PARAMETER Experiment Name: Zm_Imbibed_Seeds_P Parameter: Tissue Value: Aerial vs. Embryo
  misc_feature: MA Experiment ID: 108599 Result: Up-regulated in Transcription
  misc_feature: MA Experiment 108599 PARAMETER Experiment Name: Zm_RT1_P Parameter: Age (day) Value: 11
  misc_feature: MA Experiment 108599 PARAMETER Experiment Name: Zm_RT1_P Parameter: Organism Value: Zea mays
  misc_feature: MA Experiment 108599 PARAMETER Experiment Name: Zm_RT1_P Parameter: Plant Line Value: rt1 mut vs. rt1 wt
  misc_feature: MA Experiment 108599 PARAMETER Experiment Name: Zm_RT1_P Parameter: Tissue Value: Roots
  misc_feature: MA Experiment ID: 108687 Result: Up-regulated in Transcription
  misc_feature: MA Experiment 108687 PARAMETER Experiment Name: Zm_Embryos-Flowers__P Parameter: Tissue Value: Embryo vs. Aerial+
  misc_feature: MA Experiment ID: 108688 Result: Down-regulated in Transcription
  misc_feature: MA Experiment 108688 PARAMETER Experiment Name: Zm_Embryos-Flowers__P Parameter: Tissue Value: Immature Flowers vs. Aerial+
  misc_feature: MA Experiment ID: 20000492 Result: Up-regulated in Transcription
  misc_feature: MA Experiment 20000492 PARAMETER Experiment Name: Zm_Hybrid_Seed_Dev_P Parameter: DAP Value: 12
  misc_feature: MA Experiment 20000492 PARAMETER Experiment Name: Zm_Hybrid_Seed_Dev_P Parameter: Organism Value: Zea mays
  misc_feature: MA Experiment 20000492 PARAMETER Experiment Name: Zm_Hybrid_Seed_Dev_P Parameter: Plant Line Value: 35A19
  misc_feature: MA Experiment 20000492 PARAMETER Experiment Name: Zm_Hybrid_Seed_Dev_P Parameter: Tissue Value: Fert Kernel vs. Unfert Floret
  misc_feature: MA Experiment ID: 20000535 Result: Up-regulated in Transcription
  misc_feature: MA Experiment 20000535 PARAMETER Experiment Name: Zm_Hybrid_Seed_Dev_P Parameter: DAP Value: 30 vs. 12
  misc_feature: MA Experiment 20000535 PARAMETER Experiment Name: Zm_Hybrid_Seed_Dev_P Parameter: Organism Value: Zea mays
  misc_feature: MA Experiment 20000535 PARAMETER Experiment Name: Zm_Hybrid_Seed_Dev_P Parameter: Plant Line Value: 35A19
  misc_feature: MA Experiment 20000535 PARAMETER Experiment Name: Zm_Hybrid_Seed_Dev_P Parameter: Tissue Value: Embryo vs. Unfert Floret
  misc_feature: MA Experiment ID: 20001612 Result: Up-regulated in Transcription
  misc_feature: MA Experiment 20001612 PARAMETER Experiment Name: Zm_50ppm_KNO3_L-to-H_P Parameter: Age (day) Value: 19
  misc_feature: MA Experiment 20001612 PARAMETER Experiment Name: Zm_50ppm_KNO3_L-to-H_P Parameter: Organism Value: Zea mays
  misc_feature: MA Experiment 20001612 PARAMETER Experiment Name: Zm_50ppm_KNO3_L-to-H_P Parameter: Plant Line Value: 35A19
  misc_feature: MA Experiment 20001612 PARAMETER Experiment Name: Zm_50ppm_KNO3_L-to-H_P Parameter: Timepoint (hr) Value: 8
  misc_feature: MA Experiment 20001612 PARAMETER Experiment Name: Zm_50ppm_KNO3_L-to-H_P Parameter: Tissue Value: Roots
  misc_feature: MA Experiment 20001612 PARAMETER Experiment Name: Zm_50ppm_KNO3_L-to-H_P Parameter: Treatment Value: 50ppm KNO3 vs. 50ppm KCl
tctccccgggcacatgcccgtgggcacgcgtgcaggccactggccacccccacgcagaaaaaccagcggccgcgcgcaccgacccggccgacgactccggcgaccgcgcgcacacgacaaaaccccggcggcgacgacagacccacaggatcagacgactcagcgagcggaacaccccctggcgccggccgttaaagtcaagtcaagcaccggagccggtgtataaagctccggcgactggtgcccaccacggctagctgccgtcgtcgcagaagtaggagctcgcgtttctccatccgtacgtcctgcagtagtgattgggcagcatcgtcatcgatcgatcgccatgaggctccgcggcgtgctgcgcctcgtcctcgcgctcctcctcgccgccaccgccatcgtgccggtgctgctccttagcgagaacggcggcggcggcgtcgcacctgcgccgccgttcaactcctcgcgtgtcaaggccgtctcgtggcatccaaggatcttcgtgtacaaggggttcctctccgacgccgagtgtgaccacctcgtgactctggcgaagaaaaagatccagcggtccatggtggcggacaacgagtccggcaagagcgtcaagagcgaggtgcgcaccagctccggcatgttcctcgacaagcgccaggacccggtggtgagtcggatcgaggagaggatcgcggcatggacgtttcttcctcaagagaacgccgagaacatgcaggtgctgcgctacgagccggggcagaagtacgagccgcacttcgactacttccacgacagggtcaaccaggcccgcggcggccaccgctacgccaccgtgctcatgtacctgtccaccgtccgcgagggaggcgagaccgtgttccccaacgccaagggttgggagtcccagcccaaggacgccactttctccgagtgtgcacacaaaggattggcagtgaaaccggtgaaaggcgacgccgtgctcttcttcagcctgcacgccgacggcacgccggacccgctcagcctccacgggagctgcccggtgatccggggcgagaagtggtcggcgcccaagtggatccacgtcaggtcgtacgaggacgaaccccaggcagtactcgtgctccccgaggaaaccgacggcgcgcgggtgcgccgataggagcgagcgctgcgcgaagtgggccgcggcgggtgagtgcgcctggaacccggcgtacatgctcggcgccggcgatgagggggcgcctgggcagtgccgcaggagctgcggagtctgcgattcgtaggcgcgtccttgccttttctttctttcttcctttctttgtttgttttgggatgcagtattcagataactagtggctgtttttctgc

SEQ ID NO: 11977 - protein, 274 aa, Zea mays subsp. mays
  peptide (1)..(274): Ceres Seq. ID no. 12411699
  misc_feature (128)..(250): Pfam Name: 2OG-Fe(II) oxygenase superfamily Pfam Description: 2OG-Fe(II) oxygenase superfamily
  misc_feature (2)..(257): Homolog of NCBI NO: 34393269 NR Description: prolyl 4-hydroxylase alpha-1 subunit
  misc_feature (9)..(255): Homolog of NCBI NO: 29150368 NR Description: putative oxidoreductase [Oryza sativa (japonica
  misc_feature (7)..(274): Homolog of NCBI NO: 29150365 NR Description: putative oxidoreductase [Oryza sativa (japonica
  misc_feature (108)..(254): Homolog of NCBI NO: 37534316 NR Description: unknown protein [Oryza sativa (japonica
  misc_feature (2)..(107): Homolog of NCBI NO: 37534316 NR Description: unknown protein [Oryza sativa (japonica
  misc_feature (40)..(254): Homolog of NCBI NO: 9294583 NR Description: prolyl 4-hydroxylase alpha subunit-like protein
  misc_feature (40)..(254): Homolog of NCBI NO: 18405808 NR Description: prolyl 4-hydroxylase, putative; protein id: supported by cDNA: 8330., supported by cDNA: gi_18086436
  misc_feature (40)..(254): Homolog of NCBI NO: 18086437 NR Description: AT3g28480/MFJ20_16 [Arabidopsis thaliana]
  misc_feature (14)..(254): Homolog of NCBI NO: 18397528 NR Description: expressed protein; protein id: At3g06300.1,
  misc_feature (14)..(254): Homolog of NCBI NO: 21618073 NR Description: prolyl 4-hydroxylase alpha subunit-like protein
MRLRGVLRLVLALLLAATAIVPVLLLSENGGGGVAPAPPFNSSRVKAVSWHPRIFVYKGFLSDAECDHLVTLAKKKIQRSMVADNESGKSVKSEVRTSSGMFLDKRQDPVVSRIEERIAAWTFLPQENAENMQVLRYEPGQKYEPHFDYFHDRVNQARGGHRYATVLMYLSTVREGGETVFPNAKGWESQPKDATFSECAHKGLAVKPVKGDAVLFFSLHADGTPDPLSLHGSCPVIRGEKWSAPKWIHVRSYEDEPQAVLVLPEETDGARVRR

SEQ ID NO: 11978 - protein, 220 aa, Zea mays subsp. mays
  peptide (1)..(220): Ceres Seq. ID no. 12411700
  misc_feature (1)..(177): Homolog of NCBI NO: 5821145 NR Description: RNA binding protein [Homo sapiens]
MDVSSSRERREHAGAALRAGAEVRAALRLLPRQGQPGPRRPPLRHRAHVPVHRPRGRRDRVPQRQGLGVPAQGRHFLRVCTQRIGSETGERRRRALLQPARRRHAGPAQPPRELPGDPGREVVGAQVDPRQVVRGRTPGSTRAPRGNRRRAGAPIGASAARSGPRRVSAPGTRRTCSAPAMRGRLGSAAGAAESAIRRRVLAFSFFLPFFVCFGMQYSDN

SEQ ID NO: 11979 - protein, 194 aa, Zea mays subsp. mays
  peptide (1)..(194): Ceres Seq. ID no. 12411701
  misc_feature (48)..(170): Pfam Name: 2OG-Fe(II) oxygenase superfamily Pfam Description: 2OG-Fe(II) oxygenase superfamily
  misc_feature (1)..(174): Homolog of NCBI NO: 18405808 NR Description: prolyl 4-hydroxylase, putative; protein id: supported by cDNA: 8330., supported by cDNA: gi_18086436
  misc_feature (1)..(174): Homolog of NCBI NO: 18086437 NR Description: AT3g28480/MFJ20_16 [Arabidopsis thaliana]
  misc_feature (1)..(177): Homolog of NCBI NO: 34393269 NR Description: prolyl 4-hydroxylase alpha-1 subunit
  misc_feature (1)..(194): Homolog of NCBI NO: 29150365 NR Description: putative oxidoreductase [Oryza sativa (japonica
  misc_feature (1)..(27): Homolog of NCBI NO: 37534316 NR Description: unknown protein [Oryza sativa (japonica
  misc_feature (1)..(174): Homolog of NCBI NO: 9294583 NR Description: prolyl 4-hydroxylase alpha subunit-like protein
  misc_feature (28)..(174): Homolog of NCBI NO: 37534316 NR Description: unknown protein [Oryza sativa (japonica
  misc_feature (1)..(175): Homolog of NCBI NO: 29150368 NR Description: putative oxidoreductase [Oryza sativa (japonica
  misc_feature (1)..(174): Homolog of NCBI NO: 18397528 NR Description: expressed protein; protein id: At3g06300.1,
  misc_feature (1)..(174): Homolog of NCBI NO: 21618073 NR Description: prolyl 4-hydroxylase alpha subunit-like protein
MVADNESGKSVKSEVRTSSGMFLDKRQDPVVSRIEERIAAWTFLPQENAENMQVLRYEPGQKYEPHFDYFHDRVNQARGGHRYATVLMYLSTVREGGETVFPNAKGWESQPKDATFSECAHKGLAVKPVKGDAVLFFSLHADGTPDPLSLHGSCPVIRGEKWSAPKWIHVRSYEDEPQAVLVLPEETDGARVRR

SEQ ID NO: 11980 - DNA, 1048 bp, Zea mays subsp. mays
  misc_feature (1)..(1048): Ceres Seq. ID no. 13577875
  misc_feature: MA Experiment ID: 108687 Result: Down-regulated in Transcription
  misc_feature: MA Experiment 108687 PARAMETER Experiment Name: Zm_Embryos-Flowers__P Parameter: Tissue Value: Embryo vs. Aerial+
  misc_feature: MA Experiment ID: 20000535 Result: Down-regulated in Transcription
  misc_feature: MA Experiment 20000535 PARAMETER Experiment Name: Zm_Hybrid_Seed_Dev_P Parameter: DAP Value: 30 vs. 12
  misc_feature: MA Experiment 20000535 PARAMETER Experiment Name: Zm_Hybrid_Seed_Dev_P Parameter: Organism Value: Zea mays
  misc_feature: MA Experiment 20000535 PARAMETER Experiment Name: Zm_Hybrid_Seed_Dev_P Parameter: Plant Line Value: 35A19
  misc_feature: MA Experiment 20000535 PARAMETER Experiment Name: Zm_Hybrid_Seed_Dev_P Parameter: Tissue Value: Embryo vs. Unfert Floret
cagacttccagcatctccgctccggctgcgctctgccttgctttcctgctacctgctctagcgcgagcgagagaggtacggcggccgatctggcggcgcaggcggagggctcggccggggccggcaagtcggcgccgaacatggggaggggccgggtcgagctcaagcggatcgagaacaagatcaaccgccaggtcaccttcgccaagcgccgcaacggcctgctcaagaaggcgtacgagctctcggtgctctgcgacgccgaggtcgcgctcatcatcttctccaaccgcggcaagctctacgagttctccagcacgcagagcatgccaaaaacacttgaaaagtaccaaaaatgcagttttgcagggcctgaaacagcactccagaatagagagaatgagcaactgaaaagtagccgcaatgagtacctcaaactgaaggcacgtgttgataatttacagcggactcaaaggaacttgcttggtgaagatcttgagtcattaggcataaaagagctggagcacctggagaagcagctcgattcgtccttgaagcacataagatctacaaggacacaacacatggttgatcaactgacagaacttcagaaaaaagaacaaatgttttgtgaagcaaataagtgtcttcgaagaagactggaggagagcaaccaggttatatggcagcatgcgtgggagcaaagcgagcggcattctgaagtgcagccgcagcagctcaatggcaataacttcttccatcccctcgatggtgctggtgaacccacccttcagatagggtatccttcagaggcactgactagctcatgcatgaccaccttcctgcccccgtggttgccatgagatcgaactactgcgcaattccgaattaataagcatggccgcatgcagctgcctgtgctatacgttgtgcttggagtgtactttaaggttcttgcatggcaagtatgtgtgtaacatttgtgatgaacatggaaactatccacttaattctcgaataatcaatgaactgggtaagattgtaacat

SEQ ID NO: 11981 - protein, 286 aa, Zea mays subsp. mays
  peptide (1)..(286): Ceres Seq. ID no. 13577876
  misc_feature (121)..(222): Pfam Name: K-box region Pfam Description: K-box region
  misc_feature (47)..(286): Homolog of NCBI NO: 29372768 NR Description: putative MADS-domain transcription factor [Zea
  misc_feature (47)..(286): Homolog of NCBI NO: 9367315 NR Description: MADS-box protein 9 [Hordeum vulgare subsp.
  misc_feature (47)..(286): Homolog of NCBI NO: 28630961 NR Description: MADS5 [Lolium perenne]
  misc_feature (47)..(286): Homolog of NCBI NO: 7446519 NR Description: MADS box protein - rice
  misc_feature (47)..(286): Homolog of NCBI NO: 33304376 NR Description: MADS box protein [Oryza sativa]
  misc_feature (39)..(286): Homolog of NCBI NO: 7446543 NR Description: MADS box protein - rice
  misc_feature (47)..(286): Homolog of NCBI NO: 7446518 NR Description: M79 protein - rice >gi|2463333|emb|CAA75241.1|
  misc_feature (47)..(286): Homolog of NCBI NO: 33242919 NR Description: MADS box protein [Oryza sativa (japonica
  misc_feature (58)..(286): Homolog of NCBI NO: 5051935 NR Description: MADS-box protein FDRMADS1 [Oryza sativa]
  misc_feature (47)..(286): Homolog of NCBI NO: 7446544 NR Description: MADS box protein - rice
DFQHLRSGCALPCFPATCSSASERGTAADLAAQAEGSAGAGKSAPNMGRGRVELKRIENKINRQVTFAKRRNGLLKKAYELSVLCDAEVALIIFSNRGKLYEFSSTQSMPKTLEKYQKCSFAGPETALQNRENEQLKSSRNEYLKLKARVDNLQRTQRNLLGEDLESLGIKELEHLEKQLDSSLKHIRSTRTQHMVDQLTELQKKEQMFCEANKCLRRRLEESNQVIWQHAWEQSERHSEVQPQQLNGNNFFHPLDGAGEPTLQIGYPSEALTSSCMTTFLPPWLP

SEQ ID NO: 11982 - protein, 240 aa, Zea mays subsp. mays
  peptide (1)..(240): Ceres Seq. ID no. 13577877
  misc_feature (75)..(176): Pfam Name: K-box region Pfam Description: K-box region
  misc_feature (1)..(240): Homolog of NCBI NO: 29372768 NR Description: putative MADS-domain transcription factor [Zea
  misc_feature (1)..(240): Homolog of NCBI NO: 9367315 NR Description: MADS-box protein 9 [Hordeum vulgare subsp.
  misc_feature (1)..(240): Homolog of NCBI NO: 28630961 NR Description: MADS5 [Lolium perenne]
  misc_feature (1)..(240): Homolog of NCBI NO: 7446519 NR Description: MADS box protein - rice
  misc_feature (1)..(240): Homolog of NCBI NO: 33304376 NR Description: MADS box protein [Oryza sativa]
  misc_feature (1)..(240): Homolog of NCBI NO: 7446543 NR Description: MADS box protein - rice
  misc_feature (1)..(240): Homolog of NCBI NO: 7446518 NR Description: M79 protein - rice >gi|2463333|emb|CAA75241.1|
  misc_feature (1)..(240): Homolog of NCBI NO: 33242919 NR Description: MADS box protein [Oryza sativa (japonica
  misc_feature (12)..(240): Homolog of NCBI NO: 5051935 NR Description: MADS-box protein FDRMADS1 [Oryza sativa]
  misc_feature (1)..(240): Homolog of NCBI NO: 7446544 NR Description: MADS box protein - rice
MGRGRVELKRIENKINRQVTFAKRRNGLLKKAYELSVLCDAEVALIIFSNRGKLYEFSSTQSMPKTLEKYQKCSFAGPETALQNRENEQLKSSRNEYLKLKARVDNLQRTQRNLLGEDLESLGIKELEHLEKQLDSSLKHIRSTRTQHMVDQLTELQKKEQMFCEANKCLRRRLEESNQVIWQHAWEQSERHSEVQPQQLNGNNFFHPLDGAGEPTLQIGYPSEALTSSCMTTFLPPWLP

SEQ ID NO: 11983 - protein, 178 aa, Zea mays subsp. mays
  peptide (1)..(178): Ceres Seq. ID no. 13577878
  misc_feature (13)..(114): Pfam Name: K-box region Pfam Description: K-box region
  misc_feature (1)..(178): Homolog of NCBI NO: 29372768 NR Description: putative MADS-domain transcription factor [Zea
  misc_feature (1)..(178): Homolog of NCBI NO: 9367315 NR Description: MADS-box protein 9 [Hordeum vulgare subsp.
  misc_feature (1)..(178): Homolog of NCBI NO: 28630961 NR Description: MADS5 [Lolium perenne]
  misc_feature (1)..(178): Homolog of NCBI NO: 7446519 NR Description: MADS box protein - rice
  misc_feature (1)..(178): Homolog of NCBI NO: 33304376 NR Description: MADS box protein [Oryza sativa]
  misc_feature (1)..(178): Homolog of NCBI NO: 7446543 NR Description: MADS box protein - rice
  misc_feature (1)..(178): Homolog of NCBI NO: 7446518 NR Description: M79 protein - rice >gi|2463333|emb|CAA75241.1|
  misc_feature (1)..(178): Homolog of NCBI NO: 33242919 NR Description: MADS box protein [Oryza sativa (japonica
  misc_feature (1)..(178): Homolog of NCBI NO: 5051935 NR Description: MADS-box protein FDRMADS1 [Oryza sativa]
  misc_feature (1)..(178): Homolog of NCBI NO: 7446544 NR Description: MADS box protein - rice
MPKTLEKYQKCSFAGPETALQNRENEQLKSSRNEYLKLKARVDNLQRTQRNLLGEDLESLGIKELEHLEKQLDSSLKHIRSTRTQHMVDQLTELQKKEQMFCEANKCLRRRLEESNQVIWQHAWEQSERHSEVQPQQLNGNNFFHPLDGAGEPTLQIGYPSEALTSSCMTTFLPPWLP

SEQ ID NO: 11984 - DNA, 1504 bp, Zea mays subsp. mays
  misc_feature (1)..(1504): Ceres Seq. ID no. 13492786
  misc_feature: MA Experiment ID: 20000630 Result: Down-regulated in Transcription
  misc_feature: MA Experiment 20000630 PARAMETER Experiment Name: Zm_Herbicide-Treatments_P Parameter: Timepoint (hr) Value: 4
  misc_feature: MA Experiment 20000630 PARAMETER Experiment Name: Zm_Herbicide-Treatments_P Parameter: Tissue Value: Aerial
  misc_feature: MA Experiment 20000630 PARAMETER Experiment Name: Zm_Herbicide-Treatments_P Parameter: Treatment Value: Roundup vs. No Treatment
gtcttgtttcgctgtcttgttccgcgctccccaacccccctcccaaccccaaccccgtcccaacccccactacggccttccccccatggctcccctggcctcccttcctctcccgcccagtactgccgtcaccgctcgcttcctcgccgcccccgccatccgcgtgatcagcccatcgcggcccgcgctgccgctcctctcatccgcctccgcaggcggcttccctcacgcctctcgcgctccctgcagtgccgcccgcgagcaccgccgcggcaccgtgcgggaatgctctcgagctgatgctgctggagcagctccattatcaaagacactgttagacctcaaggattcctgctggagatttttaaggccacatacaatccgaggaactgctttaggatccatagcattggttgcgagagccttgatagagaattcccatctgataaactggtggttgatattcaaagcattctatggacttggggcattgatatttggcaatggttacatagttgggattaatcagatctatgatgttgctattgacaagataaacaagccatatttacccattgctgctggtgatctctcaattcagtcagcatggttgttggtgatattatttgcagctgcaggtttttcaattgttatatcaaactttggacctttcattacctctctatactgccttggcctatttcttggcactatatattctgttcctccattcagactgaagagatatccggttgctgcttttcttatcattgcaacggttcgtggtttccttctcaactttggcgtgtactatgctactagggctgcactaggtcttacattccaatggagctcccctgttgctttcattacatgcttcgtgacactatttgctttggtcattgctataaccaaagatctccctgatgttgaaggagatcgcaagtatcaaatatcaactttggcaacaaagcttggtgtcagaaatattgcattccttggatctggtttattattagcaaactatattgctgctattgctgtagcttttaccatgcctcaggctttcaggtgcactgtaatggttcctgtgcatgctgtccttgctggtggtttaattttccagacatgggttctggagcaagcgaagtacagaaaggatgctatttcgcagtactatcggttcatctggaatctcttctatgctgaatatatcttcttcccgttaatatagagaggtgagtttcctgattagcattcagcatccatgaccctttgcttctgacatttgtctgcacaaaaaaatgtcagatcttgtagttcatcttgatcttgggctacagcctaattcatggtgaaaagagggagaagttggcaaagtgaggtctgtcgtgcatattttcaacggaaacaatggagtagcaatattgctatgctagggttctgaagttgtaggagcttttctaagcttttacgatgttgaaggcgttgttggagctgtggc

SEQ ID NO: 11985 - protein, 410 aa, Zea mays subsp. mays
  peptide (1)..(410): Ceres Seq. ID no. 13492787
  misc_feature (128)..(373): Pfam Name: UbiA prenyltransferase family Pfam Description: UbiA prenyltransferase family
  misc_feature (29)..(410): Homolog of NCBI NO: 34393498 NR Description: putative tocopherol polyprenyltransferase [Oryza
  misc_feature (103)..(410): Homolog of NCBI NO: 30681973 NR Description: UbiA prenyltransferase family [Arabidopsis
  misc_feature (26)..(386): Homolog of NCBI NO: 10998133 NR Description: dbj|BAA17774.1~gene_id:MEC18.5~similar to unknown
  misc_feature (119)..(409): Homolog of NCBI NO: 23125851 NR Description: hypothetical protein [Nostoc punctiforme]
  misc_feature (117)..(270): Homolog of NCBI NO: 23039416 NR Description: hypothetical protein [Trichodesmium erythraeum
  misc_feature (290)..(409): Homolog of NCBI NO: 23039416 NR Description: hypothetical protein [Trichodesmium erythraeum
  misc_feature (119)..(409): Homolog of NCBI NO: 16330366 NR Description: unknown protein [Synechocystis sp. PCC 6803]
  misc_feature (119)..(409): Homolog of NCBI NO: 17230940 NR Description: hypothetical protein [Nostoc sp. PCC 7120]
  misc_feature (119)..(409): Homolog of NCBI NO: 37519852 NR Description: unknown protein [Gloeobacter violaceus]
  misc_feature (109)..(410): Homolog of NCBI NO: 30680535 NR Description: tocopherol polyprenyltransferase (homogentisate (tocopherol phytyltransferase) [Arabidopsis thaliana] tocopherol polyprenyltransferase [Arabidopsis thaliana]
SCFAVLFRAPQPPSQPQPRPNPHYGLPPMAPLASLPLPPSTAVTARFLAAPAIRVISPSRPALPLLSSASAGGFPHASRAPCSAAREHRRGTVRECSRADAAGAAPLSKTLLDLKDSCWRFLRPHTIRGTALGSIALVARALIENSHLINWWLIFKAFYGLGALIFGNGYIVGINQIYDVAIDKINKPYLPIAAGDLSIQSAWLLVILFAAAGFSIVISNFGPFITSLYCLGLFLGTIYSVPPFRLKRYPVAAFLIIATVRGFLLNFGVYYATRAALGLTFQWSSPVAFITCFVTLFALVIAITKDLPDVEGDRKYQISTLATKLGVRNIAFLGSGLLLANYIAAIAVAFTMPQAFRCTVMVPVHAVLAGGLIFQTWVLEQAKYRKDAISQYYRFIWNLFYAEYIFFPLI

SEQ ID NO: 11986 - protein, 382 aa, Zea mays subsp. mays
  peptide (1)..(382): Ceres Seq. ID no. 13492788
  misc_feature (100)..(345): Pfam Name: UbiA prenyltransferase family Pfam Description: UbiA prenyltransferase family
  misc_feature (1)..(382): Homolog of NCBI NO: 34393498 NR Description: putative tocopherol polyprenyltransferase [Oryza
  misc_feature (75)..(382): Homolog of NCBI NO: 30681973 NR Description: UbiA prenyltransferase family [Arabidopsis
  misc_feature (1)..(358): Homolog of NCBI NO: 10998133 NR Description: dbj|BAA17774.1~gene_id:MEC18.5~similar to unknown
  misc_feature (91)..(381): Homolog of NCBI NO: 23125851 NR Description: hypothetical protein [Nostoc punctiforme]
  misc_feature (89)..(242): Homolog of NCBI NO: 23039416 NR Description: hypothetical protein [Trichodesmium erythraeum
  misc_feature (262)..(381): Homolog of NCBI NO: 23039416 NR Description: hypothetical protein [Trichodesmium erythraeum
  misc_feature (91)..(381): Homolog of NCBI NO: 16330366 NR Description: unknown protein [Synechocystis sp. PCC 6803]
  misc_feature (91)..(381): Homolog of NCBI NO: 17230940 NR Description: hypothetical protein [Nostoc sp. PCC 7120]
  misc_feature (91)..(381): Homolog of NCBI NO: 37519852 NR Description: unknown protein [Gloeobacter violaceus]
  misc_feature (81)..(382): Homolog of NCBI NO: 30680535 NR Description: tocopherol polyprenyltransferase (homogentisate (tocopherol phytyltransferase) [Arabidopsis thaliana] tocopherol polyprenyltransferase [Arabidopsis thaliana]
MAPLASLPLPPSTAVTARFLAAPAIRVISPSRPALPLLSSASAGGFPHASRAPCSAAREHRRGTVRECSRADAAGAAPLSKTLLDLKDSCWRFLRPHTIRGTALGSIALVARALIENSHLINWWLIFKAFYGLGALIFGNGYIVGINQIYDVAIDKINKPYLPIAAGDLSIQSAWLLVILFAAAGFSIVISNFGPFITSLYCLGLFLGTIYSVPPFRLKRYPVAAFLIIATVRGFLLNFGVYYATRAALGLTFQWSSPVAFITCFVTLFALVIAITKDLPDVEGDRKYQISTLATKLGVRNIAFLGSGLLLANYIAAIAVAFTMPQAFRCTVMVPVHAVLAGGLIFQTWVLEQAKYRKDAISQYYRFIWNLFYAEYIFFPLI

SEQ ID NO: 11987 - DNA, 1481 bp, Zea mays subsp. mays
  misc_feature (1)..(1481): Ceres Seq. ID no. 12341277
  misc_feature: MA Experiment ID: 108522 Result: Down-regulated in Transcription
  misc_feature: MA Experiment 108522 PARAMETER Experiment Name: Zm_42deg_Heat_P Parameter: Age (day) Value: 8
  misc_feature: MA Experiment 108522 PARAMETER Experiment Name: Zm_42deg_Heat_P Parameter: Organism Value: Zea mays
  misc_feature: MA Experiment 108522 PARAMETER Experiment Name: Zm_42deg_Heat_P Parameter: Plant Line Value: 35A19
  misc_feature: MA Experiment 108522 PARAMETER Experiment Name: Zm_42deg_Heat_P Parameter: Temperature (deg C) Value: 42 vs. 22
  misc_feature: MA Experiment 108522 PARAMETER Experiment Name: Zm_42deg_Heat_P Parameter: Timepoint (hr) Value: 1
  misc_feature: MA Experiment 108522 PARAMETER Experiment Name: Zm_42deg_Heat_P Parameter: Tissue Value: Aerial
  misc_feature: MA Experiment ID: 108535 Result: Up-regulated in Transcription
  misc_feature: MA Experiment 108535 PARAMETER Experiment Name: Zm_Meristem_P Parameter: Age (day) Value: 8
  misc_feature: MA Experiment 108535 PARAMETER Experiment Name: Zm_Meristem_P Parameter: Organism Value: Zea mays
  misc_feature: MA Experiment 108535 PARAMETER Experiment Name: Zm_Meristem_P Parameter: Plant Line Value: 35A19
  misc_feature: MA Experiment 108535 PARAMETER Experiment Name: Zm_Meristem_P Parameter: Tissue Value: Root Meristem vs. Above Root Meristem
  misc_feature: MA Experiment ID: 108544 Result: Down-regulated in Transcription
  misc_feature: MA Experiment ID: 20000108 Result: Up-regulated in Transcription
  misc_feature: MA Experiment 20000108 PARAMETER Experiment Name: Zm_Root-Tips_P Parameter: Age (day) Value: 12
  misc_feature: MA Experiment 20000108 PARAMETER Experiment Name: Zm_Root-Tips_P Parameter: Organism Value: Zea mays
  misc_feature: MA Experiment 20000108 PARAMETER Experiment Name: Zm_Root-Tips_P Parameter: Tissue Value: Root tips vs. Root mid region    35
  misc_feature: MA Experiment 20000108 PARAMETER Experiment Name: Zm_Root-Tips_P Parameter: Tissue Value: Root tips vs. Root mid region   Sequence Listing-Misc Features (4)
  misc_feature: MA Experiment ID: 20000487 Result: Up-regulated in Transcription
  misc_feature: MA Experiment 20000487 PARAMETER Experiment Name: Zm_50mM_NH4NO3_L_to_H_P Parameter: Organism Value: Zea mays
  misc_feature: MA Experiment 20000487 PARAMETER Experiment Name: Zm_50mM_NH4NO3_L_to_H_P Parameter: Timepoint (hr) Value: 4
  misc_feature: MA Experiment 20000487 PARAMETER Experiment Name: Zm_50mM_NH4NO3_L_to_H_P Parameter: Tissue Value: Leaves
  misc_feature: MA Experiment 20000487 PARAMETER Experiment Name: Zm_50mM_NH4NO3_L_to_H_P Parameter: Treatment Value: 50mM NH4NO3 vs. 100mM Mannitol
  misc_feature: MA Experiment ID: 20000488 Result: Up-regulated in Transcription
  misc_feature: MA Experiment 20000488 PARAMETER Experiment Name: Zm_50mM_NH4NO3_L_to_H_P Parameter: Organism Value: Zea mays
  misc_feature: MA Experiment 20000488 PARAMETER Experiment Name: Zm_50mM_NH4NO3_L_to_H_P Parameter: Timepoint (hr) Value: 8
  misc_feature: MA Experiment 20000488 PARAMETER Experiment Name: Zm_50mM_NH4NO3_L_to_H_P Parameter: Tissue Value: Leaves
  misc_feature: MA Experiment 20000488 PARAMETER Experiment Name: Zm_50mM_NH4NO3_L_to_H_P Parameter: Treatment Value: 50mM NH4NO3 vs. 100mM Mannitol
  misc_feature: MA Experiment ID: 20000535 Result: Up-regulated in Transcription
  misc_feature: MA Experiment 20000535 PARAMETER Experiment Name: Zm_Hybrid_Seed_Dev_P Parameter: DAP Value: 30 vs. 12
  misc_feature: MA Experiment 20000535 PARAMETER Experiment Name: Zm_Hybrid_Seed_Dev_P Parameter: Organism Value: Zea mays
  misc_feature: MA Experiment 20000535 PARAMETER Experiment Name: Zm_Hybrid_Seed_Dev_P Parameter: Plant Line Value: 35A19
  misc_feature: MA Experiment 20000535 PARAMETER Experiment Name: Zm_Hybrid_Seed_Dev_P Parameter: Tissue Value: Embryo vs. Unfert Floret
  misc_feature: MA Experiment ID: 20000626 Result: Up-regulated in Transcription
  misc_feature: MA Experiment 20000626 PARAMETER Experiment Name: Zm_Herbicide-Treatments_P Parameter: Timepoint (hr) Value: 12
  misc_feature: MA Experiment 20000626 PARAMETER Experiment Name: Zm_Herbicide-Treatments_P Parameter: Tissue Value: Aerial
  misc_feature: MA Experiment 20000626 PARAMETER Experiment Name: Zm_Herbicide-Treatments_P Parameter: Treatment Value: Roundup vs. No Treatment
  misc_feature: MA Experiment ID: 20001606 Result: Up-regulated in Transcription
  misc_feature: MA Experiment 20001606 PARAMETER Experiment Name: Zm_50ppm_KNO3_L-to-H_P Parameter: Age (day) Value: 19
  misc_feature: MA Experiment 20001606 PARAMETER Experiment Name: Zm_50ppm_KNO3_L-to-H_P Parameter: Organism Value: Zea mays
  misc_feature: MA Experiment 20001606 PARAMETER Experiment Name: Zm_50ppm_KNO3_L-to-H_P Parameter: Plant Line Value: 35A19
  misc_feature: MA Experiment 20001606 PARAMETER Experiment Name: Zm_50ppm_KNO3_L-to-H_P Parameter: Timepoint (hr) Value: 8
  misc_feature: MA Experiment 20001606 PARAMETER Experiment Name: Zm_50ppm_KNO3_L-to-H_P Parameter: Tissue Value: Shoots
  misc_feature: MA Experiment 20001606 PARAMETER Experiment Name: Zm_50ppm_KNO3_L-to-H_P Parameter: Treatment Value: 50ppm KNO3 vs. 50ppm KCl
ctgttccggctctgtggagcgccgccccttctccgacgtggcgcctcagtatttgttagggttttctccgggattgaaggcactgctgcaggctgaaacgtttctcgcttgattggcggaagaagggattccagcgatctgtttgctgctagctgcgagagttcaatatgtctcggaccttcaaatcgacgacgggtctctctcggcggtttctgaatctgatcgcggccaaccactcccctggcgtcaagtcgctgcaccgcatcggcctgggtcgcatctttaactcaacgccagggccaataccaaacggagatcgattggagtccgcagcaggacaagaagactacatggtgcggccccgcgcgttggatatcattcggctccccacgccggtaatgagcttccgatcttcagcgtcatttgaaagcaaagaatggaagttggattgcttcccgttatcggactgcaaagttttctgcatggaccagtcagggcgcggtttcctcttcgatgccaactcgtgcggggtgtcaaccgtggcccatctccatacacccaaggtgaagcccatctccctctctatcccccaacccaatgttgacgaagacgaccacaacgacgagtggggcagcaaacttttcatcttggagagcatgcccgaagaaccagaggtgaactgccagttcgaggccttcatctaccgcatgcgagatgtgtatcccagggtactgaaacattggaatcgccacctcgtcccaccgccgccgccattcatccgtgagacagttaaccagaatagccgccgccttgaggttacatcttatgctgtgattgaggatggctcccacatctgcatatccattgagggcgctggcacctactgcatgcacacggtcagccacacgtggaaccgggtcggcgagtggacactacccttccgtggcaagattgagtacgtgcccgagctcaaactctggtttggcacctctgccgagtctgggcacctggctgcggctgacctctctgccatggactcccagccacagctagtgggtacttggaaggaacttgatccgccagagggttggaaggaatgcaaggattctcaggttgtcaacctcggctccggtaggttctgtatagcaaggttctttaagaaaaatccagtggacgtacgttctggtgacgaactaccgggccagagttttgctgtccttaccggcgtggaggtggtgaatcgagggtgtgatgcggaagtggaactccggatggtcactcacaaatcgaggcgagtcaacagcactacaatcgagacattgttctgattttatccattatgtgtcatctgaattagtaaaagccatcttttcttggcatctatttcttgtgtttctctctgttctcagtgtattgttcttcgatgctgaaactgattcaacttatgtacgctcttgatttacaaatttctgttgtgcttc

SEQ ID NO: 11988 - protein, 386 aa, Zea mays subsp. mays
  peptide (1)..(386): Ceres Seq. ID no. 12341278
  misc_feature (11)..(385): Homolog of NCBI NO: 34907072 NR Description: OSJNBa0093F16.25 [Oryza sativa (japonica
  misc_feature (72)..(356): Homolog of NCBI NO: 37531434 NR Description: hypothetical protein [Oryza sativa (japonica group)] >gi|22655770|gb|AAN04187.1| Hypothetical protein [Oryza
  misc_feature (68)..(386): Homolog of NCBI NO: 34902348 NR Description: Hypothetical protein [Oryza sativa (japonica group)] >gi|24418029|gb|AAN60479.1| Hypothetical protein [Oryza
  misc_feature (11)..(206): Homolog of NCBI NO: 38345446 NR Description: OSJNBa0042L16.1 [Oryza sativa (japonica
  misc_feature (231)..(359): Homolog of NCBI NO: 38345446 NR Description: OSJNBa0042L16.1 [Oryza sativa (japonica
  misc_feature (131)..(382): Homolog of NCBI NO: 38344193 NR Description: OSJNBa0064G10.9 [Oryza sativa (japonica
  misc_feature (11)..(103): Homolog of NCBI NO: 38344193 NR Description: OSJNBa0064G10.9 [Oryza sativa (japonica
  misc_feature (91)..(374): Homolog of NCBI NO: 15451604 NR Description: Hypothetical protein [Oryza sativa]
  misc_feature (10)..(386): Homolog of NCBI NO: 34902338 NR Description: Unknown protein [Oryza sativa (japonica
  misc_feature (95)..(330): Homolog of NCBI NO: 32487803 NR Description: OSJNBa0035I04.14 [Oryza sativa (japonica
MSRTFKSTTGLSRRFLNLIAANHSPGVKSLHRIGLGRIFNSTPGPIPNGDRLESAAGQEDYMVRPRALDIIRLPTPVMSFRSSASFESKEWKLDCFPLSDCKVFCMDQSGRGFLFDANSCGVSTVAHLHTPKVKPISLSIPQPNVDEDDHNDEWGSKLFILESMPEEPEVNCQFEAFIYRMRDVYPRVLKHWNRHLVPPPPPFIRETVNQNSRRLEVTSYAVIEDGSHICISIEGAGTYCMHTVSHTWNRVGEWTLPFRGKIEYVPELKLWFGTSAESGHLAAADLSAMDSQPQLVGTWKELDPPEGWKECKDSQVVNLGSGRFCIARFFKKNPVDVRSGDELPGQSFAVLTGVEVVNRGCDAEVELRMVTHKSRRVNSTTIETLF

SEQ ID NO: 11989 - protein, 325 aa, Zea mays subsp. mays
  peptide (1)..(325): Ceres Seq. ID no. 12341279
  misc_feature (1)..(324): Homolog of NCBI NO: 34907072 NR Description: OSJNBa0093F16.25 [Oryza sativa (japonica
  misc_feature (11)..(295): Homolog of NCBI NO: 37531434 NR Description: hypothetical protein [Oryza sativa (japonica group)] >gi|22655770|gb|AAN04187.1| Hypothetical protein [Oryza
  misc_feature (7)..(325): Homolog of NCBI NO: 34902348 NR Description: Hypothetical protein [Oryza sativa (japonica group)] >gi|24418029|gb|AAN60479.1| Hypothetical protein [Oryza
  misc_feature (1)..(145): Homolog of NCBI NO: 38345446 NR Description: OSJNBa0042L16.1 [Oryza sativa (japonica
  misc_feature (170)..(298): Homolog of NCBI NO: 38345446 NR Description: OSJNBa0042L16.1 [Oryza sativa (japonica
  misc_feature (70)..(321): Homolog of NCBI NO: 38344193 NR Description: OSJNBa0064G10.9 [Oryza sativa (japonica
  misc_feature (1)..(42): Homolog of NCBI NO: 38344193 NR Description: OSJNBa0064G10.9 [Oryza sativa (japonica
  misc_feature (30)..(313): Homolog of NCBI NO: 15451604 NR Description: Hypothetical protein [Oryza sativa]
  misc_feature (1)..(325): Homolog of NCBI NO: 34902338 NR Description: Unknown protein [Oryza sativa (japonica
  misc_feature (34)..(269): Homolog of NCBI NO: 32487803 NR Description: OSJNBa0035I04.14 [Oryza sativa (japonica
MVRPRALDIIRLPTPVMSFRSSASFESKEWKLDCFPLSDCKVFCMDQSGRGFLFDANSCGVSTVAHLHTPKVKPISLSIPQPNVDEDDHNDEWGSKLFILESMPEEPEVNCQFEAFIYRMRDVYPRVLKHWNRHLVPPPPPFIRETVNQNSRRLEVTSYAVIEDGSHICISIEGAGTYCMHTVSHTWNRVGEWTLPFRGKIEYVPELKLWFGTSAESGHLAAADLSAMDSQPQLVGTWKELDPPEGWKECKDSQVVNLGSGRFCIARFFKKNPVDVRSGDELPGQSFAVLTGVEVVNRGCDAEVELRMVTHKSRRVNSTTIETLF

SEQ ID NO: 11990 - protein, 309 aa, Zea mays subsp. mays
  peptide (1)..(309): Ceres Seq. ID no. 12341280
  misc_feature (1)..(308): Homolog of NCBI NO: 34907072 NR Description: OSJNBa0093F16.25 [Oryza sativa (japonica
  misc_feature (1)..(279): Homolog of NCBI NO: 37531434 NR Description: hypothetical protein [Oryza sativa (japonica group)] >gi|22655770|gb|AAN04187.1| Hypothetical protein [Oryza
  misc_feature (1)..(309): Homolog of NCBI NO: 34902348 NR Description: Hypothetical protein [Oryza sativa (japonica group)] >gi|24418029|gb|AAN60479.1| Hypothetical protein [Oryza
  misc_feature (1)..(129): Homolog of NCBI NO: 38345446 NR Description: OSJNBa0042L16.1 [Oryza sativa (japonica
  misc_feature (154)..(282): Homolog of NCBI NO: 38345446 NR Description: OSJNBa0042L16.1 [Oryza sativa (japonica
  misc_feature (54)..(305): Homolog of NCBI NO: 38344193 NR Description: OSJNBa0064G10.9 [Oryza sativa (japonica
  misc_feature (1)..(26): Homolog of NCBI NO: 38344193 NR Description: OSJNBa0064G10.9 [Oryza sativa (japonica
  misc_feature (14)..(297): Homolog of NCBI NO: 15451604 NR Description: Hypothetical protein [Oryza sativa]
  misc_feature (1)..(309): Homolog of NCBI NO: 34902338 NR Description: Unknown protein [Oryza sativa (japonica
  misc_feature (18)..(253): Homolog of NCBI NO: 32487803 NR Description: OSJNBa0035I04.14 [Oryza sativa (japonica
MSFRSSASFESKEWKLDCFPLSDCKVFCMDQSGRGFLFDANSCGVSTVAHLHTPKVKPISLSIPQPNVDEDDHNDEWGSKLFILESMPEEPEVNCQFEAFIYRMRDVYPRVLKHWNRHLVPPPPPFIRETVNQNSRRLEVTSYAVIEDGSHICISIEGAGTYCMHTVSHTWNRVGEWTLPFRGKIEYVPELKLWFGTSAESGHLAAADLSAMDSQPQLVGTWKELDPPEGWKECKDSQVVNLGSGRFCIARFFKKNPVDVRSGDELPGQSFAVLTGVEVVNRGCDAEVELRMVTHKSRRVNSTTIETLF

SEQ ID NO: 11991 - DNA, 1831 bp, Zea mays subsp. mays
  misc_feature (1)..(1831): Ceres Seq. ID no. 12413529
  misc_feature: MA Experiment ID: 108528 Result: Up-regulated in Transcription
  misc_feature: MA Experiment 108528 PARAMETER Experiment Name: Zm_Imbibed_Seeds_P Parameter: Age (day) Value: 5 vs. 2
  misc_feature: MA Experiment 108528 PARAMETER Experiment Name: Zm_Imbibed_Seeds_P Parameter: Organism Value: Zea mays
  misc_feature: MA Experiment 108528 PARAMETER Experiment Name: Zm_Imbibed_Seeds_P Parameter: Plant Line Value: 35A19
  misc_feature: MA Experiment 108528 PARAMETER Experiment Name: Zm_Imbibed_Seeds_P Parameter: Tissue Value: Aerial vs. Embryo
  misc_feature: MA Experiment ID: 108547 Result: Up-regulated in Transcription
  misc_feature: MA Experiment 108547 PARAMETER Experiment Name: Zm_Imbibed_Seeds_P Parameter: Age (day) Value: 4 vs. 2
  misc_feature: MA Experiment 108547 PARAMETER Experiment Name: Zm_Imbibed_Seeds_P Parameter: Organism Value: Zea mays
  misc_feature: MA Experiment 108547 PARAMETER Experiment Name: Zm_Imbibed_Seeds_P Parameter: Plant Line Value: 35A19
  misc_feature: MA Experiment 108547 PARAMETER Experiment Name: Zm_Imbibed_Seeds_P Parameter: Tissue Value: Aerial vs. Embryo
gcacgagaccattacctagaacatcctaatcgaaaaactccgcctccgctccccgctcgccgccgagattgctggattggctgccgccagcgccccggtgctagctcccgttcctcgcggtggtcgctggactagcctggacgccgcggcccgccgcctggtcgaagagatggactcggtcatggccgcccccgactcgccgccgcagactgtcgtgctcgtctctgccggcgccagccactccgtcgcgctcctcacgggcaatgtcctgtgctcgtggggcaggggcgaggacgggcagctcggccacggcgacgcggaggaccggctcgtgcccacggtgcttagcggcttcgacgcgcccgcgatcacgtcagtcatctgcggtgccgaccacaccaccgcctactccgaggacgagctgcaggtctacagctggggctggggagacttcgggaggctggggcatggcaactccagcgacgtcttcacgccccagcctgtcaaggcgctgcaggggctcaagatcaaacagattgcctgcggggacagccattgtcttgccgtcaccatggccggagaagtgcagagttggggccgtaaccaaaacggacagctaggccttggaaccactgaagactcgctgctcccacagaagattcaggcttttgagagtgtttgcgtgaaaatgattgctgccggtgccgaacatactgctgcagtaactgaagacggtgacctctacggatggggttggggtcgatatggaaacttaggtcttggtgaccgtaatgaccgtttgcttcctgaaaaagtatcttctgtggagggtgagaagatggtgcttgtggcatgtggatggcgccatacaattactgtttctgactctggtaatctgtacacttatggttggagcaaatacggtcaactagggcatggtgattttgaagatcatttagttccacataaagtagaagctttgaaagatagcactatatcccagatttcaggcggctggaggcatacgatggcacttacatcagagggaaagctttacggatggggatggaacaagttcggacaagtcggagtcggcaacaacgacgaccacagctcccccggacaagtcagttttccaggatcagaaaatctcccaggttgcatgcggatggaggcacactctggccctctccgagaagaaaaatgtcttctcctgggggaggggcactagcggacagctcggcaacggtgaaatagtcgacaggaacacacctgtgctgatcgatgccctgagctcagatggttctgcctgcaagaagctagagtcatccacggcagccccgttcgcagccaaagtttgggtgtcgccgtcagaacgatacgccattgtccctgacgagaacgtccgtaaagcaggcggaggcacggcacgaggcaacggcgccgacgcgaacgtgccggagaacgacgtgaagaggatgcgcgtgcagtcgtcgtagtaggtcttctactaccgtccactccaccccacccccgttaaccctactactagtagtaagtactacgaagaaccggtgccccatctagcggcgcccgatttttgtgcgttacgttctgcctaaaagtgctttccgtcgacggacggacctcctggtgttgagatggtagcggtagcactgcctcgcgggcgatggtgtgtgtgtgttgtgacgtgattcacctcttagagtagagaggtggctagcccagtcgacctgtgtgtgttgttaagatgtgtcctggatcttttgtgacattgcatgggagggtacaaataagcgcttcgtttctg

SEQ ID NO: 11992 - protein, 353 aa, Zea mays subsp. mays
  peptide (1)..(353): Ceres Seq. ID no. 12413530
  misc_feature (188)..(237): Pfam Name: Regulator of chromosome condensation (RCC1) Pfam Description: Regulator of chromosome condensation (RCC1)
  misc_feature (5)..(328): Homolog of NCBI NO: 11358913 NR Description: UVB-resistance protein UVR8 [imported] -
  misc_feature (5)..(328): Homolog of NCBI NO: 15237540 NR Description: UVB-resistance protein UVR8 (gb|AAD43920.1); id: At5g63860.1, supported by cDNA: gi_5478529 [Arabidopsis
  misc_feature (1)..(220): Homolog of NCBI NO: 21741206 NR Description: OSJNBb0086G13.1 [Oryza sativa (japonica
  misc_feature (15)..(317): Homolog of NCBI NO: 15237540 NR Description: UVB-resistance protein UVR8 (gb|AAD43920.1); id: At5g63860.1, supported by cDNA: gi_5478529 [Arabidopsis
  misc_feature (15)..(317): Homolog of NCBI NO: 11358913 NR Description: UVB-resistance protein UVR8 [imported] -
  misc_feature (18)..(326): Homolog of NCBI NO: 11358913 NR Description: UVB-resistance protein UVR8 [imported] -
  misc_feature (18)..(326): Homolog of NCBI NO: 15237540 NR Description: UVB-resistance protein UVR8 (gb|AAD43920.1); id: At5g63860.1, supported by cDNA: gi_5478529 [Arabidopsis
  misc_feature (18)..(317): Homolog of NCBI NO: 34852488 NR Description: similar to HECT domain and RCC1-like domain
  misc_feature (18)..(317): Homolog of NCBI NO: 37620181 NR Description: DKFZP564G092 protein [Homo sapiens]
  misc_feature (16)..(288): Homolog of NCBI NO: 24643485 NR Description: CG11734-PB [Drosophila melanogaster]
MDSVMAAPDSPPQTVVLVSAGASHSVALLTGNVLCSWGRGEDGQLGHGDAEDRLVPTVLSGFDAPAITSVICGADHTTAYSEDELQVYSWGWGDFGRLGHGNSSDVFTPQPVKALQGLKIKQIACGDSHCLAVTMAGEVQSWGRNQNGQLGLGTTEDSLLPQKIQAFESVCVKMIAAGAEHTAAVTEDGDLYGWGWGRYGNLGLGDRNDRLLPEKVSSVEGEKMVLVACGWRHTITVSDSGNLYTYGWSKYGQLGHGDFEDHLVPHKVEALKDSTISQISGGWRHTMALTSEGKLYGWGWNKFGQVGVGNNDDHSSPGQVSFPGSENLPGCMRMEAHSGPLREEKCLLLGEGH

SEQ ID NO: 11993 - protein, 349 aa, Zea mays subsp. mays
  peptide (1)..(349): Ceres Seq. ID no. 12413531
  misc_feature (184)..(233): Pfam Name: Regulator of chromosome condensation (RCC1) Pfam Description: Regulator of chromosome condensation (RCC1)
  misc_feature (1)..(324): Homolog of NCBI NO: 11358913 NR Description: UVB-resistance protein UVR8 [imported] -
  misc_feature (1)..(324): Homolog of NCBI NO: 15237540 NR Description: UVB-resistance protein UVR8 (gb|AAD43920.1); id: At5g63860.1, supported by cDNA: gi_5478529 [Arabidopsis
  misc_feature (1)..(216): Homolog of NCBI NO: 21741206 NR Description: OSJNBb0086G13.1 [Oryza sativa (japonica
  misc_feature (11)..(313): Homolog of NCBI NO: 15237540 NR Description: UVB-resistance protein UVR8 (gb|AAD43920.1); id: At5g63860.1, supported by cDNA: gi_5478529 [Arabidopsis
  misc_feature (11)..(313): Homolog of NCBI NO: 11358913 NR Description: UVB-resistance protein UVR8 [imported] -
  misc_feature (14)..(322): Homolog of NCBI NO: 11358913 NR Description: UVB-resistance protein UVR8 [imported] -
  misc_feature (14)..(322): Homolog of NCBI NO: 15237540 NR Description: UVB-resistance protein UVR8 (gb|AAD43920.1); id: At5g63860.1, supported by cDNA: gi_5478529 [Arabidopsis
  misc_feature (14)..(313): Homolog of NCBI NO: 34852488 NR Description: similar to HECT domain and RCC1-like domain
  misc_feature (14)..(313): Homolog of NCBI NO: 37620181 NR Description: DKFZP564G092 protein [Homo sapiens]
  misc_feature (12)..(284): Homolog of NCBI NO: 24643485 NR Description: CG11734-PB [Drosophila melanogaster]
MAAPDSPPQTVVLVSAGASHSVALLTGNVLCSWGRGEDGQLGHGDAEDRLVPTVLSGFDAPAITSVICGADHTTAYSEDELQVYSWGWGDFGRLGHGNSSDVFTPQPVKALQGLKIKQIACGDSHCLAVTMAGEVQSWGRNQNGQLGLGTTEDSLLPQKIQAFESVCVKMIAAGAEHTAAVTEDGDLYGWGWGRYGNLGLGDRNDRLLPEKVSSVEGEKMVLVACGWRHTITVSDSGNLYTYGWSKYGQLGHGDFEDHLVPHKVEALKDSTISQISGGWRHTMALTSEGKLYGWGWNKFGQVGVGNNDDHSSPGQVSFPGSENLPGCMRMEAHSGPLREEKCLLLGEGH

SEQ ID NO: 11994 - protein, 219 aa, Zea mays subsp. mays
  peptide (1)..(219): Ceres Seq. ID no. 12413532
  misc_feature (54)..(103): Pfam Name: Regulator of chromosome condensation (RCC1) Pfam Description: Regulator of chromosome condensation (RCC1)
  misc_feature (1)..(194): Homolog of NCBI NO: 11358913 NR Description: UVB-resistance protein UVR8 [imported] -
  misc_feature (1)..(194): Homolog of NCBI NO: 15237540 NR Description: UVB-resistance protein UVR8 (gb|AAD43920.1); id: At5g63860.1, supported by cDNA: gi_5478529 [Arabidopsis
  misc_feature (1)..(86): Homolog of NCBI NO: 21741206 NR Description: OSJNBb0086G13.1 [Oryza sativa (japonica
  misc_feature (1)..(183): Homolog of NCBI NO: 15237540 NR Description: UVB-resistance protein UVR8 (gb|AAD43920.1); id: At5g63860.1, supported by cDNA: gi_5478529 [Arabidopsis
  misc_feature (1)..(183): Homolog of NCBI NO: 11358913 NR Description: UVB-resistance protein UVR8 [imported] -
  misc_feature (1)..(192): Homolog of NCBI NO: 11358913 NR Description: UVB-resistance protein UVR8 [imported] -
  misc_feature (1)..(192): Homolog of NCBI NO: 15237540 NR Description: UVB-resistance protein UVR8 (gb|AAD43920.1); id: At5g63860.1, supported by cDNA: gi_5478529 [Arabidopsis
  misc_feature (1)..(183): Homolog of NCBI NO: 34852488 NR Description: similar to HECT domain and RCC1-like domain
  misc_feature (1)..(183): Homolog of NCBI NO: 37620181 NR Description: DKFZP564G092 protein [Homo sapiens]
  misc_feature (1)..(154): Homolog of NCBI NO: 24643485 NR Description: CG11734-PB [Drosophila melanogaster]
MAGEVQSWGRNQNGQLGLGTTEDSLLPQKIQAFESVCVKMIAAGAEHTAAVTEDGDLYGWGWGRYGNLGLGDRNDRLLPEKVSSVEGEKMVLVACGWRHTITVSDSGNLYTYGWSKYGQLGHGDFEDHLVPHKVEALKDSTISQISGGWRHTMALTSEGKLYGWGWNKFGQVGVGNNDDHSSPGQVSFPGSENLPGCMRMEAHSGPLREEKCLLLGEGH

SEQ ID NO: 11995 - DNA, 1859 bp, Zea mays subsp. mays
  misc_feature (1)..(1859): Ceres Seq. ID no. 12343907
  misc_feature: MA Experiment ID: 108536 Result: Up-regulated in Transcription
  misc_feature: MA Experiment 108536 PARAMETER Experiment Name: Zm_Meristem_P Parameter: Age (day) Value: 8
  misc_feature: MA Experiment 108536 PARAMETER Experiment Name: Zm_Meristem_P Parameter: Organism Value: Zea mays
  misc_feature: MA Experiment 108536 PARAMETER Experiment Name: Zm_Meristem_P Parameter: Plant Line Value: 35A19
  misc_feature: MA Experiment 108536 PARAMETER Experiment Name: Zm_Meristem_P Parameter: Tissue Value: Shoot Meristem vs. Above Shoot Meristem
  misc_feature: MA Experiment ID: 108543 Result: Up-regulated in Transcription
  misc_feature: MA Experiment ID: 108546 Result: Down-regulated in Transcription
  misc_feature: MA Experiment 108546 PARAMETER Experiment Name: Zm_Imbibed_Seeds_P Parameter: Age (day) Value: 3 vs. 2
  misc_feature: MA Experiment 108546 PARAMETER Experiment Name: Zm_Imbibed_Seeds_P Parameter: Organism Value: Zea mays
  misc_feature: MA Experiment 108546 PARAMETER Experiment Name: Zm_Imbibed_Seeds_P Parameter: Plant Line Value: 35A19
  misc_feature: MA Experiment 108546 PARAMETER Experiment Name: Zm_Imbibed_Seeds_P Parameter: Tissue Value: Roots vs. Embryo
  misc_feature: MA Experiment ID: 20000477 Result: Down-regulated in Transcription
  misc_feature: MA Experiment 20000477 PARAMETER Experiment Name: Zm_5mM_SA_P Parameter: Age (day) Value: 10
  misc_feature: MA Experiment 20000477 PARAMETER Experiment Name: Zm_5mM_SA_P Parameter: Organism Value: Zea mays
  misc_feature: MA Experiment 20000477 PARAMETER Experiment Name: Zm_5mM_SA_P Parameter: Plant Line Value: 35A19
  misc_feature: MA Experiment 20000477 PARAMETER Experiment Name: Zm_5mM_SA_P Parameter: Timepoint (hr) Value: 48
  misc_feature: MA Experiment 20000477 PARAMETER Experiment Name: Zm_5mM_SA_P Parameter: Tissue Value: Aerial
  misc_feature: MA Experiment 20000477 PARAMETER Experiment Name: Zm_5mM_SA_P Parameter: Treatment Value: 5mM SA vs. No Treatment
  misc_feature: MA Experiment ID: 20000492 Result: Down-regulated in Transcription
  misc_feature: MA Experiment 20000492 PARAMETER Experiment Name: Zm_Hybrid_Seed_Dev_P Parameter: DAP Value: 12
  misc_feature: MA Experiment 20000492 PARAMETER Experiment Name: Zm_Hybrid_Seed_Dev_P Parameter: Organism Value: Zea mays
  misc_feature: MA Experiment 20000492 PARAMETER Experiment Name: Zm_Hybrid_Seed_Dev_P Parameter: Plant Line Value: 35A19
  misc_feature: MA Experiment 20000492 PARAMETER Experiment Name: Zm_Hybrid_Seed_Dev_P Parameter: Tissue Value: Fert Kernel vs. Unfert Floret
  misc_feature: MA Experiment ID: 20000632 Result: Down-regulated in Transcription
  misc_feature: MA Experiment 20000632 PARAMETER Experiment Name: Zm_Herbicide-Treatments_P Parameter: Timepoint (hr) Value: 4
  misc_feature: MA Experiment 20000632 PARAMETER Experiment Name: Zm_Herbicide-Treatments_P Parameter: Tissue Value: Aerial
  misc_feature: MA Experiment 20000632 PARAMETER Experiment Name: Zm_Herbicide-Treatments_P Parameter: Treatment Value: Glean vs. No Treatment
acacaccccatgccttgcctcctcctcctgcctgcctgcctgcctttccctcgccgctcgcggcaagatccacatgcagtagtaggagtaggagcagcaagcaacaagggagggagggagcgaggtcttgggctctcgctctcttgttagttcctgcgtgcttgccctgccctggatcggctttcaaatcgggaacaacgacagatccgaggctttctcgaatcgggcaggtccatcaaatcgcaagtttagccagccccagccccagccccaggcacagccagctagccgtcaaatcactcacactcatcaaatcaaaggggaccaaaaggatatctcctggctcctgcccctctcccctctcctctcctagcgagctactcgtataaaattcccctttcgactctccccccacccacatacctgactctcctccgatctctcagcacgctcctcttctgctaccttgctttccctgctgcgatccgttccttgctctattagtattagctagccggccggccggatcgatcgagcaaggagaggcgccccagcagtcctcgtcggatcgatccatctcgtcgacagcgtcagcgcctcaggtggatcggagcggaggtggtggaccggagctagtagctgccagccacacatttcggtcgtcggaaccacatatcatgatgtcgtcctcgtcctcgtcctcgtcgtcggccgcctgctgcttcccgctggaccacctcgcgccgtcccccaccgagcagctctgctacgtgcactgcaactgctgcgacaccatcctcgccgtcggcgtgccctgcagcagcctgttcaagacggtgacggtgcgctgcggccactgcgccaacctactctccgtnaacctccgcggcctcctgctcccgcccgccgcgccggcgccgcccaaccatctcaacttcgctcactccttgctgtcacccacatccccgcatggcctcttggacgagttggctctccagcaggcgccgagcttcctgatggagcaggcgagtgccaacctgagcagcaccatgacgggccgcagcagcaacagcagctgcgccagcaacctgccgccgccggcgccgatgcctgcagctcagcctgtgcagcaggaagccgaactgcccaagaccgccccgtcggtaaacaggcctccggagaagcggcagagagtcccgtcggcatacaaccggttcatcaaggacgagatccagcgcatcaaggccggcaacccggacatcacccaccgggaggcgttcagcgcagccgcaaagaattgggcccatttcccacacatccacttcggcctcatgccggaccagggcctcaagaagaccttcaagactcatcaggatggcgctgaagacatgctactcaaagacgatctctacgccgcagcggctgcagctgcagcagccaacatgggcatcactccattctaataactctggttaggcatgtgttctgaatcagctggcacgtcgtagtggctatcgccctttgtgctgcattctagggtttcgtctcagatcttgatctcaacatcgatcgtgtgtcgtttaattagagtactttccagtgtggggatagaaatggagaataatcaagttagagcgcgcatcaagtaggccactgatgatccgtaggtacagacttgattgtctcctctatatatcccttttcatttcatgttctctctctttttcctattttttgttcctggaccccttcaactcgccagtagagagctcgttgtgcctctccaatcccatgtttgcgtatgtctgctcaacaacatgtttttaccatggagaacaagttgaacatctgttagatct

SEQ ID NO: 11996 - protein, 261 aa, Zea mays subsp. mays
  peptide (1)..(261): Ceres Seq. ID no. 12343908
  misc_feature (19)..(218): Pfam Name: YABBY protein Pfam Description: YABBY protein
  misc_feature (15)..(261): Homolog of NCBI NO: 32330677 NR Description: yabby15 protein [Zea mays]
  misc_feature (10)..(261): Homolog of NCBI NO: 38605890 NR Description: OSJNBb0020O11.2 [Oryza sativa (japonica
  misc_feature (23)..(261): Homolog of NCBI NO: 32330675 NR Description: yabby14 protein [Zea mays]
  misc_feature (75)..(261): Homolog of NCBI NO: 32330681 NR Description: yabby10 protein [Zea mays]
  misc_feature (17)..(80): Homolog of NCBI NO: 32330681 NR Description: yabby10 protein [Zea mays]
  misc_feature (138)..(261): Homolog of NCBI NO: 27804377 NR Description: MADS-box transcription factor CDM51
  misc_feature (7)..(120): Homolog of NCBI NO: 27804377 NR Description: MADS-box transcription factor CDM51
  misc_feature (2)..(255): Homolog of NCBI NO: 18411242 NR Description: putative YABBY3 axial regulator; protein id: supported by cDNA: gi_14335013, supported by cDNA: gi_4928752 thaliana] >gi|4928753|gb|AAD33717.1|AF136540_1 YABBY3
  misc_feature (75)..(261): Homolog of NCBI NO: 37535908 NR Description: hypothetical protein [Oryza sativa (japonica group)] >gi|22267600|gb|AAM94935.1| putative transcription factor
  misc_feature (162)..(232): Homolog of NCBI NO: 7486543 NR Description: hypothetical protein F6N15.22 - Arabidopsis >gi|3193331|gb|AAC19313.1| F6N15.22 gene product [Arabidopsis >gi|7267105|emb|CAB80776.1| putative YABBY3 axial regulator
  misc_feature (67)..(67): Xaa is any aa, unknown or other
MMSSSSSSSSSAACCFPLDHLAPSPTEQLCYVHCNCCDTILAVGVPCSSLFKTVTVRCGHCANLLSXNLRGLLLPPAAPAPPNHLNFAHSLLSPTSPHGLLDELALQQAPSFLMEQASANLSSTMTGRSSNSSCASNLPPPAPMPAAQPVQQEAELPKTAPSVNRPPEKRQRVPSAYNRFIKDEIQRIKAGNPDITHREAFSAAAKNWAHFPHIHFGLMPDQGLKKTFKTHQDGAEDMLLKDDLYAAAAAAAAANMGITPF

SEQ ID NO: 11997 - protein, 260 aa, Zea mays subsp. mays
  peptide (1)..(260): Ceres Seq. ID no. 12343909
  misc_feature (18)..(217): Pfam Name: YABBY protein Pfam Description: YABBY protein
  misc_feature (137)..(260): Homolog of NCBI NO: 27804377 NR Description: MADS-box transcription factor CDM51
  misc_feature (6)..(119): Homolog of NCBI NO: 27804377 NR Description: MADS-box transcription factor CDM51
  misc_feature (1)..(254): Homolog of NCBI NO: 18411242 NR Description: putative YABBY3 axial regulator; protein id: supported by cDNA: gi_14335013, supported by cDNA: gi_4928752 thaliana] >gi|4928753|gb|AAD33717.1|AF136540_1 YABBY3
  misc_feature (9)..(260): Homolog of NCBI NO: 38605890 NR Description: OSJNBb0020O11.2 [Oryza sativa (japonica
  misc_feature (74)..(260): Homolog of NCBI NO: 32330681 NR Description: yabby10 protein [Zea mays]
  misc_feature (16)..(79): Homolog of NCBI NO: 32330681 NR Description: yabby10 protein [Zea mays]
  misc_feature (22)..(260): Homolog of NCBI NO: 32330675 NR Description: yabby14 protein [Zea mays]
  misc_feature (14)..(260): Homolog of NCBI NO: 32330677 NR Description: yabby15 protein [Zea mays]
  misc_feature (74)..(260): Homolog of NCBI NO: 37535908 NR Description: hypothetical protein [Oryza sativa (japonica group)] >gi|22267600|gb|AAM94935.1| putative transcription factor
  misc_feature (161)..(231): Homolog of NCBI NO: 7486543 NR Description: hypothetical protein F6N15.22 - Arabidopsis >gi|3193331|gb|AAC19313.1| F6N15.22 gene product [Arabidopsis >gi|7267105|emb|CAB80776.1| putative YABBY3 axial regulator
  misc_feature (66)..(66): Xaa is any aa, unknown or other
MSSSSSSSSSAACCFPLDHLAPSPTEQLCYVHCNCCDTILAVGVPCSSLFKTVTVRCGHCANLLSXNLRGLLLPPAAPAPPNHLNFAHSLLSPTSPHGLLDELALQQAPSFLMEQASANLSSTMTGRSSNSSCASNLPPPAPMPAAQPVQQEAELPKTAPSVNRPPEKRQRVPSAYNRFIKDEIQRIKAGNPDITHREAFSAAAKNWAHFPHIHFGLMPDQGLKKTFKTHQDGAEDMLLKDDLYAAAAAAAAANMGITPF

SEQ ID NO: 11998 - protein, 148 aa, Zea mays subsp. mays
  peptide (1)..(148): Ceres Seq. ID no. 12343910
  misc_feature (1)..(105): Pfam Name: YABBY protein Pfam Description: YABBY protein
  misc_feature (1)..(148): Homolog of NCBI NO: 32330677 NR Description: yabby15 protein [Zea mays]
  misc_feature (1)..(148): Homolog of NCBI NO: 38605890 NR Description: OSJNBb0020O11.2 [Oryza sativa (japonica
  misc_feature (1)..(148): Homolog of NCBI NO: 32330675 NR Description: yabby14 protein [Zea mays]
  misc_feature (1)..(148): Homolog of NCBI NO: 32330681 NR Description: yabby10 protein [Zea mays]
  misc_feature (25)..(148): Homolog of NCBI NO: 27804377 NR Description: MADS-box transcription factor CDM51
  misc_feature (1)..(142): Homolog of NCBI NO: 18411242 NR Description: putative YABBY3 axial regulator; protein id: supported by cDNA: gi_14335013, supported by cDNA: gi_4928752 thaliana] >gi|4928753|gb|AAD33717.1|AF136540_1 YABBY3
  misc_feature (1)..(148): Homolog of NCBI NO: 37535908 NR Description: hypothetical protein [Oryza sativa (japonica group)] >gi|22267600|gb|AAM94935.1| putative transcription factor
  misc_feature (49)..(119): Homolog of NCBI NO: 7486543 NR Description: hypothetical protein F6N15.22 - Arabidopsis >gi|3193331|gb|AAC19313.1| F6N15.22 gene product [Arabidopsis >gi|7267105|emb|CAB80776.1| putative YABBY3 axial regulator
  misc_feature (1)..(148): Homolog of NCBI NO: 32330679 NR Description: yabby9 protein [Zea mays]
  misc_feature (1)..(148): Homolog of NCBI NO: 37551421 NR Description: FIL-like protein [Triticum aestivum]
MEQASANLSSTMTGRSSNSSCASNLPPPAPMPAAQPVQQEAELPKTAPSVNRPPEKRQRVPSAYNRFIKDEIQRIKAGNPDITHREAFSAAAKNWAHFPHIHFGLMPDQGLKKTFKTHQDGAEDMLLKDDLYAAAAAAAAANMGITPF

SEQ ID NO: 11999 - DNA, 1312 bp, Zea mays subsp. mays
  misc_feature (1)..(1312): Ceres Seq. ID no. 12374092
  misc_feature: MA Experiment ID: 108528 Result: Up-regulated in Transcription
  misc_feature: MA Experiment 108528 PARAMETER Experiment Name: Zm_Imbibed_Seeds_P Parameter: Age (day) Value: 5 vs. 2
  misc_feature: MA Experiment 108528 PARAMETER Experiment Name: Zm_Imbibed_Seeds_P Parameter: Organism Value: Zea mays
  misc_feature: MA Experiment 108528 PARAMETER Experiment Name: Zm_Imbibed_Seeds_P Parameter: Plant Line Value: 35A19
  misc_feature: MA Experiment 108528 PARAMETER Experiment Name: Zm_Imbibed_Seeds_P Parameter: Tissue Value: Aerial vs. Embryo
  misc_feature: MA Experiment ID: 108530 Result: Up-regulated in Transcription
  misc_feature: MA Experiment 108530 PARAMETER Experiment Name: Zm_Imbibed_Seeds_P Parameter: Age (day) Value: 6 vs. 2
  misc_feature: MA Experiment 108530 PARAMETER Experiment Name: Zm_Imbibed_Seeds_P Parameter: Organism Value: Zea mays
  misc_feature: MA Experiment 108530 PARAMETER Experiment Name: Zm_Imbibed_Seeds_P Parameter: Plant Line Value: 35A19
  misc_feature: MA Experiment 108530 PARAMETER Experiment Name: Zm_Imbibed_Seeds_P Parameter: Tissue Value: Aerial vs. Embryo
  misc_feature: MA Experiment ID: 108547 Result: Up-regulated in Transcription
  misc_feature: MA Experiment 108547 PARAMETER Experiment Name: Zm_Imbibed_Seeds_P Parameter: Age (day) Value: 4 vs. 2
  misc_feature: MA Experiment 108547 PARAMETER Experiment Name: Zm_Imbibed_Seeds_P Parameter: Organism Value: Zea mays
  misc_feature: MA Experiment 108547 PARAMETER Experiment Name: Zm_Imbibed_Seeds_P Parameter: Plant Line Value: 35A19
  misc_feature: MA Experiment 108547 PARAMETER Experiment Name: Zm_Imbibed_Seeds_P Parameter: Tissue Value: Aerial vs. Embryo
gactctcgagagatagagcgaggcaccaagaaggggaaaaagagggacaggaaaaaaaaatcattctcgtttcgcgctgtccgctagaccccgcccgaatcaatggagattagggctccgccgacgagcctgaggctcgcgccgccgcccgcctccgccagcttccgccgaaccccgcttaggacctccttccttcgcggcagcgtgtcacttaaagttgtgcaagtacggcagtcaaatgtcaacagatttaagtgcaatagcatacgaagtaacctctttgataggctaacaagggttgtcaggtcctacgcaaatgcagttctaagttcgtttgaagaccctgagaagattctagaccaggcagttctggagatgaatgatgacttgacaaagatgcggcaggccactgcacaggtcttggcatctcaaaagcggcttgagaataaatctaaagctgcagaacaagcttctgctgattggtatcggagggctcaacttgctcttcaaaagggtgacgaggatcttgctcgtgaagcccttaagcggcgtaaatcatatgctgacaatgcaagctccttaagatcccagcttgatcagcagaagggtgtagttgaaaatctgatttcaaatacccggcttcttgagagcaagatatcagaggccaagcagaaaaaggataccctaaaagctcgtgctcaatcagcaaagactgctacaaaagtgagtgaaatgttgggcaacgtgaatacaagtagcgccctttctgcatttgagaaaatggaggaaaaagttatggcgatggaatcccaagcagaggcactcggccagttagcaactgatgatttagaaggaaagtttgcactgcttgagacttcatctgttgatgatgatctttcacaactgaaaaaggaattgtctggaagctctttgaaaggagagcttcctccaggcagaacagcggtcagcaactcaggtgctgggcgccctttccccgacctagagattgaaagcgagctaaacgagctgcggaggaaagccaaggaatattaggctcattccttgtcgattcagcaggcctgacggaatctcacttccaagaaaatatagtgcagctgcagattgctccattgcgcgtttcgaaagttgaaacacaagtgcgcattgactgtttgttaaagagtatggaatcggctaatttctcggcattttcccccctcgagtgacatttgtacagctatccataaaattgttgtaaatcactactctctctacagcctttttttgcatatatatatatagtcaaagttcg

SEQ ID NO: 12000 - protein, 316 aa, Zea mays subsp. mays
  peptide (1)..(316): Ceres Seq. ID no. 12374093
  misc_feature (58)..(274): Pfam Name: PspA/IM30 family Pfam Description: PspA/IM30 family
  misc_feature (1)..(316): Homolog of NCBI NO: 34907594 NR Description: putative chloroplast membrane-associated 30 kD
  misc_feature (8)..(315): Homolog of NCBI NO: 729842 NR Description: Membrane-associated 30 kDa protein, chloroplast
  misc_feature (20)..(316): Homolog of NCBI NO: 18408237 NR Description: expressed protein; protein id: At1g65260.1, by cDNA: 32284., supported by cDNA: gi_15027976 [Arabidopsis
  misc_feature (60)..(311): Homolog of NCBI NO: 33866411 NR Description: similar to chloroplast membrane-associated 30 kD [Synechococcus sp. WH 8102] >gi|33633189|emb|CAE08394.1| similar
  misc_feature (60)..(311): Homolog of NCBI NO: 33863628 NR Description: similar to chloroplast membrane-associated 30 kD [Prochlorococcus marinus str. MIT 9313]
  misc_feature (59)..(312): Homolog of NCBI NO: 23126177 NR Description: hypothetical protein [Nostoc punctiforme]
  misc_feature (59)..(312): Homolog of NCBI NO: 17229834 NR Description: similar to chloroplast membrane-associated 30 kD [Nostoc sp. PCC 7120] >gi|25315831|pir||AG2098 hypothetical
  misc_feature (59)..(312): Homolog of NCBI NO: 16331547 NR Description: chloroplast membrane-associated 30 kD protein sp. PCC 6803] >gi|3123076|sp|Q55707|Y617_SYNY3 Hypothetical
  misc_feature (59)..(309): Homolog of NCBI NO: 23040390 NR Description: hypothetical protein [Trichodesmium erythraeum
  misc_feature (59)..(272): Homolog of NCBI NO: 23126176 NR Description: hypothetical protein [Nostoc punctiforme]
MEIRAPPTSLRLAPPPASASFRRTPLRTSFLRGSVSLKVVQVRQSNVNRFKCNSIRSNLFDRLTRVVRSYANAVLSSFEDPEKILDQAVLEMNDDLTKMRQATAQVLASQKRLENKSKAAEQASADWYRRAQLALQKGDEDLAREALKRRKSYADNASSLRSQLDQQKGVVENLISNTRLLESKISEAKQKKDTLKARAQSAKTATKVSEMLGNVNTSSALSAFEKMEEKVMAMESQAEALGQLATDDLEGKFALLETSSVDDDLSQLKKELSGSSLKGELPPGRTAVSNSGAGRPFPDLEIESELNELRRKAKEY

SEQ ID NO: 12001 - protein, 225 aa, Zea mays subsp. mays
  peptide (1)..(225): Ceres Seq. ID no. 12374094
  misc_feature (1)..(183): Pfam Name: PspA/IM30 family Pfam Description: PspA/IM30 family
  misc_feature (1)..(225): Homolog of NCBI NO: 34907594 NR Description: putative chloroplast membrane-associated 30 kD
  misc_feature (1)..(224): Homolog of NCBI NO: 729842 NR Description: Membrane-associated 30 kDa protein, chloroplast
  misc_feature (1)..(225): Homolog of NCBI NO: 18408237 NR Description: expressed protein; protein id: At1g65260.1, by cDNA: 32284., supported by cDNA: gi_15027976 [Arabidopsis
  misc_feature (1)..(220): Homolog of NCBI NO: 33866411 NR Description: similar to chloroplast membrane-associated 30 kD [Synechococcus sp. WH 8102] >gi|33633189|emb|CAE08394.1| similar
  misc_feature (1)..(220): Homolog of NCBI NO: 33863628 NR Description: similar to chloroplast membrane-associated 30 kD [Prochlorococcus marinus str. MIT 9313]
  misc_feature (1)..(221): Homolog of NCBI NO: 23126177 NR Description: hypothetical protein [Nostoc punctiforme]
  misc_feature (1)..(221): Homolog of NCBI NO: 17229834 NR Description: similar to chloroplast membrane-associated 30 kD [Nostoc sp. PCC 7120] >gi|25315831|pir||AG2098 hypothetical
  misc_feature (1)..(221): Homolog of NCBI NO: 16331547 NR Description: chloroplast membrane-associated 30 kD protein sp. PCC 6803] >gi|3123076|sp|Q55707|Y617_SYNY3 Hypothetical
  misc_feature (1)..(218): Homolog of NCBI NO: 23040390 NR Description: hypothetical protein [Trichodesmium erythraeum
  misc_feature (1)..(181): Homolog of NCBI NO: 23126176 NR Description: hypothetical protein [Nostoc punctiforme]
MNDDLTKMRQATAQVLASQKRLENKSKAAEQASADWYRRAQLALQKGDEDLAREALKRRKSYADNASSLRSQLDQQKGVVENLISNTRLLESKISEAKQKKDTLKARAQSAKTATKVSEMLGNVNTSSALSAFEKMEEKVMAMESQAEALGQLATDDLEGKFALLETSSVDDDLSQLKKELSGSSLKGELPPGRTAVSNSGAGRPFPDLEIESELNELRRKAKEY

SEQ ID NO: 12002 - protein, 218 aa, Zea mays subsp. mays
  peptide (1)..(218): Ceres Seq. ID no. 12374095
  misc_feature (1)..(176): Pfam Name: PspA/IM30 family Pfam Description: PspA/IM30 family
  misc_feature (1)..(218): Homolog of NCBI NO: 34907594 NR Description: putative chloroplast membrane-associated 30 kD
  misc_feature (1)..(217): Homolog of NCBI NO: 729842 NR Description: Membrane-associated 30 kDa protein, chloroplast
  misc_feature (1)..(218): Homolog of NCBI NO: 18408237 NR Description: expressed protein; protein id: At1g65260.1, by cDNA: 32284., supported by cDNA: gi_15027976 [Arabidopsis
  misc_feature (1)..(213): Homolog of NCBI NO: 33866411 NR Description: similar to chloroplast membrane-associated 30 kD [Synechococcus sp. WH 8102] >gi|33633189|emb|CAE08394.1| similar
  misc_feature (1)..(213): Homolog of NCBI NO: 33863628 NR Description: similar to chloroplast membrane-associated 30 kD [Prochlorococcus marinus str. MIT 9313]
  misc_feature (1)..(214): Homolog of NCBI NO: 23126177 NR Description: hypothetical protein [Nostoc punctiforme]
  misc_feature (1)..(214): Homolog of NCBI NO: 17229834 NR Description: similar to chloroplast membrane-associated 30 kD [Nostoc sp. PCC 7120] >gi|25315831|pir||AG2098 hypothetical
  misc_feature (1)..(214): Homolog of NCBI NO: 16331547 NR Description: chloroplast membrane-associated 30 kD protein sp. PCC 6803] >gi|3123076|sp|Q55707|Y617_SYNY3 Hypothetical
  misc_feature (1)..(211): Homolog of NCBI NO: 23040390 NR Description: hypothetical protein [Trichodesmium erythraeum
  misc_feature (1)..(174): Homolog of NCBI NO: 23126176 NR Description: hypothetical protein [Nostoc punctiforme]
MRQATAQVLASQKRLENKSKAAEQASADWYRRAQLALQKGDEDLAREALKRRKSYADNASSLRSQLDQQKGVVENLISNTRLLESKISEAKQKKDTLKARAQSAKTATKVSEMLGNVNTSSALSAFEKMEEKVMAMESQAEALGQLATDDLEGKFALLETSSVDDDLSQLKKELSGSSLKGELPPGRTAVSNSGAGRPFPDLEIESELNELRRKAKEY

SEQ ID NO: 12003 - DNA, 1005 bp, Zea mays subsp. mays
  misc_feature (1)..(1005): Ceres Seq. ID no. 12365007
  misc_feature: MA Experiment ID: 108529 Result: Down-regulated in Transcription
  misc_feature: MA Experiment 108529 PARAMETER Experiment Name: Zm_Imbibed_Seeds_P Parameter: Age (day) Value: 5 vs. 2
  misc_feature: MA Experiment 108529 PARAMETER Experiment Name: Zm_Imbibed_Seeds_P Parameter: Organism Value: Zea mays
  misc_feature: MA Experiment 108529 PARAMETER Experiment Name: Zm_Imbibed_Seeds_P Parameter: Plant Line Value: 35A19
  misc_feature: MA Experiment 108529 PARAMETER Experiment Name: Zm_Imbibed_Seeds_P Parameter: Tissue Value: Roots vs. Embryo
  misc_feature: MA Experiment ID: 108536 Result: Up-regulated in Transcription
  misc_feature: MA Experiment 108536 PARAMETER Experiment Name: Zm_Meristem_P Parameter: Age (day) Value: 8
  misc_feature: MA Experiment 108536 PARAMETER Experiment Name: Zm_Meristem_P Parameter: Organism Value: Zea mays
  misc_feature: MA Experiment 108536 PARAMETER Experiment Name: Zm_Meristem_P Parameter: Plant Line Value: 35A19
  misc_feature: MA Experiment 108536 PARAMETER Experiment Name: Zm_Meristem_P Parameter: Tissue Value: Shoot Meristem vs. Above Shoot Meristem
  misc_feature: MA Experiment ID: 108543 Result: Up-regulated in Transcription
  misc_feature: MA Experiment ID: 108545 Result: Up-regulated in Transcription
  misc_feature: MA Experiment 108545 PARAMETER Experiment Name: Zm_Imbibed_Seeds_P Parameter: Age (day) Value: 3 vs. 2
  misc_feature: MA Experiment 108545 PARAMETER Experiment Name: Zm_Imbibed_Seeds_P Parameter: Organism Value: Zea mays
  misc_feature: MA Experiment 108545 PARAMETER Experiment Name: Zm_Imbibed_Seeds_P Parameter: Plant Line Value: 35A19
  misc_feature: MA Experiment 108545 PARAMETER Experiment Name: Zm_Imbibed_Seeds_P Parameter: Tissue Value: Aerial vs. Embryo
  misc_feature: MA Experiment ID: 20000535 Result: Down-regulated in Transcription
  misc_feature: MA Experiment 20000535 PARAMETER Experiment Name: Zm_Hybrid_Seed_Dev_P Parameter: DAP Value: 30 vs. 12
  misc_feature: MA Experiment 20000535 PARAMETER Experiment Name: Zm_Hybrid_Seed_Dev_P Parameter: Organism Value: Zea mays
  misc_feature: MA Experiment 20000535 PARAMETER Experiment Name: Zm_Hybrid_Seed_Dev_P Parameter: Plant Line Value: 35A19
  misc_feature: MA Experiment 20000535 PARAMETER Experiment Name: Zm_Hybrid_Seed_Dev_P Parameter: Tissue Value: Embryo vs. Unfert Floret
ggagagcatcaaagcaagccatgtggaggagggctttagcgatggtcctgttcatggctggcgccgcgctgctcgccggggctgccggcgccggcgcgcagcaggggcgtgtggagcatcatcacccggcccatgttccagagcatgctgagccaccgcggcgacagcgggtgccagggcgccttctacacctacgacgccttcatcgaggccgccagcaagttccccggcttcggcaccaccggcgacgagcagacgcgcaggcgggagctcgccgccttcttcggccagacgtcccacgaaaccaccggtggatgggcgactgctccggatggaccgtttgcctggggatactgccgggtgaaggaacagaaacagacggacccaccctactatggacgaggacccatacagctaactcataagtacaactacaggctcgccgggcaagcgctgaacctgaacctggtgggcgacccggacctggtggcgagagaccccgtggtagccttcaagacggccatctggttctggatgacgccgcagtcgcccaagccgtcgtgccacgccgtgatgaccggcgactggaggccctccgccaccgaccgcgccgcggggaggctccccggatacggcctgaccacgaacatcatcaacggcggcctagagtgcggcgaggaccgctccaccgacggcgccaaagccgccaaggaccgggtcggctactacaagaggtactgcggtatgctccgagtggggtacggggacaacatggcatgcaggaaccagaagccttacggaggatgatgacactagtagctgatctatggttgctgcaatgcaagccttcacgtgtgtttgcctctctacctaaagaataaatcaagctagcagcgaacctaccttcggcgtgtgtctacttgcttatcatagtgtgtgtctgtgtatgagagatgatgtactgtcacgtgtgtatgagagaggatatatggtaagactatcact

SEQ ID NO: 12004 - protein, 224 aa, Zea mays subsp. mays
  peptide (1)..(224): Ceres Seq. ID no. 12365008
  misc_feature (1)..(224): Homolog of NCBI NO: 7435348 NR Description: probable chitinase (EC 3.2.1.14) - rice
  misc_feature (1)..(223): Homolog of NCBI NO: 1705813 NR Description: BASIC ENDOCHITINASE PRECURSOR chitinase [Vitis vinifera] >gi|10880379|emb|CAC14014.1| chitinase
  misc_feature (1)..(223): Homolog of NCBI NO: 1781042 NR Description: chitinase [Medicago truncatula]
  misc_feature (1)..(223): Homolog of NCBI NO: 33414052 NR Description: class Ia chitinase [Galega orientalis]
  misc_feature (1)..(222): Homolog of NCBI NO: 7435357 NR Description: chitinase (EC 3.2.1.14) - cucurbit
  misc_feature (1)..(222): Homolog of NCBI NO: 2506281 NR Description: 26 kDa endochitinase 1 precursor
  misc_feature (1)..(222): Homolog of NCBI NO: 11344587 NR Description: seed chitinase-a [Secale cereale]
  misc_feature (1)..(223): Homolog of NCBI NO: 7435366 NR Description: chitinase (EC 3.2.1.14) class I - alfalfa class I chitinase [Medicago sativa] >gi|1800143|gb|AAB41325.1|
  misc_feature (1)..(223): Homolog of NCBI NO: 116321 NR Description: ENDOCHITINASE B PRECURSOR (CHN-B)
  misc_feature (1)..(223): Homolog of NCBI NO: 11558417 NR Description: endochitinase [Nicotiana sylvestris]
MFQSMLSHRGDSGCQGAFYTYDAFIEAASKFPGFGTTGDEQTRRRELAAFFGQTSHETTGGWATAPDGPFAWGYCRVKEQKQTDPPYYGRGPIQLTHKYNYRLAGQALNLNLVGDPDLVARDPVVAFKTAIWFWMTPQSPKPSCHAVMTGDWRPSATDRAAGRLPGYGLTTNIINGGLECGEDRSTDGAKAAKDRVGYYKRYCGMLRVGYGDNMACRNQKPYGG

SEQ ID NO: 12005 - protein, 220 aa, Zea mays subsp. mays
  peptide (1)..(220): Ceres Seq. ID no. 12365009
  misc_feature (1)..(220): Homolog of NCBI NO: 7435348 NR Description: probable chitinase (EC 3.2.1.14) - rice
  misc_feature (1)..(219): Homolog of NCBI NO: 1705813 NR Description: BASIC ENDOCHITINASE PRECURSOR chitinase [Vitis vinifera] >gi|10880379|emb|CAC14014.1| chitinase
  misc_feature (1)..(219): Homolog of NCBI NO: 1781042 NR Description: chitinase [Medicago truncatula]
  misc_feature (1)..(219): Homolog of NCBI NO: 33414052 NR Description: class Ia chitinase [Galega orientalis]
  misc_feature (1)..(218): Homolog of NCBI NO: 7435357 NR Description: chitinase (EC 3.2.1.14) - cucurbit
  misc_feature (1)..(218): Homolog of NCBI NO: 2506281 NR Description: 26 kDa endochitinase 1 precursor
  misc_feature (1)..(218): Homolog of NCBI NO: 11344587 NR Description: seed chitinase-a [Secale cereale]
  misc_feature (1)..(219): Homolog of NCBI NO: 7435366 NR Description: chitinase (EC 3.2.1.14) class I - alfalfa class I chitinase [Medicago sativa] >gi|1800143|gb|AAB41325.1|
  misc_feature (1)..(219): Homolog of NCBI NO: 116321 NR Description: ENDOCHITINASE B PRECURSOR (CHN-B)
  misc_feature (1)..(219): Homolog of NCBI NO: 11558417 NR Description: endochitinase [Nicotiana sylvestris]
MLSHRGDSGCQGAFYTYDAFIEAASKFPGFGTTGDEQTRRRELAAFFGQTSHETTGGWATAPDGPFAWGYCRVKEQKQTDPPYYGRGPIQLTHKYNYRLAGQALNLNLVGDPDLVARDPVVAFKTAIWFWMTPQSPKPSCHAVMTGDWRPSATDRAAGRLPGYGLTTNIINGGLECGEDRSTDGAKAAKDRVGYYKRYCGMLRVGYGDNMACRNQKPYGG

SEQ ID NO: 12006 - protein, 140 aa, Zea mays subsp. mays
  peptide (1)..(140): Ceres Seq. ID no. 12365010
RASKQAMWRRALAMVLFMAGAALLAGAAGAGAQQGRVEHHHPAHVPEHAEPPRRQRVPGRLLHLRRLHRGRQQVPRLRHHRRRADAQAGARRLLRPDVPRNHRWMGDCSGWTVCLGILPGEGTETDGPTLLWTRTHTANS

SEQ ID NO: 12007 - DNA, 744 bp, Zea mays subsp. mays
  misc_feature (1)..(744): Ceres Seq. ID no. 12341175
  misc_feature: MA Experiment ID: 108523 Result: Down-regulated in Transcription
  misc_feature: MA Experiment 108523 PARAMETER Experiment Name: Zm_42deg_Heat_P Parameter: Age (day) Value: 8
  misc_feature: MA Experiment 108523 PARAMETER Experiment Name: Zm_42deg_Heat_P Parameter: Organism Value: Zea mays
  misc_feature: MA Experiment 108523 PARAMETER Experiment Name: Zm_42deg_Heat_P Parameter: Plant Line Value: 35A19
  misc_feature: MA Experiment 108523 PARAMETER Experiment Name: Zm_42deg_Heat_P Parameter: Temperature (deg C) Value: 42 vs. 22
  misc_feature: MA Experiment 108523 PARAMETER Experiment Name: Zm_42deg_Heat_P Parameter: Timepoint (hr) Value: 6
  misc_feature: MA Experiment 108523 PARAMETER Experiment Name: Zm_42deg_Heat_P Parameter: Tissue Value: Aerial
  misc_feature: MA Experiment ID: 108527 Result: Down-regulated in Transcription
  misc_feature: MA Experiment 108527 PARAMETER Experiment Name: Zm_5mM_NO_P Parameter: Age (day) Value: 8
  misc_feature: MA Experiment 108527 PARAMETER Experiment Name: Zm_5mM_NO_P Parameter: Organism Value: Zea mays
  misc_feature: MA Experiment 108527 PARAMETER Experiment Name: Zm_5mM_NO_P Parameter: Plant Line Value: 35A19
  misc_feature: MA Experiment 108527 PARAMETER Experiment Name: Zm_5mM_NO_P Parameter: Timepoint (hr) Value: 6
  misc_feature: MA Experiment 108527 PARAMETER Experiment Name: Zm_5mM_NO_P Parameter: Tissue Value: Aerial
  misc_feature: MA Experiment 108527 PARAMETER Experiment Name: Zm_5mM_NO_P Parameter: Treatment Value: 5mM NO vs. No Treatment
  misc_feature: MA Experiment ID: 108528 Result: Up-regulated in Transcription
  misc_feature: MA Experiment 108528 PARAMETER Experiment Name: Zm_Imbibed_Seeds_P Parameter: Age (day) Value: 5 vs. 2
  misc_feature: MA Experiment 108528 PARAMETER Experiment Name: Zm_Imbibed_Seeds_P Parameter: Organism Value: Zea mays
  misc_feature: MA Experiment 108528 PARAMETER Experiment Name: Zm_Imbibed_Seeds_P Parameter: Plant Line Value: 35A19
  misc_feature: MA Experiment 108528 PARAMETER Experiment Name: Zm_Imbibed_Seeds_P Parameter: Tissue Value: Aerial vs. Embryo
  misc_feature: MA Experiment ID: 108530 Result: Up-regulated in Transcription
  misc_feature: MA Experiment 108530 PARAMETER Experiment Name: Zm_Imbibed_Seeds_P Parameter: Age (day) Value: 6 vs. 2
  misc_feature: MA Experiment 108530 PARAMETER Experiment Name: Zm_Imbibed_Seeds_P Parameter: Organism Value: Zea mays
  misc_feature: MA Experiment 108530 PARAMETER Experiment Name: Zm_Imbibed_Seeds_P Parameter: Plant Line Value: 35A19
  misc_feature: MA Experiment 108530 PARAMETER Experiment Name: Zm_Imbibed_Seeds_P Parameter: Tissue Value: Aerial vs. Embryo
  misc_feature: MA Experiment ID: 108544 Result: Up-regulated in Transcription
  misc_feature: MA Experiment ID: 108545 Result: Up-regulated in Transcription
  misc_feature: MA Experiment 108545 PARAMETER Experiment Name: Zm_Imbibed_Seeds_P Parameter: Age (day) Value: 3 vs. 2
  misc_feature: MA Experiment 108545 PARAMETER Experiment Name: Zm_Imbibed_Seeds_P Parameter: Organism Value: Zea mays
  misc_feature: MA Experiment 108545 PARAMETER Experiment Name: Zm_Imbibed_Seeds_P Parameter: Plant Line Value: 35A19
  misc_feature: MA Experiment 108545 PARAMETER Experiment Name: Zm_Imbibed_Seeds_P Parameter: Tissue Value: Aerial vs. Embryo
  misc_feature: MA Experiment ID: 108547 Result: Up-regulated in Transcription
  misc_feature: MA Experiment 108547 PARAMETER Experiment Name: Zm_Imbibed_Seeds_P Parameter: Age (day) Value: 4 vs. 2
  misc_feature: MA Experiment 108547 PARAMETER Experiment Name: Zm_Imbibed_Seeds_P Parameter: Organism Value: Zea mays
  misc_feature: MA Experiment 108547 PARAMETER Experiment Name: Zm_Imbibed_Seeds_P Parameter: Plant Line Value: 35A19
  misc_feature: MA Experiment 108547 PARAMETER Experiment Name: Zm_Imbibed_Seeds_P Parameter: Tissue Value: Aerial vs. Embryo
  misc_feature: MA Experiment ID: 108559 Result: Down-regulated in Transcription
  misc_feature: MA Experiment 108559 PARAMETER Experiment Name: Zm_5mM_NO_P Parameter: Age (day) Value: 8
  misc_feature: MA Experiment 108559 PARAMETER Experiment Name: Zm_5mM_NO_P Parameter: Organism Value: Zea mays
  misc_feature: MA Experiment 108559 PARAMETER Experiment Name: Zm_5mM_NO_P Parameter: Plant Line Value: 35A19
  misc_feature: MA Experiment 108559 PARAMETER Experiment Name: Zm_5mM_NO_P Parameter: Timepoint (hr) Value: 12
  misc_feature: MA Experiment 108559 PARAMETER Experiment Name: Zm_5mM_NO_P Parameter: Tissue Value: Aerial
  misc_feature: MA Experiment 108559 PARAMETER Experiment Name: Zm_5mM_NO_P Parameter: Treatment Value: 5mM NO vs. No Treatment
  misc_feature: MA Experiment ID: 108687 Result: Down-regulated in Transcription
  misc_feature: MA Experiment 108687 PARAMETER Experiment Name: Zm_Embryos-Flowers__P Parameter: Tissue Value: Embryo vs. Aerial+
  misc_feature: MA Experiment ID: 108688 Result: Down-regulated in Transcription
  misc_feature: MA Experiment 108688 PARAMETER Experiment Name: Zm_Embryos-Flowers__P Parameter: Tissue Value: Immature Flowers vs. Aerial+
accattcagtcatgcccctcgctgcgcagatcctctctgttccggcgtgctctgctaggcaggaagagatctttcatttctgccagcagttctgaggatgccgaatccggcactcccccgccgcttggtggcgacaaacaccagcaggaggttcttgcacagatcgccatgcttcagacgcagaaggtgcgcatcacagacttcttggacgagcgctctgcttacctgaccaagttcgccaaggacgccgactcggagttcgacctgattgggcagaacgccatgaaagaacttgatgccgttggtgaccagatactggagaggctcgacagcaagatgcaagccttcgaggagacggctgaggtacaacggcaagagatagaaatgaacgataaggtgttagaggacttcgaagactggattgagaaggagaaaaacgaaggaatgttcttcaaaagccttggcaaggtcaaacctcggaacaagatggaaataaaggtgaaagccaaggtggaagcacagaaggtcaaagagattgcagaggagagtgcaggatcaaaaactcgtatgaacatttacctggggctgatggggatactcgggattacaattgcgaatgccatctttgcaacaccagaggtggagtggaggaaggttgctgctctgggtctgattttcattggtctggttgctcaggtcatctacgagcaggatatctcaccgccggaagctgagaagacagag

SEQ ID NO: 12008 - protein, 248 aa, Zea mays subsp. mays
  peptide (1)..(248): Ceres Seq. ID no. 12341176
  misc_feature (57)..(246): Homolog of NCBI NO: 34908370 NR Description: P0529E05.11 [Oryza sativa (japonica
  misc_feature (10)..(246): Homolog of NCBI NO: 15232007 NR Description: unknown protein; protein id: At3g09050.1 thaliana] >gi|5923670|gb|AAD56321.1|AC009326_8 unknown protein
TIQSCPSLRRSSLFRRALLGRKRSFISASSSEDAESGTPPPLGGDKHQQEVLAQIAMLQTQKVRITDFLDERSAYLTKFAKDADSEFDLIGQNAMKELDAVGDQILERLDSKMQAFEETAEVQRQEIEMNDKVLEDFEDWIEKEKNEGMFFKSLGKVKPRNKMEIKVKAKVEAQKVKEIAEESAGSKTRMNIYLGLMGILGITIANAIFATPEVEWRKVAALGLIFIGLVAQVIYEQDISPPEAEKTE

SEQ ID NO: 12009 - protein, 192 aa, Zea mays subsp. mays
  peptide (1)..(192): Ceres Seq. ID no. 12341177
  misc_feature (1)..(190): Homolog of NCBI NO: 34908370 NR Description: P0529E05.11 [Oryza sativa (japonica
  misc_feature (1)..(190): Homolog of NCBI NO: 15232007 NR Description: unknown protein; protein id: At3g09050.1 thaliana] >gi|5923670|gb|AAD56321.1|AC009326_8 unknown protein
MLQTQKVRITDFLDERSAYLTKFAKDADSEFDLIGQNAMKELDAVGDQILERLDSKMQAFEETAEVQRQEIEMNDKVLEDFEDWIEKEKNEGMFFKSLGKVKPRNKMEIKVKAKVEAQKVKEIAEESAGSKTRMNIYLGLMGILGITIANAIFATPEVEWRKVAALGLIFIGLVAQVIYEQDISPPEAEKTE

SEQ ID NO: 12010 - protein, 154 aa, Zea mays subsp. mays
  peptide (1)..(154): Ceres Seq. ID no. 12341178
  misc_feature (1)..(152): Homolog of NCBI NO: 34908370 NR Description: P0529E05.11 [Oryza sativa (japonica
  misc_feature (1)..(152): Homolog of NCBI NO: 15232007 NR Description: unknown protein; protein id: At3g09050.1 thaliana] >gi|5923670|gb|AAD56321.1|AC009326_8 unknown protein
MKELDAVGDQILERLDSKMQAFEETAEVQRQEIEMNDKVLEDFEDWIEKEKNEGMFFKSLGKVKPRNKMEIKVKAKVEAQKVKEIAEESAGSKTRMNIYLGLMGILGITIANAIFATPEVEWRKVAALGLIFIGLVAQVIYEQDISPPEAEKTE

SEQ ID NO: 12011 - DNA, 460 bp, Zea mays subsp. mays
  misc_feature (1)..(460): Ceres Seq. ID no. 13573968
  misc_feature: MA Experiment ID: 108543 Result: Up-regulated in Transcription
  misc_feature: MA Experiment ID: 20000492 Result: Down-regulated in Transcription
  misc_feature: MA Experiment 20000492 PARAMETER Experiment Name: Zm_Hybrid_Seed_Dev_P Parameter: DAP Value: 12
  misc_feature: MA Experiment 20000492 PARAMETER Experiment Name: Zm_Hybrid_Seed_Dev_P Parameter: Organism Value: Zea mays
  misc_feature: MA Experiment 20000492 PARAMETER Experiment Name: Zm_Hybrid_Seed_Dev_P Parameter: Plant Line Value: 35A19
  misc_feature: MA Experiment 20000492 PARAMETER Experiment Name: Zm_Hybrid_Seed_Dev_P Parameter: Tissue Value: Fert Kernel vs. Unfert Floret
ctcaagaaaatgactggcttcaatgccttttggtttactcaccacttatttgttattgtgtatgcactgctcattgtccatgggacctgtttatatctaagcaggaaatggtacaagaaaacgacatggatgtaccttgctgtccctgtgctcttgtatgtaagtgagcgcattcttcggctatttaggagccatgatgctgttaggattcagaaggttgcagtatatccagggaatgttttggctctctatatgtccaagccacctggattcaggtatcggagtgggcagtatatcttcataaaatgcagtgatgtctctccatacgaatggcacccattttcgattacatcagcaccaggagatgattatcttagtgtccacattcgcacaaggggtgattggacttcacgtcttaggactgtcttctctgaggcatgccgccctccatctgatggag

SEQ ID NO: 12012 - protein, 153 aa, Zea mays subsp. mays
  peptide (1)..(153): Ceres Seq. ID no. 13573969
  misc_feature (1)..(152): Pfam Name: Ferric reductase like transmembrane component Pfam Description: Ferric reductase like transmembrane component
  misc_feature (1)..(152): Homolog of NCBI NO: 11358758 NR Description: respiratory burst oxidase protein D [imported] - thaliana >gi|3242789|gb|AAC39479.1| respiratory burst oxidase
  misc_feature (1)..(152): Homolog of NCBI NO: 15238842 NR Description: respiratory burst oxidase protein D (NADPH (RbohD) [Arabidopsis thaliana] >gi|10177927|dbj|BAB11338.1| burst oxidase protein [Arabidopsis thaliana]
  misc_feature (1)..(151): Homolog of NCBI NO: 16549089 NR Description: respiratory burst oxidase homolog [Solanum
  misc_feature (3)..(152): Homolog of NCBI NO: 20805911 NR Description: NADPH oxidase [Nicotiana tabacum]
  misc_feature (3)..(152): Homolog of NCBI NO: 28268680 NR Description: respiratory burst oxidase homolog [Nicotiana
  misc_feature (3)..(152): Homolog of NCBI NO: 8131846 NR Description: whitefly-induced gp91-phox [Lycopersicon
  misc_feature (1)..(151): Homolog of NCBI NO: 25354665 NR Description: hypothetical protein [imported] - Arabidopsis >gi|2342676|gb|AAB70398.1| Strong similarity to Oryza NADPH
  misc_feature (1)..(151): Homolog of NCBI NO: 30680952 NR Description: respiratory burst oxidase protein B (NADPH (RbohB) [Arabidopsis thaliana] >gi|3242783|gb|AAC39476.1|
  misc_feature (3)..(152): Homolog of NCBI NO: 7489460 NR Description: cytochrome b245 beta chain homolog rbohA - rice
  misc_feature (3)..(152): Homolog of NCBI NO: 7489461 NR Description: cytochrome b245 beta chain homolog rbohA - rice
LKKMTGFNAFWFTHHLFVIVYALLIVHGTCLYLSRKWYKKTTWMYLAVPVLLYVSERILRLFRSHDAVRIQKVAVYPGNVLALYMSKPPGFRYRSGQYIFIKCSDVSPYEWHPFSITSAPGDDYLSVHIRTRGDWTSRLRTVFSEACRPPSDG

SEQ ID NO: 12013 - protein, 150 aa, Zea mays subsp. mays
  peptide (1)..(150): Ceres Seq. ID no. 13573970
  misc_feature (1)..(149): Pfam Name: Ferric reductase like transmembrane component Pfam Description: Ferric reductase like transmembrane component
  misc_feature (1)..(149): Homolog of NCBI NO: 11358758 NR Description: respiratory burst oxidase protein D [imported] - thaliana >gi|3242789|gb|AAC39479.1| respiratory burst oxidase
  misc_feature (1)..(149): Homolog of NCBI NO: 15238842 NR Description: respiratory burst oxidase protein D (NADPH (RbohD) [Arabidopsis thaliana] >gi|10177927|dbj|BAB11338.1| burst oxidase protein [Arabidopsis thaliana]
  misc_feature (1)..(148): Homolog of NCBI NO: 16549089 NR Description: respiratory burst oxidase homolog [Solanum
  misc_feature (1)..(149): Homolog of NCBI NO: 20805911 NR Description: NADPH oxidase [Nicotiana tabacum]
  misc_feature (1)..(149): Homolog of NCBI NO: 28268680 NR Description: respiratory burst oxidase homolog [Nicotiana
  misc_feature (1)..(149): Homolog of NCBI NO: 8131846 NR Description: whitefly-induced gp91-phox [Lycopersicon
  misc_feature (1)..(148): Homolog of NCBI NO: 25354665 NR Description: hypothetical protein [imported] - Arabidopsis >gi|2342676|gb|AAB70398.1| Strong similarity to Oryza NADPH
  misc_feature (1)..(148): Homolog of NCBI NO: 30680952 NR Description: respiratory burst oxidase protein B (NADPH (RbohB) [Arabidopsis thaliana] >gi|3242783|gb|AAC39476.1|
  misc_feature (1)..(149): Homolog of NCBI NO: 7489460 NR Description: cytochrome b245 beta chain homolog rbohA - rice
  misc_feature (1)..(149): Homolog of NCBI NO: 7489461 NR Description: cytochrome b245 beta chain homolog rbohA - rice
MTGFNAFWFTHHLFVIVYALLIVHGTCLYLSRKWYKKTTWMYLAVPVLLYVSERILRLFRSHDAVRIQKVAVYPGNVLALYMSKPPGFRYRSGQYIFIKCSDVSPYEWHPFSITSAPGDDYLSVHIRTRGDWTSRLRTVFSEACRPPSDG

SEQ ID NO: 12014 - protein, 110 aa, Zea mays subsp. mays
  peptide (1)..(110): Ceres Seq. ID no. 13573971
  misc_feature (1)..(109): Pfam Name: Ferric reductase like transmembrane component Pfam Description: Ferric reductase like transmembrane component
  misc_feature (1)..(109): Homolog of NCBI NO: 11358758 NR Description: respiratory burst oxidase protein D [imported] - thaliana >gi|3242789|gb|AAC39479.1| respiratory burst oxidase
  misc_feature (1)..(109): Homolog of NCBI NO: 15238842 NR Description: respiratory burst oxidase protein D (NADPH (RbohD) [Arabidopsis thaliana] >gi|10177927|dbj|BAB11338.1| burst oxidase protein [Arabidopsis thaliana]
  misc_feature (1)..(108): Homolog of NCBI NO: 16549089 NR Description: respiratory burst oxidase homolog [Solanum
  misc_feature (1)..(109): Homolog of NCBI NO: 20805911 NR Description: NADPH oxidase [Nicotiana tabacum]
  misc_feature (1)..(109): Homolog of NCBI NO: 28268680 NR Description: respiratory burst oxidase homolog [Nicotiana
  misc_feature (1)..(109): Homolog of NCBI NO: 8131846 NR Description: whitefly-induced gp91-phox [Lycopersicon
  misc_feature (1)..(108): Homolog of NCBI NO: 25354665 NR Description: hypothetical protein [imported] - Arabidopsis >gi|2342676|gb|AAB70398.1| Strong similarity to Oryza NADPH
  misc_feature (1)..(108): Homolog of NCBI NO: 30680952 NR Description: respiratory burst oxidase protein B (NADPH (RbohB) [Arabidopsis thaliana] >gi|3242783|gb|AAC39476.1|
  misc_feature (1)..(109): Homolog of NCBI NO: 7489460 NR Description: cytochrome b245 beta chain homolog rbohA - rice
  misc_feature (1)..(109): Homolog of NCBI NO: 7489461 NR Description: cytochrome b245 beta chain homolog rbohA - rice
MYLAVPVLLYVSERILRLFRSHDAVRIQKVAVYPGNVLALYMSKPPGFRYRSGQYIFIKCSDVSPYEWHPFSITSAPGDDYLSVHIRTRGDWTSRLRTVFSEACRPPSDG

SEQ ID NO: 12015 - DNA, 1193 bp, Zea mays subsp. mays
  misc_feature (1)..(1193): Ceres Seq. ID no. 12408082
  misc_feature: MA Experiment ID: 108528 Result: Down-regulated in Transcription
  misc_feature: MA Experiment 108528 PARAMETER Experiment Name: Zm_Imbibed_Seeds_P Parameter: Age (day) Value: 5 vs. 2
  misc_feature: MA Experiment 108528 PARAMETER Experiment Name: Zm_Imbibed_Seeds_P Parameter: Organism Value: Zea mays
  misc_feature: MA Experiment 108528 PARAMETER Experiment Name: Zm_Imbibed_Seeds_P Parameter: Plant Line Value: 35A19
  misc_feature: MA Experiment 108528 PARAMETER Experiment Name: Zm_Imbibed_Seeds_P Parameter: Tissue Value: Aerial vs. Embryo
  misc_feature: MA Experiment ID: 108530 Result: Down-regulated in Transcription
  misc_feature: MA Experiment 108530 PARAMETER Experiment Name: Zm_Imbibed_Seeds_P Parameter: Age (day) Value: 6 vs. 2
  misc_feature: MA Experiment 108530 PARAMETER Experiment Name: Zm_Imbibed_Seeds_P Parameter: Organism Value: Zea mays
  misc_feature: MA Experiment 108530 PARAMETER Experiment Name: Zm_Imbibed_Seeds_P Parameter: Plant Line Value: 35A19
  misc_feature: MA Experiment 108530 PARAMETER Experiment Name: Zm_Imbibed_Seeds_P Parameter: Tissue Value: Aerial vs. Embryo
  misc_feature: MA Experiment ID: 108543 Result: Up-regulated in Transcription
  misc_feature: MA Experiment ID: 108687 Result: Down-regulated in Transcription
  misc_feature: MA Experiment 108687 PARAMETER Experiment Name: Zm_Embryos-Flowers__P Parameter: Tissue Value: Embryo vs. Aerial+
  misc_feature: MA Experiment ID: 20000487 Result: Up-regulated in Transcription
  misc_feature: MA Experiment 20000487 PARAMETER Experiment Name: Zm_50mM_NH4NO3_L_to_H_P Parameter: Organism Value: Zea mays
  misc_feature: MA Experiment 20000487 PARAMETER Experiment Name: Zm_50mM_NH4NO3_L_to_H_P Parameter: Timepoint (hr) Value: 4
  misc_feature: MA Experiment 20000487 PARAMETER Experiment Name: Zm_50mM_NH4NO3_L_to_H_P Parameter: Tissue Value: Leaves
  misc_feature: MA Experiment 20000487 PARAMETER Experiment Name: Zm_50mM_NH4NO3_L_to_H_P Parameter: Treatment Value: 50mM NH4NO3 vs. 100mM Mannitol
  misc_feature: MA Experiment ID: 20000535 Result: Down-regulated in Transcription
  misc_feature: MA Experiment 20000535 PARAMETER Experiment Name: Zm_Hybrid_Seed_Dev_P Parameter: DAP Value: 30 vs. 12
  misc_feature: MA Experiment 20000535 PARAMETER Experiment Name: Zm_Hybrid_Seed_Dev_P Parameter: Organism Value: Zea mays
  misc_feature: MA Experiment 20000535 PARAMETER Experiment Name: Zm_Hybrid_Seed_Dev_P Parameter: Plant Line Value: 35A19
  misc_feature: MA Experiment 20000535 PARAMETER Experiment Name: Zm_Hybrid_Seed_Dev_P Parameter: Tissue Value: Embryo vs. Unfert Floret
  misc_feature: MA Experiment ID: 20000626 Result: Up-regulated in Transcription
  misc_feature: MA Experiment 20000626 PARAMETER Experiment Name: Zm_Herbicide-Treatments_P Parameter: Timepoint (hr) Value: 12
  misc_feature: MA Experiment 20000626 PARAMETER Experiment Name: Zm_Herbicide-Treatments_P Parameter: Tissue Value: Aerial
  misc_feature: MA Experiment 20000626 PARAMETER Experiment Name: Zm_Herbicide-Treatments_P Parameter: Treatment Value: Roundup vs. No Treatment
  misc_feature: MA Experiment ID: 20001610 Result: Up-regulated in Transcription
  misc_feature: MA Experiment 20001610 PARAMETER Experiment Name: Zm_50ppm_KNO3_L-to-H_P Parameter: Age (day) Value: 19
  misc_feature: MA Experiment 20001610 PARAMETER Experiment Name: Zm_50ppm_KNO3_L-to-H_P Parameter: Organism Value: Zea mays
  misc_feature: MA Experiment 20001610 PARAMETER Experiment Name: Zm_50ppm_KNO3_L-to-H_P Parameter: Plant Line Value: 35A19
  misc_feature: MA Experiment 20001610 PARAMETER Experiment Name: Zm_50ppm_KNO3_L-to-H_P Parameter: Timepoint (hr) Value: 2
  misc_feature: MA Experiment 20001610 PARAMETER Experiment Name: Zm_50ppm_KNO3_L-to-H_P Parameter: Tissue Value: Roots
  misc_feature: MA Experiment 20001610 PARAMETER Experiment Name: Zm_50ppm_KNO3_L-to-H_P Parameter: Treatment Value: 50ppm KNO3 vs. 50ppm KCl
cacacacacacacatcctccaccaccattcatcagaaagcgaagcacaagcctctgatgccaagccaaagcacacacacctcctccagcctttcttcctctacagccccaattcttccctgcagctctgctgctgccttgtttcgatcggtcatggcggcggtggccacagagactccgttccatgtcctggcggtggacgacagcctcccggacaggaagctcatcgagaggctcctcaagacctcttccttccaagtgaccactgtcgactccgggagcaaggcgctgcagttcctgggcctccatgaccaggacagcacggttcctcctgtccacacgcaccagctggatgtggctgccaatcaggatgtggctgtgaacctgatcatcacagactactgcatgcctggcatgacaggatatgacctgctcaagaagatcaaggagtcgtcgtctctcagagatatcccggtggtgatcatgtcctctgagaacattccttcaaggatcaataggtgcctggaggaaggagctgacgagttcttcctaaaacctgtgcggctatcagacatgaacaagctcaagccccacatactgaaaagcagatgcaaccaggaacagcaccagcaaagtgacagtcacagtggcgaacgcaggaaccccacaatcggcagcagcagcgatagcataaacaaccgcaagagaaagggtgcaggcaccgaagaaatcttgccccagctggcaaacagatcaaggcacagttaactgagaactgactagtacagctaaaaccttttctttttcactttactttggcctactgatttgtaacgtagatgttagccctggatttgcaaaacggaacggaatctgtaaactgatactgcttgagtcgaatcgatcgaagtgattctgcaccagatctccctatttcatttatcagaatcgaaagccagctgacagagtcacagtaacagcccgttggacatagcagcaggtgccgaagccaagaacatctgaaactgaccgtcggataacctacgatgggagtagccttttactgcttctaagctttagcctggatacaagttgtcactacagtagtcagtagggcagtaacttggtgcatctccaagagttttcaaaacacactgtcaatctagaaatttttggtgatgtagcttctcccac

SEQ ID NO: 12016 - protein, 254 aa, Zea mays subsp. mays
  peptide (1)..(254): Ceres Seq. ID no. 12408083
  misc_feature (60)..(191): Pfam Name: Response regulator receiver domain Pfam Description: Response regulator receiver domain
  misc_feature (56)..(209): Homolog of NCBI NO: 15227325 NR Description: putative two-component response regulator 3 protein id: At2g41310.1, supported by cDNA: gi_18491268
  misc_feature (51)..(235): Homolog of NCBI NO: 33330868 NR Description: type-A response regulator [Catharanthus roseus]
  misc_feature (51)..(242): Homolog of NCBI NO: 12060384 NR Description: response regulator 4 [Zea mays]
  misc_feature (19)..(254): Homolog of NCBI NO: 12060388 NR Description: response regulator 6 [Zea mays]
  misc_feature (51)..(202): Homolog of NCBI NO: 34906626 NR Description: putative response regulator [Oryza sativa
  misc_feature (51)..(213): Homolog of NCBI NO: 12060386 NR Description: response regulator 5 [Zea mays]
  misc_feature (54)..(222): Homolog of NCBI NO: 15230202 NR Description: responce reactor 4; protein id: At3g57040.1, by cDNA: gi_19699060, supported by cDNA: gi_3273201 [Arabidopsis
  misc_feature (61)..(252): Homolog of NCBI NO: 13173408 NR Description: response regulator protein [Dianthus caryophyllus]
  misc_feature (57)..(202): Homolog of NCBI NO: 18410485 NR Description: response regulator-like protein; protein id: supported by cDNA: gi_11870070 [Arabidopsis thaliana]
  misc_feature (58)..(228): Homolog of NCBI NO: 15221927 NR Description: response regulator 5, putative; protein id: supported by cDNA: gi_3953602 [Arabidopsis thaliana]
HTHTSSTTIHQKAKHKPLMPSQSTHTSSSLSSSTAPILPCSSAAALFRSVMAAVATETPFHVLAVDDSLPDRKLIERLLKTSSFQVTTVDSGSKALQFLGLHDQDSTVPPVHTHQLDVAANQDVAVNLIITDYCMPGMTGYDLLKKIKESSSLRDIPVVIMSSENIPSRINRCLEEGADEFFLKPVRLSDMNKLKPHILKSRCNQEQHQQSDSHSGERRNPTIGSSSDSINNRKRKGAGTEEILPQLANRSRHS

SEQ ID NO: 12017 - protein, 236 aa, Zea mays subsp. mays
  peptide (1)..(236): Ceres Seq. ID no. 12408084
  misc_feature (42)..(173): Pfam Name: Response regulator receiver domain Pfam Description: Response regulator receiver domain
  misc_feature (1)..(236): Homolog of NCBI NO: 12060388 NR Description: response regulator 6 [Zea mays]
  misc_feature (36)..(204): Homolog of NCBI NO: 15230202 NR Description: responce reactor 4; protein id: At3g57040.1, by cDNA: gi_19699060, supported by cDNA: gi_3273201 [Arabidopsis
  misc_feature (33)..(184): Homolog of NCBI NO: 34906626 NR Description: putative response regulator [Oryza sativa
  misc_feature (33)..(195): Homolog of NCBI NO: 12060386 NR Description: response regulator 5 [Zea mays]
  misc_feature (38)..(191): Homolog of NCBI NO: 15227325 NR Description: putative two-component response regulator 3 protein id: At2g41310.1, supported by cDNA: gi_18491268
  misc_feature (33)..(217): Homolog of NCBI NO: 33330868 NR Description: type-A response regulator [Catharanthus roseus]
  misc_feature (33)..(224): Homolog of NCBI NO: 12060384 NR Description: response regulator 4 [Zea mays]
  misc_feature (43)..(234): Homolog of NCBI NO: 13173408 NR Description: response regulator protein [Dianthus caryophyllus]
  misc_feature (39)..(184): Homolog of NCBI NO: 18410485 NR Description: response regulator-like protein; protein id: supported by cDNA: gi_11870070 [Arabidopsis thaliana]
  misc_feature (40)..(210): Homolog of NCBI NO: 15221927 NR Description: response regulator 5, putative; protein id: supported by cDNA: gi_3953602 [Arabidopsis thaliana]
MPSQSTHTSSSLSSSTAPILPCSSAAALFRSVMAAVATETPFHVLAVDDSLPDRKLIERLLKTSSFQVTTVDSGSKALQFLGLHDQDSTVPPVHTHQLDVAANQDVAVNLIITDYCMPGMTGYDLLKKIKESSSLRDIPVVIMSSENIPSRINRCLEEGADEFFLKPVRLSDMNKLKPHILKSRCNQEQHQQSDSHSGERRNPTIGSSSDSINNRKRKGAGTEEILPQLANRSRHS

SEQ ID NO: 12018 - protein, 204 aa, Zea mays subsp. mays
  peptide (1)..(204): Ceres Seq. ID no. 12408085
  misc_feature (10)..(141): Pfam Name: Response regulator receiver domain Pfam Description: Response regulator receiver domain
  misc_feature (1)..(204): Homolog of NCBI NO: 12060388 NR Description: response regulator 6 [Zea mays]
  misc_feature (4)..(172): Homolog of NCBI NO: 15230202 NR Description: responce reactor 4; protein id: At3g57040.1, by cDNA: gi_19699060, supported by cDNA: gi_3273201 [Arabidopsis
  misc_feature (1)..(152): Homolog of NCBI NO: 34906626 NR Description: putative response regulator [Oryza sativa
  misc_feature (1)..(163): Homolog of NCBI NO: 12060386 NR Description: response regulator 5 [Zea mays]
  misc_feature (6)..(159): Homolog of NCBI NO: 15227325 NR Description: putative two-component response regulator 3 protein id: At2g41310.1, supported by cDNA: gi_18491268
  misc_feature (1)..(185): Homolog of NCBI NO: 33330868 NR Description: type-A response regulator [Catharanthus roseus]
  misc_feature (1)..(192): Homolog of NCBI NO: 12060384 NR Description: response regulator 4 [Zea mays]
  misc_feature (11)..(202): Homolog of NCBI NO: 13173408 NR Description: response regulator protein [Dianthus caryophyllus]
  misc_feature (7)..(152): Homolog of NCBI NO: 18410485 NR Description: response regulator-like protein; protein id: supported by cDNA: gi_11870070 [Arabidopsis thaliana]
  misc_feature (8)..(178): Homolog of NCBI NO: 15221927 NR Description: response regulator 5, putative; protein id: supported by cDNA: gi_3953602 [Arabidopsis thaliana]
MAAVATETPFHVLAVDDSLPDRKLIERLLKTSSFQVTTVDSGSKALQFLGLHDQDSTVPPVHTHQLDVAANQDVAVNLIITDYCMPGMTGYDLLKKIKESSSLRDIPVVIMSSENIPSRINRCLEEGADEFFLKPVRLSDMNKLKPHILKSRCNQEQHQQSDSHSGERRNPTIGSSSDSINNRKRKGAGTEEILPQLANRSRHS

SEQ ID NO: 12019 - DNA, 1807 bp, Zea mays subsp. mays
  misc_feature (1)..(1807): Ceres Seq. ID no. 12374088
  misc_feature: MA Experiment ID: 108527 Result: Down-regulated in Transcription
  misc_feature: MA Experiment 108527 PARAMETER Experiment Name: Zm_5mM_NO_P Parameter: Age (day) Value: 8
  misc_feature: MA Experiment 108527 PARAMETER Experiment Name: Zm_5mM_NO_P Parameter: Organism Value: Zea mays
  misc_feature: MA Experiment 108527 PARAMETER Experiment Name: Zm_5mM_NO_P Parameter: Plant Line Value: 35A19
  misc_feature: MA Experiment 108527 PARAMETER Experiment Name: Zm_5mM_NO_P Parameter: Timepoint (hr) Value: 6
  misc_feature: MA Experiment 108527 PARAMETER Experiment Name: Zm_5mM_NO_P Parameter: Tissue Value: Aerial
  misc_feature: MA Experiment 108527 PARAMETER Experiment Name: Zm_5mM_NO_P Parameter: Treatment Value: 5mM NO vs. No Treatment
  misc_feature: MA Experiment ID: 108543 Result: Up-regulated in Transcription
  misc_feature: MA Experiment ID: 20000479 Result: Down-regulated in Transcription
  misc_feature: MA Experiment 20000479 PARAMETER Experiment Name: Zm_Drought_P Parameter: Age (day) Value: 10
  misc_feature: MA Experiment 20000479 PARAMETER Experiment Name: Zm_Drought_P Parameter: Organism Value: Zea mays
  misc_feature: MA Experiment 20000479 PARAMETER Experiment Name: Zm_Drought_P Parameter: Plant Line Value: 35A19
  misc_feature: MA Experiment 20000479 PARAMETER Experiment Name: Zm_Drought_P Parameter: Timepoint (hr) Value: 48
  misc_feature: MA Experiment 20000479 PARAMETER Experiment Name: Zm_Drought_P Parameter: Tissue Value: Aerial
  misc_feature: MA Experiment 20000479 PARAMETER Experiment Name: Zm_Drought_P Parameter: Treatment Value: Drought vs. No Drought
gagccgcggaggagcagcggcgcatcgcaacactaaccaaagtcctcctctccaggtgccgagccagggtgactgttccgaggagcgtggcgtggacccatgggggaagaagggcaagtggttcggtgccgtcaagaaggtcttcagccccgaatccaaggagaagaaagaggagaggctaaggaggaaatcagcagctagcaacccagcaccggtagatctgaccccatctacctccctggaagtcaatgtttcggtgccaccccctccggctcctcctccagttcctcgccagaccgacgaggtcagggtccccgaagccgagcaggagcagagcaagcatgtcaccctggaggaggcccctgctgctgctgctgccccagcacaggcgtcggtgctgccacctggtgcgccaaccgaagagctcgccgcaatcaagatccagaccgccttccgaggttacctggcaaggagggcactaagagcactacgaggccttgtacgattgaagtcattggttgagggtaattcagttaagcgtcaatctgcaagcactctgcgctgtatgcaaactctatcgcgggtgcagtcacaaatacgatctaggagagcaaagatgtccgaggagaaccaggccctccaacgccagctcctacttaaacaggaactggagaatttcagaatgggtgagaactgggacgacagcactcaatccaaggagcaaatcgaggcaagcctaataagcaggcaagaggcagcgataagaagagaaagagctcttgcatatgcattttcacatcagtggaagagcacatcaagatctgcgaacccaatgtttgtagacccaaataacttgcagtggggctggagctggttggagcgctggatggcagcaaaaccttgggagggacgcaatgggaccgacaaggagagcaacattgatcgcggctccgtcaagaatatgagcttgaaccttggagttggagagggtgagatcacaaaagctttcaaccgccgggactcaaagccagagaagccatcaccaccgactccaaaaccggcccgtccagcttccaggcaatccccttcgacgccctctgctagagtggccccaatacctgcgaggaggaaatccagcacgccaaagaatgggctttcacaggtggacgatgacgtgaggagcgtgctcagtgtgcagtctgagcgaccaaggaggcacagcatagccacgacgtcgaccatgcgggacgatgagagcctcgcgagctccccgtcgctcccgagctacatggttcccacagaatctgcgagggccaaatctcgcacagcaacggccaatggcgcagagacgcctgagaaaggaggctctgctggaccagtcaagaagaggttgtctttccaaggtggagctgcggctgcctcaccgatgcgacggcattctggccctcccaaggtggagagcgctgtgaaggacattgctgcgccaccacagcctgaggccttggtagccaatggtggtggaagcaagtgacttgtattgacaagttccaggatgggggagcgggttatggtcttatggagggacatgtttcatccgtgaacagaagttaagagtggtgccggatctacgaatggtttgaattgttttcccgttacaaccacattgtttgctgtataagattcactgtacctgccagttggttccatttgttgttttctgtaaaacaaacatcaatttgtcactagaatctgtgatgcttgtatgtaaacaggtcctctatttatgtgagccatatatttcattttc

SEQ ID NO: 12020 - protein, 509 aa, Zea mays subsp. mays
  peptide (1)..(509): Ceres Seq. ID no. 12374089
  misc_feature (35)..(487): Homolog of NCBI NO: 15982840 NR Description: AT5g03040/F15A17_70 [Arabidopsis thaliana]
  misc_feature (36)..(489): Homolog of NCBI NO: 15232741 NR Description: putative SF16 protein; protein id: At3g09710.1 thaliana] >gi|6682249|gb|AAF23301.1|AC016661_26 putative SF16
  misc_feature (35)..(310): Homolog of NCBI NO: 18414094 NR Description: putative protein; protein id: At5g03040.1,
  misc_feature (38)..(391): Homolog of NCBI NO: 15231175 NR Description: unknown protein; protein id: At3g52290.1
  misc_feature (35)..(455): Homolog of NCBI NO: 11292162 NR Description: hypothetical protein F15A17.70 - Arabidopsis >gi|7413581|emb|CAB86071.1| putative protein [Arabidopsis
  misc_feature (33)..(458): Homolog of NCBI NO: 15225299 NR Description: putative SF16 protein {Helianthus annuus}; id: At2g26410.1 [Arabidopsis thaliana] >gi|7487891|pir||T00974
  misc_feature (140)..(428): Homolog of NCBI NO: 15233296 NR Description: unknown protein; protein id: At3g22190.1
  misc_feature (35)..(302): Homolog of NCBI NO: 7489344 NR Description: SF16 protein, pollen specific - common sunflower
  misc_feature (140)..(465): Homolog of NCBI NO: 11994738 NR Description: contains similarity to SF16
  misc_feature (117)..(304): Homolog of NCBI NO: 15225258 NR Description: putative SF16 protein {Helianthus annuus}; id: At2g26180.1 [Arabidopsis thaliana] >gi|25367166|pir||D84657
SRGGAAAHRNTNQSPPLQVPSQGDCSEERGVDPWGKKGKWFGAVKKVFSPESKEKKEERLRRKSAASNPAPVDLTPSTSLEVNVSVPPPPAPPPVPRQTDEVRVPEAEQEQSKHVTLEEAPAAAAAPAQASVLPPGAPTEELAAIKIQTAFRGYLARRALRALRGLVRLKSLVEGNSVKRQSASTLRCMQTLSRVQSQIRSRRAKMSEENQALQRQLLLKQELENFRMGENWDDSTQSKEQIEASLISRQEAAIRRERALAYAFSHQWKSTSRSANPMFVDPNNLQWGWSWLERWMAAKPWEGRNGTDKESNIDRGSVKNMSLNLGVGEGEITKAFNRRDSKPEKPSPPTPKPARPASRQSPSTPSARVAPIPARRKSSTPKNGLSQVDDDVRSVLSVQSERPRRHSIATTSTMRDDESLASSPSLPSYMVPTESARAKSRTATANGAETPEKGGSAGPVKKRLSFQGGAAAASPMRRHSGPPKVESAVKDIAAPPQPEALVANGGGSK

SEQ ID NO: 12021 - protein, 321 aa, Zea mays subsp. mays
  peptide (1)..(321): Ceres Seq. ID no. 12374090
  misc_feature (1)..(299): Homolog of NCBI NO: 15982840 NR Description: AT5g03040/F15A17_70 [Arabidopsis thaliana]
  misc_feature (1)..(301): Homolog of NCBI NO: 15232741 NR Description: putative SF16 protein; protein id: At3g09710.1 thaliana] >gi|6682249|gb|AAF23301.1|AC016661_26 putative SF16
  misc_feature (1)..(122): Homolog of NCBI NO: 18414094 NR Description: putative protein; protein id: At5g03040.1,
  misc_feature (1)..(203): Homolog of NCBI NO: 15231175 NR Description: unknown protein; protein id: At3g52290.1
  misc_feature (1)..(267): Homolog of NCBI NO: 11292162 NR Description: hypothetical protein F15A17.70 - Arabidopsis >gi|7413581|emb|CAB86071.1| putative protein [Arabidopsis
  misc_feature (1)..(270): Homolog of NCBI NO: 15225299 NR Description: putative SF16 protein {Helianthus annuus}; id: At2g26410.1 [Arabidopsis thaliana] >gi|7487891|pir||T00974
  misc_feature (1)..(240): Homolog of NCBI NO: 15233296 NR Description: unknown protein; protein id: At3g22190.1
  misc_feature (1)..(114): Homolog of NCBI NO: 7489344 NR Description: SF16 protein, pollen specific - common sunflower
  misc_feature (1)..(277): Homolog of NCBI NO: 11994738 NR Description: contains similarity to SF16
  misc_feature (1)..(116): Homolog of NCBI NO: 15225258 NR Description: putative SF16 protein {Helianthus annuus}; id: At2g26180.1 [Arabidopsis thaliana] >gi|25367166|pir||D84657
MQTLSRVQSQIRSRRAKMSEENQALQRQLLLKQELENFRMGENWDDSTQSKEQIEASLISRQEAAIRRERALAYAFSHQWKSTSRSANPMFVDPNNLQWGWSWLERWMAAKPWEGRNGTDKESNIDRGSVKNMSLNLGVGEGEITKAFNRRDSKPEKPSPPTPKPARPASRQSPSTPSARVAPIPARRKSSTPKNGLSQVDDDVRSVLSVQSERPRRHSIATTSTMRDDESLASSPSLPSYMVPTESARAKSRTATANGAETPEKGGSAGPVKKRLSFQGGAAAASPMRRHSGPPKVESAVKDIAAPPQPEALVANGGGSK

SEQ ID NO: 12022 - protein, 304 aa, Zea mays subsp. mays
  peptide (1)..(304): Ceres Seq. ID no. 12374091
  misc_feature (1)..(282): Homolog of NCBI NO: 15982840 NR Description: AT5g03040/F15A17_70 [Arabidopsis thaliana]
  misc_feature (1)..(284): Homolog of NCBI NO: 15232741 NR Description: putative SF16 protein; protein id: At3g09710.1 thaliana] >gi|6682249|gb|AAF23301.1|AC016661_26 putative SF16
  misc_feature (1)..(105): Homolog of NCBI NO: 18414094 NR Description: putative protein; protein id: At5g03040.1,
  misc_feature (1)..(186): Homolog of NCBI NO: 15231175 NR Description: unknown protein; protein id: At3g52290.1
  misc_feature (1)..(250): Homolog of NCBI NO: 11292162 NR Description: hypothetical protein F15A17.70 - Arabidopsis >gi|7413581|emb|CAB86071.1| putative protein [Arabidopsis
  misc_feature (1)..(253): Homolog of NCBI NO: 15225299 NR Description: putative SF16 protein {Helianthus annuus}; id: At2g26410.1 [Arabidopsis thaliana] >gi|7487891|pir||T00974
  misc_feature (1)..(223): Homolog of NCBI NO: 15233296 NR Description: unknown protein; protein id: At3g22190.1
  misc_feature (1)..(97): Homolog of NCBI NO: 7489344 NR Description: SF16 protein, pollen specific - common sunflower
  misc_feature (1)..(260): Homolog of NCBI NO: 11994738 NR Description: contains similarity to SF16
  misc_feature (1)..(99): Homolog of NCBI NO: 15225258 NR Description: putative SF16 protein {Helianthus annuus}; id: At2g26180.1 [Arabidopsis thaliana] >gi|25367166|pir||D84657
MSEENQALQRQLLLKQELENFRMGENWDDSTQSKEQIEASLISRQEAAIRRERALAYAFSHQWKSTSRSANPMFVDPNNLQWGWSWLERWMAAKPWEGRNGTDKESNIDRGSVKNMSLNLGVGEGEITKAFNRRDSKPEKPSPPTPKPARPASRQSPSTPSARVAPIPARRKSSTPKNGLSQVDDDVRSVLSVQSERPRRHSIATTSTMRDDESLASSPSLPSYMVPTESARAKSRTATANGAETPEKGGSAGPVKKRLSFQGGAAAASPMRRHSGPPKVESAVKDIAAPPQPEALVANGGGSK

SEQ ID NO: 12023 - DNA, 1746 bp, Zea mays subsp. mays
  misc_feature (1)..(1746): Ceres Seq. ID no. 12411690
  misc_feature: MA Experiment ID: 108687 Result: Down-regulated in Transcription
  misc_feature: MA Experiment 108687 PARAMETER Experiment Name: Zm_Embryos-Flowers__P Parameter: Tissue Value: Embryo vs. Aerial+
  misc_feature: MA Experiment ID: 20000534 Result: Down-regulated in Transcription
  misc_feature: MA Experiment 20000534 PARAMETER Experiment Name: Zm_Hybrid_Pollen_P Parameter: Age (day) Value: 8
  misc_feature: MA Experiment 20000534 PARAMETER Experiment Name: Zm_Hybrid_Pollen_P Parameter: Organism Value: Zea mays
  misc_feature: MA Experiment 20000534 PARAMETER Experiment Name: Zm_Hybrid_Pollen_P Parameter: Plant Line Value: 35A19
  misc_feature: MA Experiment 20000534 PARAMETER Experiment Name: Zm_Hybrid_Pollen_P Parameter: Tissue Value: Pollen vs. Aerial
gcagtctcgctcgcctctcgcaaaccctatccccgaccccgattcccctctcgcctctcgatctctggcggcggcgccgtcgttttcccccatcggctcagcgactctcgagtcccgacctcgacgctaccggctcagcggctctggtgctccgtcctccactcctcctcctccttcatccattcctccggtgcaaggtttgttactttctttatctcggcgcctcacgacctcgacaataccggctctggttctccgactttgaaaggtccgtctctggtgtaccgcgccgtcctgttcggcggcctcagcaacgacgtcatctcggccggagccctggggatcacgaccgcacagctggtgcgcatcaacgacctccacagccggacggtgcaccaggagaacgccctgtcgaaccgactcgccaccctgcaggaagacatcgccaaccgcccgctcctgcccatcgtgcggcagcgcgagctcgccaccgcgacacgactgggagctgctgcgagcggaagctgcgacggcgcggcacgacggtggcttagggcggcacggctaggagaaccagagccggtattgtcgaggcggtggacaacctgacgctgcgtcggttcctgcgcgcgcgcgaccacgacgtggacaaggcctccgccatgttcctcaagttcctcaagtggcggagggaggcggcgcccggcggctccgtgccggaggagcaggtgaggagggagctgtcgcaggacaagctgtgcatgggcggcgtcgacagggccggtcgccccatcctcgtcgccttcgcggccaggcacttctccgccggccgtgacatggcagagttcaagagttttgttgtctacttcttcgacaagatctgtgccagaatccccagagggcaggagaaattcctctgcatcgttgatctcaagggctgggggtactcaaactgtgacgtccgggcatacattgccgctatagagatcttgcagtatttctacaggttaacaaggtacatacaaagaaggcggctgctcccaagattgctaaacaagagtccagtgatgatgacactagcgacgagacctttgaatctgatgagttttcagagtttttagatgccaattcatcttctcattaaggaacctacaaagaagcctgctgctaaacccttggctgcagttgcaaaaaatggttcgaagacggtcaagcaagagagcagcagcgatgaggacagttctgaagatgagtcggatgacgacagtgatgatgtgagttgaagtttcctcggcgtccctgcatcgcttccaccagccctccccacacgcggcgacagggtcgtcgtcgtcccggctccgcgtcggccacacccgaacgaccgtctccatgtcgtgccgtctccagttatgcgagcgaggctggataaggtcgtggggttccaacaaggtggtgcagctccattcgtccctccacctcacccgccggccatctctcgatttctttttgtgtgctcagttttttctttgtgtgtcatgagtttcagaacttgattgggatggtttttgtgccatgagaattagggtttgatagggatgatttgggtatcagttcttacggtcactggaatttgcatattgtcatagtctaatgccattaaattttgagggtagcgatattgttttcaacctattgaatagggtatatgatgatgttggcaagcgctggagcaggtaatattttgtc

SEQ ID NO: 12024 - protein, 202 aa, Zea mays subsp. mays
  peptide (1)..(202): Ceres Seq. ID no. 12411691
AVSLASRKPYPRPRFPSRLSISGGGAVVFPHRLSDSRVPTSTLPAQRLWCSVLHSSSSFIHSSGARFVTFFISAPHDLDNTGSGSPTLKGPSLVYRAVLFGGLSNDVISAGALGITTAQLVRINDLHSRTVHQENALSNRLATLQEDIANRPLLPIVRQRELATATRLGAAASGSCDGAARRWLRAARLGEPEPVLSRRWTT

SEQ ID NO: 12025 - protein, 183 aa, Zea mays subsp. mays
  peptide (1)..(183): Ceres Seq. ID no. 12411692
SLARLSQTLSPTPIPLSPLDLWRRRRRFPPSAQRLSSPDLDATGSAALVLRPPLLLLLHPFLRCKVCYFLYLGASRPRQYRLWFSDFERSVSGVPRRPVRRPQQRRHLGRSPGDHDRTAGAHQRPPQPDGAPGERPVEPTRHPAGRHRQPPAPAHRAAARARHRDTTGSCCERKLRRRGTTVA

SEQ ID NO: 12026 - protein, 152 aa, Zea mays subsp. mays
  peptide (1)..(152): Ceres Seq. ID no. 12411693
  misc_feature (31)..(114): Pfam Name: CRAL/TRIO domain Pfam Description: CRAL/TRIO domain
  misc_feature (1)..(114): Homolog of NCBI NO: 34907052 NR Description: sec14 like protein [Oryza sativa (japonica >gi|20160730|dbj|BAB89672.1| sec14 like protein [Oryza sativa
  misc_feature (1)..(114): Homolog of NCBI NO: 2286121 NR Description: sec14 like protein [Oryza sativa]
  misc_feature (1)..(118): Homolog of NCBI NO: 27573358 NR Description: putative phosphatidylinositol/phosphatidylcholine
  misc_feature (1)..(114): Homolog of NCBI NO: 15223439 NR Description: SEC14 cytosolic factor, putative; protein id: supported by cDNA: 20163. [Arabidopsis thaliana]
  misc_feature (1)..(114): Homolog of NCBI NO: 17226662 NR Description: polyphosphoinositide binding protein [Gossypium
MFLKFLKWRREAAPGGSVPEEQVRRELSQDKLCMGGVDRAGRPILVAFAARHFSAGRDMAEFKSFVVYFFDKICARIPRGQEKFLCIVDLKGWGYSNCDVRAYIAAIEILQYFYRLTRYIQRRRLLPRLLNKSPVMMTLATRPLNLMSFQSF

SEQ ID NO: 12027 - DNA, 1575 bp, Zea mays subsp. mays
  misc_feature (1)..(1575): Ceres Seq. ID no. 12411686
  misc_feature: MA Experiment ID: 108543 Result: Up-regulated in Transcription
aacatacttggctgggccttccccagcggcgagggcgtggcccgttgtacaagtataacaacaattggcccagcgtagcatgcccgtggtggtggcgtcatcgtgtctcctcgatcccctctcgttcctccctcgtcgcctcatcaattcaagatccaatctttgctgctgccactcggcgatccgatcgttctcgagcaaggtcggtggccatggcacgctgccgccatcacctcctcctcctttccgtcttacttgccttggctgctgctgctgcgcggcaggcgcagagtcatggaaaagcctccgccgtcttcatcgatgcctcgtcgcaccgctaccttcgggaccagcaagccgaccaccaggacgcttcaatgtcgttaaatgaagtttctgcggttgtttctgtcttgcttggtttcgcaccgtcaacatccctaccagctatttcttcttcgaagttgaacaaagttcttcttcctaatccatttgatagaccgcgtgctgttttcctcgtgcaaattgatgggttcaatgttcctagcttcgtatctgaaggcagcaacattttcaagaccaggattgaaggtgcaaacatcgctgatacagggcttacagataaggatgacttaattgtcattcattcagatgaatctctagatctctctcgatcagattatcttgataatgaactttccagcttggcaaactggttggagggatcttatcagaagtctaccggcaaactagtcattcccttggagaatggaaacagtcttactttgcaacttgataaggaagcagacaaggaattcatgtccagcttggcttcccttcttaagactattgaaagggcgatccaggttcatgaagatttctcaggtgtcgtgaaccctgcagagttattagaatgtcacttcacagggttgaaggctctggagaatgaatatggttctggtgaaattgttaagcagggaacagaaatagttcagagagctgtcaccaaatcattccagtccctacatgaagcatacaaagggaaaattgttgggctggtaatatccacaaatgaggctccatcatccttaggatccataattgacgcaccatcttcactgcacatttcaagacggctagaagaagcaagcaagactacagacatagcctctgtcgtacttgttcgaaagagcttggcatggattacagggatcatcctgcttgtttcaactctcataggggtttgcttgcttatgaacatgccacttaccagggacaccctcctgtactcgaatgtcaagatcgattagtttgaaggggtgttcgcggcagctactcttggggttcaactttggccttgtgtatttatgggatggatttcagatggtagagacgtatgcttgtgctgttcacaaaaccagtgtacaatgtgatactaggtgctacgtgcctttctttttttaatctgtgcttccatcttgcctgtatgggctgttttgttgttgggttcccggtaaataatccagagcagtggcacaaacgattagttgttgcagaatgctactgccttttctg

SEQ ID NO: 12028 - protein, 435 aa, Zea mays subsp. mays
  peptide (1)..(435): Ceres Seq. ID no. 12411687
  misc_feature (96)..(435): Homolog of NCBI NO: 15230073 NR Description: type 1 membrane protein, putative; protein id: supported by cDNA: 12465., supported by cDNA: gi_15450742, by cDNA: gi_4206764 [Arabidopsis thaliana]
  misc_feature (326)..(435): Homolog of NCBI NO: 40716478 NR Description: putative membrane protein type I [Musa acuminata]
HTWLGLPQRRGRGPLYKYNNNWPSVACPWWWRHRVSSIPSRSSLVASSIQDPIFAAATRRSDRSRARSVAMARCRHHLLLLSVLLALAAAAARQAQSHGKASAVFIDASSHRYLRDQQADHQDASMSLNEVSAVVSVLLGFAPSTSLPAISSSKLNKVLLPNPFDRPRAVFLVQIDGFNVPSFVSEGSNIFKTRIEGANIADTGLTDKDDLIVIHSDESLDLSRSDYLDNELSSLANWLEGSYQKSTGKLVIPLENGNSLTLQLDKEADKEFMSSLASLLKTIERAIQVHEDFSGVVNPAELLECHFTGLKALENEYGSGEIVKQGTEIVQRAVTKSFQSLHEAYKGKIVGLVISTNEAPSSLGSIIDAPSSLHISRRLEEASKTTDIASVVLVRKSLAWITGIILLVSTLIGVCLLMNMPLTRDTLLYSNVKID

SEQ ID NO: 12029 - protein, 365 aa, Zea mays subsp. mays
  peptide (1)..(365): Ceres Seq. ID no. 12411688
  misc_feature (26)..(365): Homolog of NCBI NO: 15230073 NR Description: type 1 membrane protein, putative; protein id: supported by cDNA: 12465., supported by cDNA: gi_15450742, by cDNA: gi_4206764 [Arabidopsis thaliana]
  misc_feature (256)..(365): Homolog of NCBI NO: 40716478 NR Description: putative membrane protein type I [Musa acuminata]
MARCRHHLLLLSVLLALAAAAARQAQSHGKASAVFIDASSHRYLRDQQADHQDASMSLNEVSAVVSVLLGFAPSTSLPAISSSKLNKVLLPNPFDRPRAVFLVQIDGFNVPSFVSEGSNIFKTRIEGANIADTGLTDKDDLIVIHSDESLDLSRSDYLDNELSSLANWLEGSYQKSTGKLVIPLENGNSLTLQLDKEADKEFMSSLASLLKTIERAIQVHEDFSGVVNPAELLECHFTGLKALENEYGSGEIVKQGTEIVQRAVTKSFQSLHEAYKGKIVGLVISTNEAPSSLGSIIDAPSSLHISRRLEEASKTTDIASVVLVRKSLAWITGIILLVSTLIGVCLLMNMPLTRDTLLYSNVKID

SEQ ID NO: 12030 - protein, 310 aa, Zea mays subsp. mays
  peptide (1)..(310): Ceres Seq. ID no. 12411689
  misc_feature (1)..(310): Homolog of NCBI NO: 15230073 NR Description: type 1 membrane protein, putative; protein id: supported by cDNA: 12465., supported by cDNA: gi_15450742, by cDNA: gi_4206764 [Arabidopsis thaliana]
  misc_feature (201)..(310): Homolog of NCBI NO: 40716478 NR Description: putative membrane protein type I [Musa acuminata]
MSLNEVSAVVSVLLGFAPSTSLPAISSSKLNKVLLPNPFDRPRAVFLVQIDGFNVPSFVSEGSNIFKTRIEGANIADTGLTDKDDLIVIHSDESLDLSRSDYLDNELSSLANWLEGSYQKSTGKLVIPLENGNSLTLQLDKEADKEFMSSLASLLKTIERAIQVHEDFSGVVNPAELLECHFTGLKALENEYGSGEIVKQGTEIVQRAVTKSFQSLHEAYKGKIVGLVISTNEAPSSLGSIIDAPSSLHISRRLEEASKTTDIASVVLVRKSLAWITGIILLVSTLIGVCLLMNMPLTRDTLLYSNVKID

SEQ ID NO: 12031 - DNA, 1790 bp, Zea mays subsp. mays
  misc_feature (1)..(1790): Ceres Seq. ID no. 12345156
  misc_feature: MA Experiment ID: 108689 Result: Down-regulated in Transcription
  misc_feature: MA Experiment 108689 PARAMETER Experiment Name: Zm_Drought_Roots_P Parameter: Age (day) Value: 9
  misc_feature: MA Experiment 108689 PARAMETER Experiment Name: Zm_Drought_Roots_P Parameter: Organism Value: Zea mays
  misc_feature: MA Experiment 108689 PARAMETER Experiment Name: Zm_Drought_Roots_P Parameter: Plant Line Value: 35A19
  misc_feature: MA Experiment 108689 PARAMETER Experiment Name: Zm_Drought_Roots_P Parameter: Timepoint (hr) Value: 24
  misc_feature: MA Experiment 108689 PARAMETER Experiment Name: Zm_Drought_Roots_P Parameter: Tissue Value: Roots
  misc_feature: MA Experiment 108689 PARAMETER Experiment Name: Zm_Drought_Roots_P Parameter: Treatment Value: Drought vs. No Drought
  misc_feature: MA Experiment ID: 20000477 Result: Down-regulated in Transcription
  misc_feature: MA Experiment 20000477 PARAMETER Experiment Name: Zm_5mM_SA_P Parameter: Age (day) Value: 10
  misc_feature: MA Experiment 20000477 PARAMETER Experiment Name: Zm_5mM_SA_P Parameter: Organism Value: Zea mays
  misc_feature: MA Experiment 20000477 PARAMETER Experiment Name: Zm_5mM_SA_P Parameter: Plant Line Value: 35A19
  misc_feature: MA Experiment 20000477 PARAMETER Experiment Name: Zm_5mM_SA_P Parameter: Timepoint (hr) Value: 48
  misc_feature: MA Experiment 20000477 PARAMETER Experiment Name: Zm_5mM_SA_P Parameter: Tissue Value: Aerial
  misc_feature: MA Experiment 20000477 PARAMETER Experiment Name: Zm_5mM_SA_P Parameter: Treatment Value: 5mM SA vs. No Treatment
  misc_feature: MA Experiment ID: 20000478 Result: Down-regulated in Transcription
  misc_feature: MA Experiment 20000478 PARAMETER Experiment Name: Zm_5mM_SA_P Parameter: Age (day) Value: 11
  misc_feature: MA Experiment 20000478 PARAMETER Experiment Name: Zm_5mM_SA_P Parameter: Organism Value: Zea mays
  misc_feature: MA Experiment 20000478 PARAMETER Experiment Name: Zm_5mM_SA_P Parameter: Plant Line Value: 35A19
  misc_feature: MA Experiment 20000478 PARAMETER Experiment Name: Zm_5mM_SA_P Parameter: Timepoint (hr) Value: 72
  misc_feature: MA Experiment 20000478 PARAMETER Experiment Name: Zm_5mM_SA_P Parameter: Tissue Value: Aerial
  misc_feature: MA Experiment 20000478 PARAMETER Experiment Name: Zm_5mM_SA_P Parameter: Treatment Value: 5mM SA vs. No Treatment
  misc_feature: MA Experiment ID: 20000480 Result: Down-regulated in Transcription
  misc_feature: MA Experiment 20000480 PARAMETER Experiment Name: Zm_Drought_P Parameter: Age (day) Value: 11
  misc_feature: MA Experiment 20000480 PARAMETER Experiment Name: Zm_Drought_P Parameter: Organism Value: Zea mays
  misc_feature: MA Experiment 20000480 PARAMETER Experiment Name: Zm_Drought_P Parameter: Plant Line Value: 35A19
  misc_feature: MA Experiment 20000480 PARAMETER Experiment Name: Zm_Drought_P Parameter: Timepoint (hr) Value: 72
  misc_feature: MA Experiment 20000480 PARAMETER Experiment Name: Zm_Drought_P Parameter: Tissue Value: Aerial
  misc_feature: MA Experiment 20000480 PARAMETER Experiment Name: Zm_Drought_P Parameter: Treatment Value: Drought vs. No Drought
  misc_feature: MA Experiment ID: 20000492 Result: Up-regulated in Transcription
  misc_feature: MA Experiment 20000492 PARAMETER Experiment Name: Zm_Hybrid_Seed_Dev_P Parameter: DAP Value: 12
  misc_feature: MA Experiment 20000492 PARAMETER Experiment Name: Zm_Hybrid_Seed_Dev_P Parameter: Organism Value: Zea mays
  misc_feature: MA Experiment 20000492 PARAMETER Experiment Name: Zm_Hybrid_Seed_Dev_P Parameter: Plant Line Value: 35A19
  misc_feature: MA Experiment 20000492 PARAMETER Experiment Name: Zm_Hybrid_Seed_Dev_P Parameter: Tissue Value: Fert Kernel vs. Unfert Floret
  misc_feature: MA Experiment ID: 20000626 Result: Down-regulated in Transcription
  misc_feature: MA Experiment 20000626 PARAMETER Experiment Name: Zm_Herbicide-Treatments_P Parameter: Timepoint (hr) Value: 12
  misc_feature: MA Experiment 20000626 PARAMETER Experiment Name: Zm_Herbicide-Treatments_P Parameter: Tissue Value: Aerial
  misc_feature: MA Experiment 20000626 PARAMETER Experiment Name: Zm_Herbicide-Treatments_P Parameter: Treatment Value: Roundup vs. No Treatment
acaatcacaggcctcccggcctcccgtgcgctattctctatcagcttacccagcacacagtacacactctaatctccacacgacccaatagatatacggggctgaaggatgaagcttagagcaaaagggatcggcctcctgcttctccttgtcttgcttgctctttgctccaccattgaagtcggcgaggcaagaagaggcaagcattggaggtcgtcgaggagctcaccgggctcatcccagctcaagaaagacaagggaaagaagagcagctcccgccggcagtacggcgccaaccggccaggtccgaagccaccggtcagctcgacaccaagctctggtgctgccaagggaaatcatcagaatccttaccaaccaagcccaagtccaagcccgaatgcccctgacatccctcctatgccaagccctgccaatggcagcaggcattccactcccgagccgccggctccaagctgtgggaagggtcaacagcagccatcacagccgccgccagcgacctcgcagggtgcagtattcaatgtggttgattttggagccaagggtgacggagttacagacgatactaaggcttttgaaggagcgtgggctgctgcctgcaaaaagggggcatgtacagttctcgtaccaccagaactagagttcctagttgggccaatctcgttctctgggccttactgcaaatcgaatattgtctttcagctggaaggaacaatcctagctccaaccagtgctaaatcctggggttcaggcttgctccagtggctcgagttcaccaaactaaatggaatggttattcaagggaacggcattataaatggcagagggcaacaatggtggacctactcagacacagaagacgaggatgatgatgacacgtacgatgtggagtttgaaagaatgccacagattaaacctacagcattgaggttttatggtagtttcaacgttgtagtggctggtatcactattgtcaacagctcacagtgtcatcttaagtttgacaactgtcaaggagtgatggtccatgacttgactatatcctcccctgagaacagtctcaacactgacggaatacacctgcagaactccaaagatgtcagcattcatcatacaaacctggcttgtggtgacgattgcatctccatccagacaggatgcagcaacataaatatacataacgtgaattgtggaccaggccatggaatcagcataggtggactaggccgagacaacacaaaagcatgcgtatcaaatgttacagtaagagatgtcaacatgttcagaaccatgaatggtgtcagaatcaagacctggcagggtggtgtaggattggttcaagacataaggttctcaaatatacaagtctcagaggttcaaacacccatcatcatagatcagttttattgtgacagaagcacttgcagaaatcaaacatcagcagtggcagtatcaggggttcaatatgagaatatcagaggaacatttacaatcaaacctgtccattttgcatgcagtgacagcttaccttgttcaggaatctctcttaccggtgtgcaactcagaccagtgcaagtaccccactaccacctgaataacccattctgctggcaagcttttggggagctctacactccaactgtccctcctatagcttgcttgcagattggaaaacctgctggcaataacttacagtcatatgatgacatatgctgaaacactcaaagtgcctttgtttgttgattggtgcttatccatgagtggtcgttgtg

SEQ ID NO: 12032 - protein, 541 aa, Zea mays subsp. mays
  peptide (1)..(541): Ceres Seq. ID no. 12345157
  misc_feature (177)..(506): Pfam Name: Glycosyl hydrolases family 28 Pfam Description: Glycosyl hydrolases family 28
  misc_feature (205)..(541): Homolog of NCBI NO: 34911564 NR Description: putative polygalacturonase [Oryza sativa cultivar- group)] >gi|15290076|dbj|BAB63769.1| putative
MKLRAKGIGLLLLLVLLALCSTIEVGEARRGKHWRSSRSSPGSSQLKKDKGKKSSSRRQYGANRPGPKPPVSSTPSSGAAKGNHQNPYQPSPSPSPNAPDIPPMPSPANGSRHSTPEPPAPSCGKGQQQPSQPPPATSQGAVFNVVDFGAKGDGVTDDTKAFEGAWAAACKKGACTVLVPPELEFLVGPISFSGPYCKSNIVFQLEGTILAPTSAKSWGSGLLQWLEFTKLNGMVIQGNGIINGRGQQWWTYSDTEDEDDDDTYDVEFERMPQIKPTALRFYGSFNVVVAGITIVNSSQCHLKFDNCQGVMVHDLTISSPENSLNTDGIHLQNSKDVSIHHTNLACGDDCISIQTGCSNINIHNVNCGPGHGISIGGLGRDNTKACVSNVTVRDVNMFRTMNGVRIKTWQGGVGLVQDIRFSNIQVSEVQTPIIIDQFYCDRSTCRNQTSAVAVSGVQYENIRGTFTIKPVHFACSDSLPCSGISLTGVQLRPVQVPHYHLNNPFCWQAFGELYTPTVPPIACLQIGKPAGNNLQSYDDIC

SEQ ID NO: 12033 - protein, 438 aa, Zea mays subsp. mays
  peptide (1)..(438): Ceres Seq. ID no. 12345158
  misc_feature (74)..(403): Pfam Name: Glycosyl hydrolases family 28 Pfam Description: Glycosyl hydrolases family 28
  misc_feature (102)..(438): Homolog of NCBI NO: 34911564 NR Description: putative polygalacturonase [Oryza sativa cultivar- group)] >gi|15290076|dbj|BAB63769.1| putative
MPSPANGSRHSTPEPPAPSCGKGQQQPSQPPPATSQGAVFNVVDFGAKGDGVTDDTKAFEGAWAAACKKGACTVLVPPELEFLVGPISFSGPYCKSNIVFQLEGTILAPTSAKSWGSGLLQWLEFTKLNGMVIQGNGIINGRGQQWWTYSDTEDEDDDDTYDVEFERMPQIKPTALRFYGSFNVVVAGITIVNSSQCHLKFDNCQGVMVHDLTISSPENSLNTDGIHLQNSKDVSIHHTNLACGDDCISIQTGCSNINIHNVNCGPGHGISIGGLGRDNTKACVSNVTVRDVNMFRTMNGVRIKTWQGGVGLVQDIRFSNIQVSEVQTPIIIDQFYCDRSTCRNQTSAVAVSGVQYENIRGTFTIKPVHFACSDSLPCSGISLTGVQLRPVQVPHYHLNNPFCWQAFGELYTPTVPPIACLQIGKPAGNNLQSYDDIC

SEQ ID NO: 12034 - protein, 308 aa, Zea mays subsp. mays
  peptide (1)..(308): Ceres Seq. ID no. 12345159
  misc_feature (1)..(273): Pfam Name: Glycosyl hydrolases family 28 Pfam Description: Glycosyl hydrolases family 28
  misc_feature (1)..(308): Homolog of NCBI NO: 34911564 NR Description: putative polygalacturonase [Oryza sativa cultivar- group)] >gi|15290076|dbj|BAB63769.1| putative
MVIQGNGIINGRGQQWWTYSDTEDEDDDDTYDVEFERMPQIKPTALRFYGSFNVVVAGITIVNSSQCHLKFDNCQGVMVHDLTISSPENSLNTDGIHLQNSKDVSIHHTNLACGDDCISIQTGCSNINIHNVNCGPGHGISIGGLGRDNTKACVSNVTVRDVNMFRTMNGVRIKTWQGGVGLVQDIRFSNIQVSEVQTPIIIDQFYCDRSTCRNQTSAVAVSGVQYENIRGTFTIKPVHFACSDSLPCSGISLTGVQLRPVQVPHYHLNNPFCWQAFGELYTPTVPPIACLQIGKPAGNNLQSYDDIC

SEQ ID NO: 12035 - DNA, 1775 bp, Zea mays subsp. mays
  misc_feature (1)..(1775): Ceres Seq. ID no. 12342268
  misc_feature: MA Experiment ID: 108522 Result: Down-regulated in Transcription
  misc_feature: MA Experiment 108522 PARAMETER Experiment Name: Zm_42deg_Heat_P Parameter: Age (day) Value: 8
  misc_feature: MA Experiment 108522 PARAMETER Experiment Name: Zm_42deg_Heat_P Parameter: Organism Value: Zea mays
  misc_feature: MA Experiment 108522 PARAMETER Experiment Name: Zm_42deg_Heat_P Parameter: Plant Line Value: 35A19
  misc_feature: MA Experiment 108522 PARAMETER Experiment Name: Zm_42deg_Heat_P Parameter: Temperature (deg C) Value: 42 vs. 22
  misc_feature: MA Experiment 108522 PARAMETER Experiment Name: Zm_42deg_Heat_P Parameter: Timepoint (hr) Value: 1
  misc_feature: MA Experiment 108522 PARAMETER Experiment Name: Zm_42deg_Heat_P Parameter: Tissue Value: Aerial
  misc_feature: MA Experiment ID: 108523 Result: Down-regulated in Transcription
  misc_feature: MA Experiment 108523 PARAMETER Experiment Name: Zm_42deg_Heat_P Parameter: Age (day) Value: 8
  misc_feature: MA Experiment 108523 PARAMETER Experiment Name: Zm_42deg_Heat_P Parameter: Organism Value: Zea mays
  misc_feature: MA Experiment 108523 PARAMETER Experiment Name: Zm_42deg_Heat_P Parameter: Plant Line Value: 35A19
  misc_feature: MA Experiment 108523 PARAMETER Experiment Name: Zm_42deg_Heat_P Parameter: Temperature (deg C) Value: 42 vs. 22
  misc_feature: MA Experiment 108523 PARAMETER Experiment Name: Zm_42deg_Heat_P Parameter: Timepoint (hr) Value: 6
  misc_feature: MA Experiment 108523 PARAMETER Experiment Name: Zm_42deg_Heat_P Parameter: Tissue Value: Aerial
  misc_feature: MA Experiment ID: 108527 Result: Down-regulated in Transcription
  misc_feature: MA Experiment 108527 PARAMETER Experiment Name: Zm_5mM_NO_P Parameter: Age (day) Value: 8
  misc_feature: MA Experiment 108527 PARAMETER Experiment Name: Zm_5mM_NO_P Parameter: Organism Value: Zea mays
  misc_feature: MA Experiment 108527 PARAMETER Experiment Name: Zm_5mM_NO_P Parameter: Plant Line Value: 35A19
  misc_feature: MA Experiment 108527 PARAMETER Experiment Name: Zm_5mM_NO_P Parameter: Timepoint (hr) Value: 6
  misc_feature: MA Experiment 108527 PARAMETER Experiment Name: Zm_5mM_NO_P Parameter: Tissue Value: Aerial
  misc_feature: MA Experiment 108527 PARAMETER Experiment Name: Zm_5mM_NO_P Parameter: Treatment Value: 5mM NO vs. No Treatment
ctcggtgctctcgagtctcgagagtcgagactcaggggacctgatttcctcgtccggccatggcgaccggtggcaagtccgctgcccctcagccacctcccgccgcgtcctcctcctccgaacgcgcgctggagtcagtccacttctcttccggaaaccctcgcatcgaggagacccgcggcgtcgtcgtcctccaccccgacccgcccgcggccgcctcctggtctcatgtcccgttggggagtaagccgcgggtgtgcgtgctcgccgtgcccaaccacatgacctacgccgacttctgccgtttctgcggcgccttcgtccctcacacactcgagatgcgcatcgtcagaactgatggagcagaggaccagtacagcgttcttataaattttgacactcagagctccacagacagcttctataagcacttcaacgggaagcagttctcttcgctggaggggggtgtctgccatgtccgttttgtggaagaggtgcactacactgaattgattgagcatgcacatacctcagttacaaacttggctgagcaacctacatgcccagtatgtcttgaacgacttgaccaagatcctggaggtattctcacaacaatctgcaaccattctttccactgctcgtgcatatcaaaatggacagactcctcatgcccggtctgtagatattgtcagcagcaaccagagaaatccatgtgttctatttgcggaacttcggagaatctttggatatgtctaatctgtggccatgttggctgtggaaggtacaagggtggacatgctattgaacactggaaggaaactcaacattgttattcacttgagttagagacacaaaaagtgtgggactatgctggggacaactatgtacatcggcttattcagtcaaaaacagatggaaagctagttgagtacaatttccatggtgatcacacagcagagagcacgtgttcactatgcagtggtgatgccgcaatggatgaagctctactgaacagtaaatttgaagctattgttgaagagtacaatgatctcgtcacatttcaacttgaaaagcaaagaaattactatgagtcacttctactagaagtcaaggaggaaactgagaaagaaatttctgctgctactgagaaagccatgagcacaaaactccaaaagttggaagtaaagtttgacaagtgtatggaagagaaaaaatttcttgatgaagtaaatggcaatcttgtcaagaatcaggagatgtggattgaaactatacgaaaagcacaagcaagggagcaagctgcgctcagattaaaagatgagaagatcgaaaaacttcaggaagagctaagaggtttgatagcccatttcgactgccaaagtgacactgcacaagcttcaaatgcgatctcgagcgatataccagggggcatgattcttccggtagcatcagaatcgtcctcgagcggcggcgttgttggtggcactggaaacggggagcaaaattgagtaaactgcgccctgtataaagcacgtttggatcttagggacctaggtatattcttgcttccaaacccccaccgttgtaggttcagttagggtaatacacacttgttagctgtcacctcactgcccctcgattctactgtcactagccgctagtagtgtggtactagggatgaaaacgatttcatttttttttggtttttcgaaattcgtttccgatttttcgaccgtatttaatggttatggtatttttcgaaaacataattggtc

SEQ ID NO: 12036 - protein, 482 aa, Zea mays subsp. mays
  peptide (1)..(482): Ceres Seq. ID no. 12342269
  misc_feature (219)..(290): Pfam Name: Zn-finger in ubiquitin-hydrolases and other protein Pfam Description: Zn-finger in ubiquitin-hydrolases and other
  misc_feature (15)..(473): Homolog of NCBI NO: 15225236 NR Description: hypothetical protein; protein id: At2g26000.1
  misc_feature (47)..(470): Homolog of NCBI NO: 38345493 NR Description: OSJNBa0010D21.6 [Oryza sativa (japonica
  misc_feature (1)..(475): Homolog of NCBI NO: 13492093 NR Description: BRAP2 variant 1 [Mus musculus]
  misc_feature (1)..(475): Homolog of NCBI NO: 13492095 NR Description: BRAP2 variant 2 [Mus musculus]
  misc_feature (19)..(432): Homolog of NCBI NO: 15227893 NR Description: hypothetical protein; protein id: At2g42160.1
  misc_feature (15)..(477): Homolog of NCBI NO: 10800417 NR Description: BRCA1 associated protein [Homo sapiens]
  misc_feature (66)..(475): Homolog of NCBI NO: 17998683 NR Description: BRCA1 associated protein; RIKEN cDNA 3010002G07 [Mus musculus] >gi|12851424|dbj|BAB29036.1| unnamed protein
  misc_feature (15)..(440): Homolog of NCBI NO: 3252872 NR Description: BRCA1-associated protein 2 [Homo sapiens]
  misc_feature (6)..(482): Homolog of NCBI NO: 24637027 NR Description: BRAP2 [Squalus acanthias]
  misc_feature (12)..(479): Homolog of NCBI NO: 31240987 NR Description: ENSANGP00000017603 [Anopheles gambiae]
MATGGKSAAPQPPPAASSSSERALESVHFSSGNPRIEETRGVVVLHPDPPAAASWSHVPLGSKPRVCVLAVPNHMTYADFCRFCGAFVPHTLEMRIVRTDGAEDQYSVLINFDTQSSTDSFYKHFNGKQFSSLEGGVCHVRFVEEVHYTELIEHAHTSVTNLAEQPTCPVCLERLDQDPGGILTTICNHSFHCSCISKWTDSSCPVCRYCQQQPEKSMCSICGTSENLWICLICGHVGCGRYKGGHAIEHWKETQHCYSLELETQKVWDYAGDNYVHRLIQSKTDGKLVEYNFHGDHTAESTCSLCSGDAAMDEALLNSKFEAIVEEYNDLVTFQLEKQRNYYESLLLEVKEETEKEISAATEKAMSTKLQKLEVKFDKCMEEKKFLDEVNGNLVKNQEMWIETIRKAQAREQAALRLKDEKIEKLQEELRGLIAHFDCQSDTAQASNAISSDIPGGMILPVASESSSSGGVVGGTGNGEQN

SEQ ID NO: 12037 - protein, 408 aa, Zea mays subsp. mays
  peptide (1)..(408): Ceres Seq. ID no. 12342270
  misc_feature (145)..(216): Pfam Name: Zn-finger in ubiquitin-hydrolases and other protein Pfam Description: Zn-finger in ubiquitin-hydrolases and other
  misc_feature (1)..(399): Homolog of NCBI NO: 15225236 NR Description: hypothetical protein; protein id: At2g26000.1
  misc_feature (1)..(396): Homolog of NCBI NO: 38345493 NR Description: OSJNBa0010D21.6 [Oryza sativa (japonica
  misc_feature (1)..(401): Homolog of NCBI NO: 13492093 NR Description: BRAP2 variant 1 [Mus musculus]
  misc_feature (1)..(401): Homolog of NCBI NO: 13492095 NR Description: BRAP2 variant 2 [Mus musculus]
  misc_feature (1)..(358): Homolog of NCBI NO: 15227893 NR Description: hypothetical protein; protein id: At2g42160.1
  misc_feature (1)..(403): Homolog of NCBI NO: 10800417 NR Description: BRCA1 associated protein [Homo sapiens]
  misc_feature (1)..(401): Homolog of NCBI NO: 17998683 NR Description: BRCA1 associated protein; RIKEN cDNA 3010002G07 [Mus musculus] >gi|12851424|dbj|BAB29036.1| unnamed protein
  misc_feature (1)..(366): Homolog of NCBI NO: 3252872 NR Description: BRCA1-associated protein 2 [Homo sapiens]
  misc_feature (1)..(408): Homolog of NCBI NO: 24637027 NR Description: BRAP2 [Squalus acanthias]
  misc_feature (1)..(405): Homolog of NCBI NO: 31240987 NR Description: ENSANGP00000017603 [Anopheles gambiae]
MTYADFCRFCGAFVPHTLEMRIVRTDGAEDQYSVLINFDTQSSTDSFYKHFNGKQFSSLEGGVCHVRFVEEVHYTELIEHAHTSVTNLAEQPTCPVCLERLDQDPGGILTTICNHSFHCSCISKWTDSSCPVCRYCQQQPEKSMCSICGTSENLWICLICGHVGCGRYKGGHAIEHWKETQHCYSLELETQKVWDYAGDNYVHRLIQSKTDGKLVEYNFHGDHTAESTCSLCSGDAAMDEALLNSKFEAIVEEYNDLVTFQLEKQRNYYESLLLEVKEETEKEISAATEKAMSTKLQKLEVKFDKCMEEKKFLDEVNGNLVKNQEMWIETIRKAQAREQAALRLKDEKIEKLQEELRGLIAHFDCQSDTAQASNAISSDIPGGMILPVASESSSSGGVVGGTGNGEQN

SEQ ID NO: 12038 - protein, 389 aa, Zea mays subsp. mays
  peptide (1)..(389): Ceres Seq. ID no. 12342271
  misc_feature (126)..(197): Pfam Name: Zn-finger in ubiquitin-hydrolases and other protein Pfam Description: Zn-finger in ubiquitin-hydrolases and other
  misc_feature (1)..(380): Homolog of NCBI NO: 15225236 NR Description: hypothetical protein; protein id: At2g26000.1
  misc_feature (1)..(377): Homolog of NCBI NO: 38345493 NR Description: OSJNBa0010D21.6 [Oryza sativa (japonica
  misc_feature (1)..(382): Homolog of NCBI NO: 13492093 NR Description: BRAP2 variant 1 [Mus musculus]
  misc_feature (1)..(382): Homolog of NCBI NO: 13492095 NR Description: BRAP2 variant 2 [Mus musculus]
  misc_feature (1)..(339): Homolog of NCBI NO: 15227893 NR Description: hypothetical protein; protein id: At2g42160.1
  misc_feature (1)..(384): Homolog of NCBI NO: 10800417 NR Description: BRCA1 associated protein [Homo sapiens]
  misc_feature (1)..(382): Homolog of NCBI NO: 17998683 NR Description: BRCA1 associated protein; RIKEN cDNA 3010002G07 [Mus musculus] >gi|12851424|dbj|BAB29036.1| unnamed protein
  misc_feature (1)..(347): Homolog of NCBI NO: 3252872 NR Description: BRCA1-associated protein 2 [Homo sapiens]
  misc_feature (1)..(389): Homolog of NCBI NO: 24637027 NR Description: BRAP2 [Squalus acanthias]
  misc_feature (1)..(386): Homolog of NCBI NO: 31240987 NR Description: ENSANGP00000017603 [Anopheles gambiae]
MRIVRTDGAEDQYSVLINFDTQSSTDSFYKHFNGKQFSSLEGGVCHVRFVEEVHYTELIEHAHTSVTNLAEQPTCPVCLERLDQDPGGILTTICNHSFHCSCISKWTDSSCPVCRYCQQQPEKSMCSICGTSENLWICLICGHVGCGRYKGGHAIEHWKETQHCYSLELETQKVWDYAGDNYVHRLIQSKTDGKLVEYNFHGDHTAESTCSLCSGDAAMDEALLNSKFEAIVEEYNDLVTFQLEKQRNYYESLLLEVKEETEKEISAATEKAMSTKLQKLEVKFDKCMEEKKFLDEVNGNLVKNQEMWIETIRKAQAREQAALRLKDEKIEKLQEELRGLIAHFDCQSDTAQASNAISSDIPGGMILPVASESSSSGGVVGGTGNGEQN

SEQ ID NO: 12039 - DNA, 1508 bp, Zea mays subsp. mays
  misc_feature (1)..(1508): Ceres Seq. ID no. 12348820
  misc_feature: MA Experiment ID: 108527 Result: Up-regulated in Transcription
  misc_feature: MA Experiment 108527 PARAMETER Experiment Name: Zm_5mM_NO_P Parameter: Age (day) Value: 8
  misc_feature: MA Experiment 108527 PARAMETER Experiment Name: Zm_5mM_NO_P Parameter: Organism Value: Zea mays
  misc_feature: MA Experiment 108527 PARAMETER Experiment Name: Zm_5mM_NO_P Parameter: Plant Line Value: 35A19
  misc_feature: MA Experiment 108527 PARAMETER Experiment Name: Zm_5mM_NO_P Parameter: Timepoint (hr) Value: 6
  misc_feature: MA Experiment 108527 PARAMETER Experiment Name: Zm_5mM_NO_P Parameter: Tissue Value: Aerial
  misc_feature: MA Experiment 108527 PARAMETER Experiment Name: Zm_5mM_NO_P Parameter: Treatment Value: 5mM NO vs. No Treatment
  misc_feature: MA Experiment ID: 108534 Result: Up-regulated in Transcription
  misc_feature: MA Experiment 108534 PARAMETER Experiment Name: Zm_4deg_Cold_P Parameter: Age (hr) Value: 8
  misc_feature: MA Experiment 108534 PARAMETER Experiment Name: Zm_4deg_Cold_P Parameter: Organism Value: Zea mays
  misc_feature: MA Experiment 108534 PARAMETER Experiment Name: Zm_4deg_Cold_P Parameter: Plant Line Value: 35A19
  misc_feature: MA Experiment 108534 PARAMETER Experiment Name: Zm_4deg_Cold_P Parameter: Temperature (deg C) Value: 4 vs. 22
  misc_feature: MA Experiment 108534 PARAMETER Experiment Name: Zm_4deg_Cold_P Parameter: Timepoint (hr) Value: 6
  misc_feature: MA Experiment 108534 PARAMETER Experiment Name: Zm_4deg_Cold_P Parameter: Tissue Value: Aerial
  misc_feature: MA Experiment ID: 108535 Result: Up-regulated in Transcription
  misc_feature: MA Experiment 108535 PARAMETER Experiment Name: Zm_Meristem_P Parameter: Age (day) Value: 8
  misc_feature: MA Experiment 108535 PARAMETER Experiment Name: Zm_Meristem_P Parameter: Organism Value: Zea mays
  misc_feature: MA Experiment 108535 PARAMETER Experiment Name: Zm_Meristem_P Parameter: Plant Line Value: 35A19
  misc_feature: MA Experiment 108535 PARAMETER Experiment Name: Zm_Meristem_P Parameter: Tissue Value: Root Meristem vs. Above Root Meristem
  misc_feature: MA Experiment ID: 108540 Result: Up-regulated in Transcription
  misc_feature: MA Experiment 108540 PARAMETER Experiment Name: Zm_20percent_PEG_P Parameter: Age (day) Value: 8
  misc_feature: MA Experiment 108540 PARAMETER Experiment Name: Zm_20percent_PEG_P Parameter: Organism Value: Zea mays
  misc_feature: MA Experiment 108540 PARAMETER Experiment Name: Zm_20percent_PEG_P Parameter: Plant Line Value: 35A19
  misc_feature: MA Experiment 108540 PARAMETER Experiment Name: Zm_20percent_PEG_P Parameter: Timepoint (hr) Value: 6
  misc_feature: MA Experiment 108540 PARAMETER Experiment Name: Zm_20percent_PEG_P Parameter: Tissue Value: Aerial
  misc_feature: MA Experiment 108540 PARAMETER Experiment Name: Zm_20percent_PEG_P Parameter: Treatment Value: 20percent PEG vs. No Treatment
  misc_feature: MA Experiment ID: 20000477 Result: Up-regulated in Transcription
  misc_feature: MA Experiment 20000477 PARAMETER Experiment Name: Zm_5mM_SA_P Parameter: Age (day) Value: 10
  misc_feature: MA Experiment 20000477 PARAMETER Experiment Name: Zm_5mM_SA_P Parameter: Organism Value: Zea mays
  misc_feature: MA Experiment 20000477 PARAMETER Experiment Name: Zm_5mM_SA_P Parameter: Plant Line Value: 35A19
  misc_feature: MA Experiment 20000477 PARAMETER Experiment Name: Zm_5mM_SA_P Parameter: Timepoint (hr) Value: 48
  misc_feature: MA Experiment 20000477 PARAMETER Experiment Name: Zm_5mM_SA_P Parameter: Tissue Value: Aerial
  misc_feature: MA Experiment 20000477 PARAMETER Experiment Name: Zm_5mM_SA_P Parameter: Treatment Value: 5mM SA vs. No Treatment
  misc_feature: MA Experiment ID: 20000478 Result: Up-regulated in Transcription
  misc_feature: MA Experiment 20000478 PARAMETER Experiment Name: Zm_5mM_SA_P Parameter: Age (day) Value: 11
  misc_feature: MA Experiment 20000478 PARAMETER Experiment Name: Zm_5mM_SA_P Parameter: Organism Value: Zea mays
  misc_feature: MA Experiment 20000478 PARAMETER Experiment Name: Zm_5mM_SA_P Parameter: Plant Line Value: 35A19
  misc_feature: MA Experiment 20000478 PARAMETER Experiment Name: Zm_5mM_SA_P Parameter: Timepoint (hr) Value: 72
  misc_feature: MA Experiment 20000478 PARAMETER Experiment Name: Zm_5mM_SA_P Parameter: Tissue Value: Aerial
  misc_feature: MA Experiment 20000478 PARAMETER Experiment Name: Zm_5mM_SA_P Parameter: Treatment Value: 5mM SA vs. No Treatment
  misc_feature: MA Experiment ID: 20000492 Result: Down-regulated in Transcription
  misc_feature: MA Experiment 20000492 PARAMETER Experiment Name: Zm_Hybrid_Seed_Dev_P Parameter: DAP Value: 12
  misc_feature: MA Experiment 20000492 PARAMETER Experiment Name: Zm_Hybrid_Seed_Dev_P Parameter: Organism Value: Zea mays
  misc_feature: MA Experiment 20000492 PARAMETER Experiment Name: Zm_Hybrid_Seed_Dev_P Parameter: Plant Line Value: 35A19
  misc_feature: MA Experiment 20000492 PARAMETER Experiment Name: Zm_Hybrid_Seed_Dev_P Parameter: Tissue Value: Fert Kernel vs. Unfert Floret
cactgatcggattcttcggtgccgcgtttgggagcgtcggcggagttggtggcggcgggatcttcgtgccgatgctgacgctcatcattgggtttgacccgaaatcatctactgcgatatcaaagtgtatgattatgggagcctctgtttcaactgtttactacaatctcaagctaaagcatccgactttggacatgccagtgatcgattatgacctggctgtgctcatgcagcctatgctaatgcttgggatcagcattggtgttatttttaatgttatattccctgactggctggtcacagttctgctgataattcttttcctaggcacatccacaaaagcctttctgaagggcattgagacatggaagaaagagacagtaatccaaagggaggctgcgaaacttttggagcaaactgcaggtgaggaagcagagtatgcagcacttcctactggaccagatgttgcagcaaacaaaaaagccctcacatcagatgaggcgccatcgcttataaagaacatacactggaagaaggttggtcttctttcatttgtatgggtggcattccttgttcttcaggtcacaaagaattacactgctacttgctccccatggtactgggtcttgaaccttctccaggttccagtgtcactaggagtgacactgtatgaaggatttgggctgatgagtgcgaagagggtgttatcatcaaagggaagtggacaaactaccatgaaatttcatcaggtagtcgtatacggtctattcggtatagccgcaggactagttggtggactccttggtctcggaggtggcttcattatggggccactgttcttggagcttggcatccctccccaagtttcaagtgctactgctacctttgcaatgatgttctcatcttccatgtcggttgtcgaatactacctcttgaaccggtttccagtgccttatgctgtttatttcatcgttgttgcatttgttgctgccatcattggccagcatgtggtgaggaagttgatcaactggctagggcgagcatcacttatcatcttcatactggctttcatgatctttgtcagcgcgatttctctcggtggggttggcgtctctaacatggttcacaagattgagcgacatgagtacatggggtttgaggacctttgcaagtacgatgcataagaagcagggaagctgaagatgtgagctatgtggtgtgcagttctccgcaagcagaagtgggataattcaaggatagaagggttccatgatgcaatttggtgcgtaggaccgaagaggttctagcagcgacagttcctcgaagggaggctagctgcatggattggcttaagatgaattttgggcactgaattttcaaaacaaatgtagagatgattttctgccacggcagaatgtcgtcagtgcatttcgttgtaggaaatgtacactgcacatcttcagataaccatcctatagtactacgcgatatgaaatatcacatgatag

SEQ ID NO: 12040 - protein, 393 aa, Zea mays subsp. mays
  peptide (1)..(393): Ceres Seq. ID no. 12348821
  misc_feature (1)..(389): Homolog of NCBI NO: 6554197 NR Description: T23J18.20 [Arabidopsis thaliana]
  misc_feature (1)..(389): Homolog of NCBI NO: 15220419 NR Description: hypothetical protein; protein id: At1g11540.1
  misc_feature (1)..(389): Homolog of NCBI NO: 34908754 NR Description: P0415A04.10 [Oryza sativa (japonica
  misc_feature (1)..(389): Homolog of NCBI NO: 15220600 NR Description: unknown protein; protein id: At1g61740.1, by cDNA: gi_13272464 [Arabidopsis thaliana]
  misc_feature (1)..(392): Homolog of NCBI NO: 40253412 NR Description: membrane protein-like [Oryza sativa (japonica
  misc_feature (2)..(393): Homolog of NCBI NO: 40253486 NR Description: unknown protein [Oryza sativa (japonica
  misc_feature (1)..(391): Homolog of NCBI NO: 30682879 NR Description: expressed protein [Arabidopsis thaliana] unknown protein [Arabidopsis thaliana] unknown protein [Arabidopsis thaliana]
  misc_feature (1)..(389): Homolog of NCBI NO: 30686851 NR Description: expressed protein [Arabidopsis thaliana] At2g36630/F1O11.26 [Arabidopsis thaliana]
  misc_feature (189)..(384): Homolog of NCBI NO: 16660290 NR Description: hypothetical protein [Musa acuminata]
  misc_feature (206)..(391): Homolog of NCBI NO: 25412342 NR Description: hypothetical protein At2g25740 [imported] - thaliana >gi|3643608|gb|AAC42255.1| hypothetical protein thaliana] >gi|20197510|gb|AAM15102.1| hypothetical protein
LIGFFGAAFGSVGGVGGGGIFVPMLTLIIGFDPKSSTAISKCMIMGASVSTVYYNLKLKHPTLDMPVIDYDLAVLMQPMLMLGISIGVIFNVIFPDWLVTVLLIILFLGTSTKAFLKGIETWKKETVIQREAAKLLEQTAGEEAEYAALPTGPDVAANKKALTSDEAPSLIKNIHWKKVGLLSFVWVAFLVLQVTKNYTATCSPWYWVLNLLQVPVSLGVTLYEGFGLMSAKRVLSSKGSGQTTMKFHQVVVYGLFGIAAGLVGGLLGLGGGFIMGPLFLELGIPPQVSSATATFAMMFSSSMSVVEYYLLNRFPVPYAVYFIVVAFVAAIIGQHVVRKLINWLGRASLIIFILAFMIFVSAISLGGVGVSNMVHKIERHEYMGFEDLCKYDA

SEQ ID NO: 12041 - protein, 370 aa, Zea mays subsp. mays
  peptide (1)..(370): Ceres Seq. ID no. 12348822
  misc_feature (1)..(369): Homolog of NCBI NO: 40253412 NR Description: membrane protein-like [Oryza sativa (japonica
  misc_feature (1)..(370): Homolog of NCBI NO: 40253486 NR Description: unknown protein [Oryza sativa (japonica
  misc_feature (1)..(368): Homolog of NCBI NO: 30682879 NR Description: expressed protein [Arabidopsis thaliana] unknown protein [Arabidopsis thaliana] unknown protein [Arabidopsis thaliana]
  misc_feature (1)..(366): Homolog of NCBI NO: 30686851 NR Description: expressed protein [Arabidopsis thaliana] At2g36630/F1O11.26 [Arabidopsis thaliana]
  misc_feature (166)..(361): Homolog of NCBI NO: 16660290 NR Description: hypothetical protein [Musa acuminata]
  misc_feature (183)..(368): Homolog of NCBI NO: 25412342 NR Description: hypothetical protein At2g25740 [imported] - thaliana >gi|3643608|gb|AAC42255.1| hypothetical protein thaliana] >gi|20197510|gb|AAM15102.1| hypothetical protein
  misc_feature (1)..(366): Homolog of NCBI NO: 6554197 NR Description: T23J18.20 [Arabidopsis thaliana]
  misc_feature (1)..(366): Homolog of NCBI NO: 15220419 NR Description: hypothetical protein; protein id: At1g11540.1
  misc_feature (1)..(366): Homolog of NCBI NO: 34908754 NR Description: P0415A04.10 [Oryza sativa (japonica
  misc_feature (1)..(366): Homolog of NCBI NO: 15220600 NR Description: unknown protein; protein id: At1g61740.1, by cDNA: gi_13272464 [Arabidopsis thaliana]
MLTLIIGFDPKSSTAISKCMIMGASVSTVYYNLKLKHPTLDMPVIDYDLAVLMQPMLMLGISIGVIFNVIFPDWLVTVLLIILFLGTSTKAFLKGIETWKKETVIQREAAKLLEQTAGEEAEYAALPTGPDVAANKKALTSDEAPSLIKNIHWKKVGLLSFVWVAFLVLQVTKNYTATCSPWYWVLNLLQVPVSLGVTLYEGFGLMSAKRVLSSKGSGQTTMKFHQVVVYGLFGIAAGLVGGLLGLGGGFIMGPLFLELGIPPQVSSATATFAMMFSSSMSVVEYYLLNRFPVPYAVYFIVVAFVAAIIGQHVVRKLINWLGRASLIIFILAFMIFVSAISLGGVGVSNMVHKIERHEYMGFEDLCKYDA

SEQ ID NO: 12042 - protein, 351 aa, Zea mays subsp. mays
  peptide (1)..(351): Ceres Seq. ID no. 12348823
  misc_feature (1)..(350): Homolog of NCBI NO: 40253412 NR Description: membrane protein-like [Oryza sativa (japonica
  misc_feature (1)..(351): Homolog of NCBI NO: 40253486 NR Description: unknown protein [Oryza sativa (japonica
  misc_feature (1)..(349): Homolog of NCBI NO: 30682879 NR Description: expressed protein [Arabidopsis thaliana] unknown protein [Arabidopsis thaliana] unknown protein [Arabidopsis thaliana]
  misc_feature (1)..(347): Homolog of NCBI NO: 30686851 NR Description: expressed protein [Arabidopsis thaliana] At2g36630/F1O11.26 [Arabidopsis thaliana]
  misc_feature (147)..(342): Homolog of NCBI NO: 16660290 NR Description: hypothetical protein [Musa acuminata]
  misc_feature (164)..(349): Homolog of NCBI NO: 25412342 NR Description: hypothetical protein At2g25740 [imported] - thaliana >gi|3643608|gb|AAC42255.1| hypothetical protein thaliana] >gi|20197510|gb|AAM15102.1| hypothetical protein
  misc_feature (1)..(347): Homolog of NCBI NO: 6554197 NR Description: T23J18.20 [Arabidopsis thaliana]
  misc_feature (1)..(347): Homolog of NCBI NO: 15220419 NR Description: hypothetical protein; protein id: At1g11540.1
  misc_feature (1)..(347): Homolog of NCBI NO: 34908754 NR Description: P0415A04.10 [Oryza sativa (japonica
  misc_feature (1)..(347): Homolog of NCBI NO: 15220600 NR Description: unknown protein; protein id: At1g61740.1, by cDNA: gi_13272464 [Arabidopsis thaliana]
MIMGASVSTVYYNLKLKHPTLDMPVIDYDLAVLMQPMLMLGISIGVIFNVIFPDWLVTVLLIILFLGTSTKAFLKGIETWKKETVIQREAAKLLEQTAGEEAEYAALPTGPDVAANKKALTSDEAPSLIKNIHWKKVGLLSFVWVAFLVLQVTKNYTATCSPWYWVLNLLQVPVSLGVTLYEGFGLMSAKRVLSSKGSGQTTMKFHQVVVYGLFGIAAGLVGGLLGLGGGFIMGPLFLELGIPPQVSSATATFAMMFSSSMSVVEYYLLNRFPVPYAVYFIVVAFVAAIIGQHVVRKLINWLGRASLIIFILAFMIFVSAISLGGVGVSNMVHKIERHEYMGFEDLCKYDA

SEQ ID NO: 12043 - DNA, 1433 bp, Zea mays subsp. mays; identical to SEQ ID NO: 4847
  misc_feature (1)..(1433): Ceres Seq. ID no. 13492071
  misc_feature: MA Experiment ID: 108522 Result: Down-regulated in Transcription
  misc_feature: MA Experiment 108522 PARAMETER Experiment Name: Zm_42deg_Heat_P Parameter: Age (day) Value: 8
  misc_feature: MA Experiment 108522 PARAMETER Experiment Name: Zm_42deg_Heat_P Parameter: Organism Value: Zea mays
  misc_feature: MA Experiment 108522 PARAMETER Experiment Name: Zm_42deg_Heat_P Parameter: Plant Line Value: 35A19
  misc_feature: MA Experiment 108522 PARAMETER Experiment Name: Zm_42deg_Heat_P Parameter: Temperature (deg C) Value: 42 vs. 22
  misc_feature: MA Experiment 108522 PARAMETER Experiment Name: Zm_42deg_Heat_P Parameter: Timepoint (hr) Value: 1
  misc_feature: MA Experiment 108522 PARAMETER Experiment Name: Zm_42deg_Heat_P Parameter: Tissue Value: Aerial
  misc_feature: MA Experiment ID: 108527 Result: Down-regulated in Transcription
  misc_feature: MA Experiment 108527 PARAMETER Experiment Name: Zm_5mM_NO_P Parameter: Age (day) Value: 8
  misc_feature: MA Experiment 108527 PARAMETER Experiment Name: Zm_5mM_NO_P Parameter: Organism Value: Zea mays
  misc_feature: MA Experiment 108527 PARAMETER Experiment Name: Zm_5mM_NO_P Parameter: Plant Line Value: 35A19
  misc_feature: MA Experiment 108527 PARAMETER Experiment Name: Zm_5mM_NO_P Parameter: Timepoint (hr) Value: 6
  misc_feature: MA Experiment 108527 PARAMETER Experiment Name: Zm_5mM_NO_P Parameter: Tissue Value: Aerial
  misc_feature: MA Experiment 108527 PARAMETER Experiment Name: Zm_5mM_NO_P Parameter: Treatment Value: 5mM NO vs. No Treatment
  misc_feature: MA Experiment ID: 108528 Result: Down-regulated in Transcription
  misc_feature: MA Experiment 108528 PARAMETER Experiment Name: Zm_Imbibed_Seeds_P Parameter: Age (day) Value: 5 vs. 2
  misc_feature: MA Experiment 108528 PARAMETER Experiment Name: Zm_Imbibed_Seeds_P Parameter: Organism Value: Zea mays
  misc_feature: MA Experiment 108528 PARAMETER Experiment Name: Zm_Imbibed_Seeds_P Parameter: Plant Line Value: 35A19
  misc_feature: MA Experiment 108528 PARAMETER Experiment Name: Zm_Imbibed_Seeds_P Parameter: Tissue Value: Aerial vs. Embryo
  misc_feature: MA Experiment ID: 108529 Result: Down-regulated in Transcription
  misc_feature: MA Experiment 108529 PARAMETER Experiment Name: Zm_Imbibed_Seeds_P Parameter: Age (day) Value: 5 vs. 2
  misc_feature: MA Experiment 108529 PARAMETER Experiment Name: Zm_Imbibed_Seeds_P Parameter: Organism Value: Zea mays
  misc_feature: MA Experiment 108529 PARAMETER Experiment Name: Zm_Imbibed_Seeds_P Parameter: Plant Line Value: 35A19
  misc_feature: MA Experiment 108529 PARAMETER Experiment Name: Zm_Imbibed_Seeds_P Parameter: Tissue Value: Roots vs. Embryo
  misc_feature: MA Experiment ID: 108530 Result: Down-regulated in Transcription
  misc_feature: MA Experiment 108530 PARAMETER Experiment Name: Zm_Imbibed_Seeds_P Parameter: Age (day) Value: 6 vs. 2
  misc_feature: MA Experiment 108530 PARAMETER Experiment Name: Zm_Imbibed_Seeds_P Parameter: Organism Value: Zea mays
  misc_feature: MA Experiment 108530 PARAMETER Experiment Name: Zm_Imbibed_Seeds_P Parameter: Plant Line Value: 35A19
  misc_feature: MA Experiment 108530 PARAMETER Experiment Name: Zm_Imbibed_Seeds_P Parameter: Tissue Value: Aerial vs. Embryo
  misc_feature: MA Experiment ID: 108543 Result: Up-regulated in Transcription
  misc_feature: MA Experiment ID: 108546 Result: Down-regulated in Transcription
  misc_feature: MA Experiment 108546 PARAMETER Experiment Name: Zm_Imbibed_Seeds_P Parameter: Age (day) Value: 3 vs. 2
  misc_feature: MA Experiment 108546 PARAMETER Experiment Name: Zm_Imbibed_Seeds_P Parameter: Organism Value: Zea mays
  misc_feature: MA Experiment 108546 PARAMETER Experiment Name: Zm_Imbibed_Seeds_P Parameter: Plant Line Value: 35A19
  misc_feature: MA Experiment 108546 PARAMETER Experiment Name: Zm_Imbibed_Seeds_P Parameter: Tissue Value: Roots vs. Embryo
  misc_feature: MA Experiment ID: 108689 Result: Down-regulated in Transcription
  misc_feature: MA Experiment 108689 PARAMETER Experiment Name: Zm_Drought_Roots_P Parameter: Age (day) Value: 9
  misc_feature: MA Experiment 108689 PARAMETER Experiment Name: Zm_Drought_Roots_P Parameter: Organism Value: Zea mays
  misc_feature: MA Experiment 108689 PARAMETER Experiment Name: Zm_Drought_Roots_P Parameter: Plant Line Value: 35A19
  misc_feature: MA Experiment 108689 PARAMETER Experiment Name: Zm_Drought_Roots_P Parameter: Timepoint (hr) Value: 24
  misc_feature: MA Experiment 108689 PARAMETER Experiment Name: Zm_Drought_Roots_P Parameter: Tissue Value: Roots
  misc_feature: MA Experiment 108689 PARAMETER Experiment Name: Zm_Drought_Roots_P Parameter: Treatment Value: Drought vs. No Drought
  misc_feature: MA Experiment ID: 20000477 Result: Down-regulated in Transcription
  misc_feature: MA Experiment 20000477 PARAMETER Experiment Name: Zm_5mM_SA_P Parameter: Age (day) Value: 10
  misc_feature: MA Experiment 20000477 PARAMETER Experiment Name: Zm_5mM_SA_P Parameter: Organism Value: Zea mays
  misc_feature: MA Experiment 20000477 PARAMETER Experiment Name: Zm_5mM_SA_P Parameter: Plant Line Value: 35A19
  misc_feature: MA Experiment 20000477 PARAMETER Experiment Name: Zm_5mM_SA_P Parameter: Timepoint (hr) Value: 48
  misc_feature: MA Experiment 20000477 PARAMETER Experiment Name: Zm_5mM_SA_P Parameter: Tissue Value: Aerial
  misc_feature: MA Experiment 20000477 PARAMETER Experiment Name: Zm_5mM_SA_P Parameter: Treatment Value: 5mM SA vs. No Treatment
  misc_feature: MA Experiment ID: 20000535 Result: Up-regulated in Transcription
  misc_feature: MA Experiment 20000535 PARAMETER Experiment Name: Zm_Hybrid_Seed_Dev_P Parameter: DAP Value: 30 vs. 12
  misc_feature: MA Experiment 20000535 PARAMETER Experiment Name: Zm_Hybrid_Seed_Dev_P Parameter: Organism Value: Zea mays
  misc_feature: MA Experiment 20000535 PARAMETER Experiment Name: Zm_Hybrid_Seed_Dev_P Parameter: Plant Line Value: 35A19
  misc_feature: MA Experiment 20000535 PARAMETER Experiment Name: Zm_Hybrid_Seed_Dev_P Parameter: Tissue Value: Embryo vs. Unfert Floret
  misc_feature: MA Experiment ID: 20000626 Result: Down-regulated in Transcription
  misc_feature: MA Experiment 20000626 PARAMETER Experiment Name: Zm_Herbicide-Treatments_P Parameter: Timepoint (hr) Value: 12
  misc_feature: MA Experiment 20000626 PARAMETER Experiment Name: Zm_Herbicide-Treatments_P Parameter: Tissue Value: Aerial
  misc_feature: MA Experiment 20000626 PARAMETER Experiment Name: Zm_Herbicide-Treatments_P Parameter: Treatment Value: Roundup vs. No Treatment

SEQ ID NO: 12044 - protein, 374 aa, Zea mays subsp. mays; identical to SEQ ID NO: 4848
  peptide (1)..(374): Ceres Seq. ID no. 13492072
  misc_feature (223)..(325): Pfam Name: 2OG-Fe(II) oxygenase superfamily Pfam Description: 2OG-Fe(II) oxygenase superfamily
  misc_feature (223)..(325): Pfam Name: 2OG-Fe(II) oxygenase superfamily Pfam Description: 2OG-Fe(II) oxygenase superfamily
  misc_feature (1)..(374): Homolog of NCBI NO: 29123084 NR Description: 2-oxoglutarate-dependent oxygenase [Zea mays]
  misc_feature (14)..(374): Homolog of NCBI NO: 40253423 NR Description: putative 2-oxoglutarate-dependent oxygenase
  misc_feature (14)..(374): Homolog of NCBI NO: 40253419 NR Description: putative 2-oxoglutarate-dependent oxygenase
  misc_feature (16)..(374): Homolog of NCBI NO: 13878119 NR Description: putative oxidoreductase [Arabidopsis thaliana]
  misc_feature (16)..(374): Homolog of NCBI NO: 15221545 NR Description: 2-oxoglutarate-dependent dioxygenase, putative thaliana] >gi|23296334|gb|AAN13044.1| putative oxidoreductase
  misc_feature (14)..(374): Homolog of NCBI NO: 40253423 NR Description: putative 2-oxoglutarate-dependent oxygenase
  misc_feature (16)..(374): Homolog of NCBI NO: 13878119 NR Description: putative oxidoreductase [Arabidopsis thaliana]
  misc_feature (16)..(305): Homolog of NCBI NO: 25406927 NR Description: protein F12K11.6 [imported] - Arabidopsis >gi|6692693|gb|AAF24827.1|AC007592_20 F12K11.6 [Arabidopsis
  misc_feature (291)..(374): Homolog of NCBI NO: 25406927 NR Description: protein F12K11.6 [imported] - Arabidopsis >gi|6692693|gb|AAF24827.1|AC007592_20 F12K11.6 [Arabidopsis
  misc_feature (16)..(300): Homolog of NCBI NO: 25406927 NR Description: protein F12K11.6 [imported] - Arabidopsis >gi|6692693|gb|AAF24827.1|AC007592_20 F12K11.6 [Arabidopsis
  misc_feature (14)..(374): Homolog of NCBI NO: 40253431 NR Description: putative 2-oxoglutarate-dependent oxygenase
  misc_feature (16)..(374): Homolog of NCBI NO: 15221544 NR Description: 2-oxoglutarate-dependent dioxygenase, putative thaliana] >gi|13430546|gb|AAK25895.1|AF360185_1 putative [Arabidopsis thaliana] >gi|14532752|gb|AAK64077.1| putative
  misc_feature (16)..(374): Homolog of NCBI NO: 15221545 NR Description: 2-oxoglutarate-dependent dioxygenase, putative thaliana] >gi|23296334|gb|AAN13044.1| putative oxidoreductase
  misc_feature (14)..(374): Homolog of NCBI NO: 40253419 NR Description: putative 2-oxoglutarate-dependent oxygenase
  misc_feature (1)..(374): Homolog of NCBI NO: 29123084 NR Description: 2-oxoglutarate-dependent oxygenase [Zea mays]
  misc_feature (16)..(374): Homolog of NCBI NO: 15221544 NR Description: 2-oxoglutarate-dependent dioxygenase, putative thaliana] >gi|13430546|gb|AAK25895.1|AF360185_1 putative [Arabidopsis thaliana] >gi|14532752|gb|AAK64077.1| putative
  misc_feature (14)..(374): Homolog of NCBI NO: 40253431 NR Description: putative 2-oxoglutarate-dependent oxygenase
  misc_feature (16)..(300): Homolog of NCBI NO: 25406927 NR Description: protein F12K11.6 [imported] - Arabidopsis >gi|6692693|gb|AAF24827.1|AC007592_20 F12K11.6 [Arabidopsis
  misc_feature (291)..(374): Homolog of NCBI NO: 25406927 NR Description: protein F12K11.6 [imported] - Arabidopsis >gi|6692693|gb|AAF24827.1|AC007592_20 F12K11.6 [Arabidopsis
  misc_feature (16)..(305): Homolog of NCBI NO: 25406927 NR Description: protein F12K11.6 [imported] - Arabidopsis >gi|6692693|gb|AAF24827.1|AC007592_20 F12K11.6 [Arabidopsis

SEQ ID NO: 12045 - protein, 264 aa, Zea mays subsp. mays; identical to SEQ ID NO: 4849
  peptide (1)..(264): Ceres Seq. ID no. 13492073
  misc_feature (113)..(215): Pfam Name: 2OG-Fe(II) oxygenase superfamily Pfam Description: 2OG-Fe(II) oxygenase superfamily
  misc_feature (113)..(215): Pfam Name: 2OG-Fe(II) oxygenase superfamily Pfam Description: 2OG-Fe(II) oxygenase superfamily
  misc_feature (1)..(264): Homolog of NCBI NO: 29123084 NR Description: 2-oxoglutarate-dependent oxygenase [Zea mays]
  misc_feature (1)..(264): Homolog of NCBI NO: 40253423 NR Description: putative 2-oxoglutarate-dependent oxygenase
  misc_feature (1)..(264): Homolog of NCBI NO: 40253419 NR Description: putative 2-oxoglutarate-dependent oxygenase
  misc_feature (1)..(264): Homolog of NCBI NO: 13878119 NR Description: putative oxidoreductase [Arabidopsis thaliana]
  misc_feature (1)..(264): Homolog of NCBI NO: 15221545 NR Description: 2-oxoglutarate-dependent dioxygenase, putative thaliana] >gi|23296334|gb|AAN13044.1| putative oxidoreductase
  misc_feature (1)..(264): Homolog of NCBI NO: 40253423 NR Description: putative 2-oxoglutarate-dependent oxygenase
  misc_feature (1)..(264): Homolog of NCBI NO: 13878119 NR Description: putative oxidoreductase [Arabidopsis thaliana]
  misc_feature (1)..(195): Homolog of NCBI NO: 25406927 NR Description: protein F12K11.6 [imported] - Arabidopsis >gi|6692693|gb|AAF24827.1|AC007592_20 F12K11.6 [Arabidopsis
  misc_feature (181)..(264): Homolog of NCBI NO: 25406927 NR Description: protein F12K11.6 [imported] - Arabidopsis >gi|6692693|gb|AAF24827.1|AC007592_20 F12K11.6 [Arabidopsis
  misc_feature (1)..(190): Homolog of NCBI NO: 25406927 NR Description: protein F12K11.6 [imported] - Arabidopsis >gi|6692693|gb|AAF24827.1|AC007592_20 F12K11.6 [Arabidopsis
  misc_feature (1)..(264): Homolog of NCBI NO: 40253431 NR Description: putative 2-oxoglutarate-dependent oxygenase
  misc_feature (1)..(264): Homolog of NCBI NO: 15221544 NR Description: 2-oxoglutarate-dependent dioxygenase, putative thaliana] >gi|13430546|gb|AAK25895.1|AF360185_1 putative [Arabidopsis thaliana] >gi|14532752|gb|AAK64077.1| putative
  misc_feature (1)..(264): Homolog of NCBI NO: 15221545 NR Description: 2-oxoglutarate-dependent dioxygenase, putative thaliana] >gi|23296334|gb|AAN13044.1| putative oxidoreductase
  misc_feature (1)..(264): Homolog of NCBI NO: 40253419 NR Description: putative 2-oxoglutarate-dependent oxygenase
  misc_feature (1)..(264): Homolog of NCBI NO: 29123084 NR Description: 2-oxoglutarate-dependent oxygenase [Zea mays]
  misc_feature (1)..(264): Homolog of NCBI NO: 15221544 NR Description: 2-oxoglutarate-dependent dioxygenase, putative thaliana] >gi|13430546|gb|AAK25895.1|AF360185_1 putative [Arabidopsis thaliana] >gi|14532752|gb|AAK64077.1| putative
  misc_feature (1)..(264): Homolog of NCBI NO: 40253431 NR Description: putative 2-oxoglutarate-dependent oxygenase
  misc_feature (1)..(190): Homolog of NCBI NO: 25406927 NR Description: protein F12K11.6 [imported] - Arabidopsis >gi|6692693|gb|AAF24827.1|AC007592_20 F12K11.6 [Arabidopsis
  misc_feature (181)..(264): Homolog of NCBI NO: 25406927 NR Description: protein F12K11.6 [imported] - Arabidopsis >gi|6692693|gb|AAF24827.1|AC007592_20 F12K11.6 [Arabidopsis
  misc_feature (1)..(195): Homolog of NCBI NO: 25406927 NR Description: protein F12K11.6 [imported] - Arabidopsis >gi|6692693|gb|AAF24827.1|AC007592_20 F12K11.6 [Arabidopsis

SEQ ID NO: 12046 - protein, 261 aa, Zea mays subsp. mays; identical to SEQ ID NO: 4850
  peptide (1)..(261): Ceres Seq. ID no. 13492074
  misc_feature (110)..(212): Pfam Name: 2OG-Fe(II) oxygenase superfamily Pfam Description: 2OG-Fe(II) oxygenase superfamily
  misc_feature (110)..(212): Pfam Name: 2OG-Fe(II) oxygenase superfamily Pfam Description: 2OG-Fe(II) oxygenase superfamily
  misc_feature (1)..(261): Homolog of NCBI NO: 29123084 NR Description: 2-oxoglutarate-dependent oxygenase [Zea mays]
  misc_feature (1)..(261): Homolog of NCBI NO: 40253423 NR Description: putative 2-oxoglutarate-dependent oxygenase
  misc_feature (1)..(261): Homolog of NCBI NO: 40253419 NR Description: putative 2-oxoglutarate-dependent oxygenase
  misc_feature (1)..(261): Homolog of NCBI NO: 13878119 NR Description: putative oxidoreductase [Arabidopsis thaliana]
  misc_feature (1)..(261): Homolog of NCBI NO: 15221545 NR Description: 2-oxoglutarate-dependent dioxygenase, putative thaliana] >gi|23296334|gb|AAN13044.1| putative oxidoreductase
  misc_feature (1)..(261): Homolog of NCBI NO: 40253423 NR Description: putative 2-oxoglutarate-dependent oxygenase
  misc_feature (1)..(261): Homolog of NCBI NO: 13878119 NR Description: putative oxidoreductase [Arabidopsis thaliana]
  misc_feature (1)..(192): Homolog of NCBI NO: 25406927 NR Description: protein F12K11.6 [imported] - Arabidopsis >gi|6692693|gb|AAF24827.1|AC007592_20 F12K11.6 [Arabidopsis
  misc_feature (178)..(261): Homolog of NCBI NO: 25406927 NR Description: protein F12K11.6 [imported] - Arabidopsis >gi|6692693|gb|AAF24827.1|AC007592_20 F12K11.6 [Arabidopsis
  misc_feature (1)..(187): Homolog of NCBI NO: 25406927 NR Description: protein F12K11.6 [imported] - Arabidopsis >gi|6692693|gb|AAF24827.1|AC007592_20 F12K11.6 [Arabidopsis
  misc_feature (1)..(261): Homolog of NCBI NO: 40253431 NR Description: putative 2-oxoglutarate-dependent oxygenase
  misc_feature (1)..(261): Homolog of NCBI NO: 15221544 NR Description: 2-oxoglutarate-dependent dioxygenase, putative thaliana] >gi|13430546|gb|AAK25895.1|AF360185_1 putative [Arabidopsis thaliana] >gi|14532752|gb|AAK64077.1| putative
  misc_feature (1)..(261): Homolog of NCBI NO: 15221545 NR Description: 2-oxoglutarate-dependent dioxygenase, putative thaliana] >gi|23296334|gb|AAN13044.1| putative oxidoreductase
  misc_feature (1)..(261): Homolog of NCBI NO: 40253419 NR Description: putative 2-oxoglutarate-dependent oxygenase
  misc_feature (1)..(261): Homolog of NCBI NO: 29123084 NR Description: 2-oxoglutarate-dependent oxygenase [Zea mays]
  misc_feature (1)..(261): Homolog of NCBI NO: 15221544 NR Description: 2-oxoglutarate-dependent dioxygenase, putative thaliana] >gi|13430546|gb|AAK25895.1|AF360185_1 putative [Arabidopsis thaliana] >gi|14532752|gb|AAK64077.1| putative
  misc_feature (1)..(261): Homolog of NCBI NO: 40253431 NR Description: putative 2-oxoglutarate-dependent oxygenase
  misc_feature (1)..(187): Homolog of NCBI NO: 25406927 NR Description: protein F12K11.6 [imported] - Arabidopsis >gi|6692693|gb|AAF24827.1|AC007592_20 F12K11.6 [Arabidopsis
  misc_feature (178)..(261): Homolog of NCBI NO: 25406927 NR Description: protein F12K11.6 [imported] - Arabidopsis >gi|6692693|gb|AAF24827.1|AC007592_20 F12K11.6 [Arabidopsis
  misc_feature (1)..(192): Homolog of NCBI NO: 25406927 NR Description: protein F12K11.6 [imported] - Arabidopsis >gi|6692693|gb|AAF24827.1|AC007592_20 F12K11.6 [Arabidopsis

SEQ ID NO: 12047 - DNA, 1464 bp, Zea mays subsp. mays
  misc_feature (1)..(1464): Ceres Seq. ID no. 12411682
  misc_feature: MA Experiment ID: 108523 Result: Down-regulated in Transcription
  misc_feature: MA Experiment 108523 PARAMETER Experiment Name: Zm_42deg_Heat_P Parameter: Age (day) Value: 8
  misc_feature: MA Experiment 108523 PARAMETER Experiment Name: Zm_42deg_Heat_P Parameter: Organism Value: Zea mays
  misc_feature: MA Experiment 108523 PARAMETER Experiment Name: Zm_42deg_Heat_P Parameter: Plant Line Value: 35A19
  misc_feature: MA Experiment 108523 PARAMETER Experiment Name: Zm_42deg_Heat_P Parameter: Temperature (deg C) Value: 42 vs. 22
  misc_feature: MA Experiment 108523 PARAMETER Experiment Name: Zm_42deg_Heat_P Parameter: Timepoint (hr) Value: 6
  misc_feature: MA Experiment 108523 PARAMETER Experiment Name: Zm_42deg_Heat_P Parameter: Tissue Value: Aerial
  misc_feature: MA Experiment ID: 108544 Result: Up-regulated in Transcription
atccacccaccccctacagttcagttcagttcagttggtctaggccatggccatgtccgcttcctcctcctcgcgcgccctcctccgccggatcggcggcgcgctcctccgccgctccttctcctcctcatccgccgcctccgcagggtaccacgtcgcgggcgggcccagctacatgcgcggcgccgtcttctgggagcccggccgcccgctcacgctcgaggagttccgcatgccgcggcccaaggccggcgagctcctcatcaagaccaaagcctgcggggtctgtcactccgatctccatgtcctcaaaggcgagctccctttctccacgccctgtgtcgtgggccatgagatcactggagaggtggttgaccatggcacgcacactcctgttgagatcatcaacaggttcccagtcggaagtcacgtcgtcggcgccttcataatgccatgtgggaactgcttctactgcgttaagggccaagaagatctgtgtgagtctttcttcgcgtataatcgtgccaaggggacactctatgatggcgagacacggctgtttctaaggggcaatgggaaaccggtgtacatgtatagtatgggagggcttgcagagtattgtgttgtcccagccaatgcgctagcagttctccctgactcactgccatacacagaatcagcaattttaggatgtgcagtgtttaccgcgtatggtgccctgaggcatgctgctgaaatgcggcctggtgattcagtagctgtgatcggagttggaggggttgggtcaagctgtttacagatagcaaaagcctttggagcttcccaagtcattgcagtggatgtccttgatgagaagcttcagaacgctacaacacttggagcaacccacactgtaaatgcagcaaaagatgatgcagttgaaaggataaaggaaattactgatggtaggggtgtagatgtggctatagaggcacttggtaaggcgttaacattttcccagtgcgccaagagcgtgcgtgatggaggcaaagctgttatgatcgggcttgctgcaacgaacgtaatgggagaggttgatataacccgtcttgtccgacgacaggtgaaaatcattggctcatatggcgcaagggctaggcaagaccttcctcagatagtgaagctcgcggagagtggtgccttcaatctccaaaacaccatatcaaggaaatgcaaatttgaggaggcgaatggcgcctatgaggatctcaatcagggcaagatcgtaggacgagctgtggttgagatcatggagtgatgacggacaaggtaatcaatcctgtggttccaagtctgggtcacacaacaataaagttttgcgtgctctttcacagcattgtcaaaatctgtagatgaccaaactgcattgtgtgtgtgtgtgtgtgtgtgtgtgacagtgtgttgttggaattaacatttgccctt

SEQ ID NO: 12048 - protein, 416 aa, Zea mays subsp. mays
  peptide (1)..(416): Ceres Seq. ID no. 12411683
  misc_feature (4)..(415): Homolog of NCBI NO: 30697873 NR Description: oxidoreductase, zinc-binding dehydrogenase family thaliana] >gi|15982719|gb|AAL09729.1| AT5g63620/MBK5_9 thaliana] >gi|24797036|gb|AAN64530.1| At5g63620/MBK5_9
  misc_feature (4)..(415): Homolog of NCBI NO: 21554156 NR Description: alcohol dehydrogenase-like protein [Arabidopsis
  misc_feature (4)..(415): Homolog of NCBI NO: 30697875 NR Description: oxidoreductase, zinc-binding dehydrogenase family
  misc_feature (34)..(415): Homolog of NCBI NO: 10177043 NR Description: alcohol dehydrogenase-like protein [Arabidopsis
  misc_feature (44)..(412): Homolog of NCBI NO: 15897400 NR Description: Alcohol dehydrogenase (Zn containing) (adh-1) solfataricus] >gi|25282883|pir||D90192 alcohol dehydrogenase (Zn
  misc_feature (44)..(412): Homolog of NCBI NO: 15922376 NR Description: 361aa long hypothetical alcohol dehydrogenase tokodaii] >gi|15623165|dbj|BAB67154.1| 361aa long hypothetical
  misc_feature (186)..(412): Homolog of NCBI NO: 18313695 NR Description: alcohol dehydrogenase (Zinc) [Pyrobaculum >gi|18161247|gb|AAL64544.1| alcohol dehydrogenase (Zinc)
  misc_feature (41)..(151): Homolog of NCBI NO: 18313695 NR Description: alcohol dehydrogenase (Zinc) [Pyrobaculum >gi|18161247|gb|AAL64544.1| alcohol dehydrogenase (Zinc)
  misc_feature (186)..(412): Homolog of NCBI NO: 15899240 NR Description: Alcohol dehydrogenase (Zn containing) (adh-9) solfataricus] >gi|25282876|pir||D90422 alcohol dehydrogenase (Zn
  misc_feature (44)..(152): Homolog of NCBI NO: 15899240 NR Description: Alcohol dehydrogenase (Zn containing) (adh-9) solfataricus] >gi|25282876|pir||D90422 alcohol dehydrogenase (Zn
MAMSASSSSRALLRRIGGALLRRSFSSSSAASAGYHVAGGPSYMRGAVFWEPGRPLTLEEFRMPRPKAGELLIKTKACGVCHSDLHVLKGELPFSTPCVVGHEITGEVVDHGTHTPVEIINRFPVGSHVVGAFIMPCGNCFYCVKGQEDLCESFFAYNRAKGTLYDGETRLFLRGNGKPVYMYSMGGLAEYCVVPANALAVLPDSLPYTESAILGCAVFTAYGALRHAAEMRPGDSVAVIGVGGVGSSCLQIAKAFGASQVIAVDVLDEKLQNATTLGATHTVNAAKDDAVERIKEITDGRGVDVAIEALGKALTFSQCAKSVRDGGKAVMIGLAATNVMGEVDITRLVRRQVKIIGSYGARARQDLPQIVKLAESGAFNLQNTISRKCKFEEANGAYEDLNQGKIVGRAVVEIME

SEQ ID NO: 12049 - protein, 414 aa, Zea mays subsp. mays
  peptide (1)..(414): Ceres Seq. ID no. 12411684
  misc_feature (2)..(413): Homolog of NCBI NO: 30697873 NR Description: oxidoreductase, zinc-binding dehydrogenase family thaliana] >gi|15982719|gb|AAL09729.1| AT5g63620/MBK5_9 thaliana] >gi|24797036|gb|AAN64530.1| At5g63620/MBK5_9
  misc_feature (2)..(413): Homolog of NCBI NO: 21554156 NR Description: alcohol dehydrogenase-like protein [Arabidopsis
  misc_feature (2)..(413): Homolog of NCBI NO: 30697875 NR Description: oxidoreductase, zinc-binding dehydrogenase family
  misc_feature (32)..(413): Homolog of NCBI NO: 10177043 NR Description: alcohol dehydrogenase-like protein [Arabidopsis
  misc_feature (42)..(410): Homolog of NCBI NO: 15897400 NR Description: Alcohol dehydrogenase (Zn containing) (adh-1) solfataricus] >gi|25282883|pir||D90192 alcohol dehydrogenase (Zn
  misc_feature (42)..(410): Homolog of NCBI NO: 15922376 NR Description: 361aa long hypothetical alcohol dehydrogenase tokodaii] >gi|15623165|dbj|BAB67154.1| 361aa long hypothetical
  misc_feature (184)..(410): Homolog of NCBI NO: 18313695 NR Description: alcohol dehydrogenase (Zinc) [Pyrobaculum >gi|18161247|gb|AAL64544.1| alcohol dehydrogenase (Zinc)
  misc_feature (39)..(149): Homolog of NCBI NO: 18313695 NR Description: alcohol dehydrogenase (Zinc) [Pyrobaculum >gi|18161247|gb|AAL64544.1| alcohol dehydrogenase (Zinc)
  misc_feature (184)..(410): Homolog of NCBI NO: 15899240 NR Description: Alcohol dehydrogenase (Zn containing) (adh-9) solfataricus] >gi|25282876|pir||D90422 alcohol dehydrogenase (Zn
  misc_feature (42)..(150): Homolog of NCBI NO: 15899240 NR Description: Alcohol dehydrogenase (Zn containing) (adh-9) solfataricus] >gi|25282876|pir||D90422 alcohol dehydrogenase (Zn
MSASSSSRALLRRIGGALLRRSFSSSSAASAGYHVAGGPSYMRGAVFWEPGRPLTLEEFRMPRPKAGELLIKTKACGVCHSDLHVLKGELPFSTPCVVGHEITGEVVDHGTHTPVEIINRFPVGSHVVGAFIMPCGNCFYCVKGQEDLCESFFAYNRAKGTLYDGETRLFLRGNGKPVYMYSMGGLAEYCVVPANALAVLPDSLPYTESAILGCAVFTAYGALRHAAEMRPGDSVAVIGVGGVGSSCLQIAKAFGASQVIAVDVLDEKLQNATTLGATHTVNAAKDDAVERIKEITDGRGVDVAIEALGKALTFSQCAKSVRDGGKAVMIGLAATNVMGEVDITRLVRRQVKIIGSYGARARQDLPQIVKLAESGAFNLQNTISRKCKFEEANGAYEDLNQGKIVGRAVVEIME

SEQ ID NO: 12050 - protein, 373 aa, Zea mays subsp. mays
  peptide (1)..(373): Ceres Seq. ID no. 12411685
  misc_feature (1)..(372): Homolog of NCBI NO: 30697873 NR Description: oxidoreductase, zinc-binding dehydrogenase family thaliana] >gi|15982719|gb|AAL09729.1| AT5g63620/MBK5_9 thaliana] >gi|24797036|gb|AAN64530.1| At5g63620/MBK5_9
  misc_feature (1)..(372): Homolog of NCBI NO: 21554156 NR Description: alcohol dehydrogenase-like protein [Arabidopsis
  misc_feature (1)..(372): Homolog of NCBI NO: 30697875 NR Description: oxidoreductase, zinc-binding dehydrogenase family
  misc_feature (1)..(372): Homolog of NCBI NO: 10177043 NR Description: alcohol dehydrogenase-like protein [Arabidopsis
  misc_feature (1)..(369): Homolog of NCBI NO: 15897400 NR Description: Alcohol dehydrogenase (Zn containing) (adh-1) solfataricus] >gi|25282883|pir||D90192 alcohol dehydrogenase (Zn
  misc_feature (1)..(369): Homolog of NCBI NO: 15922376 NR Description: 361aa long hypothetical alcohol dehydrogenase tokodaii] >gi|15623165|dbj|BAB67154.1| 361aa long hypothetical
  misc_feature (143)..(369): Homolog of NCBI NO: 18313695 NR Description: alcohol dehydrogenase (Zinc) [Pyrobaculum >gi|18161247|gb|AAL64544.1| alcohol dehydrogenase (Zinc)
  misc_feature (1)..(108): Homolog of NCBI NO: 18313695 NR Description: alcohol dehydrogenase (Zinc) [Pyrobaculum >gi|18161247|gb|AAL64544.1| alcohol dehydrogenase (Zinc)
  misc_feature (143)..(369): Homolog of NCBI NO: 15899240 NR Description: Alcohol dehydrogenase (Zn containing) (adh-9) solfataricus] >gi|25282876|pir||D90422 alcohol dehydrogenase (Zn
  misc_feature (1)..(109): Homolog of NCBI NO: 15899240 NR Description: Alcohol dehydrogenase (Zn containing) (adh-9) solfataricus] >gi|25282876|pir||D90422 alcohol dehydrogenase (Zn
MRGAVFWEPGRPLTLEEFRMPRPKAGELLIKTKACGVCHSDLHVLKGELPFSTPCVVGHEITGEVVDHGTHTPVEIINRFPVGSHVVGAFIMPCGNCFYCVKGQEDLCESFFAYNRAKGTLYDGETRLFLRGNGKPVYMYSMGGLAEYCVVPANALAVLPDSLPYTESAILGCAVFTAYGALRHAAEMRPGDSVAVIGVGGVGSSCLQIAKAFGASQVIAVDVLDEKLQNATTLGATHTVNAAKDDAVERIKEITDGRGVDVAIEALGKALTFSQCAKSVRDGGKAVMIGLAATNVMGEVDITRLVRRQVKIIGSYGARARQDLPQIVKLAESGAFNLQNTISRKCKFEEANGAYEDLNQGKIVGRAVVEIME

SEQ ID NO: 12051 - DNA, 1587 bp, Zea mays subsp. mays
  misc_feature (1)..(1587): Ceres Seq. ID no. 12341285
  misc_feature: MA Experiment ID: 20000535 Result: Up-regulated in Transcription
  misc_feature: MA Experiment 20000535 PARAMETER Experiment Name: Zm_Hybrid_Seed_Dev_P Parameter: DAP Value: 30 vs. 12
  misc_feature: MA Experiment 20000535 PARAMETER Experiment Name: Zm_Hybrid_Seed_Dev_P Parameter: Organism Value: Zea mays
  misc_feature: MA Experiment 20000535 PARAMETER Experiment Name: Zm_Hybrid_Seed_Dev_P Parameter: Plant Line Value: 35A19
  misc_feature: MA Experiment 20000535 PARAMETER Experiment Name: Zm_Hybrid_Seed_Dev_P Parameter: Tissue Value: Embryo vs. Unfert Floret
ctggaaacaaaccacggagccgtgaccgaggggagcggcggcggcgcaaggtgtcttcctctccgtcgccggcaacgtcgacaccgctggcaagcttctctccggttgtccctgctccagtaagagtaggcgaggacgagcctcccccatcctgggtgttggtgcctgacccattttctcaagataagatgttcagaggttctcctaagatagtagctttatctaaagctgctcaaaagaaggcttctcctaaagctgcaacaacaaagaaatgtggcggtggtgttgagagagctacatggaatgttgaattggagaagagtcttgttgacttgttgttttaacacaacatgcctccatatagggctcaaaatgggtggagtccagatgcttggaataaaatagtttctgaattccacaagaagcatgaatatgttacattcaacaagatccaaattcaggaaaaggagagggaattgaaaagggaatacaagatattgaaggaggcaagaaaacaaagtggagtttcttggaatgaaaaaagatgcatgatcattgctgaaccaacgatatgggacaacattatcactacatttcctagagctaagaagttccgcaagaagtcttttcctctctttgatgccttgggtgaattatatgatggtcacatcgcacaagggacttggaacattacctctactcaaccagtacaaaattctaatgatggagagcaactaaaaaccatagaagtggaagatgaagatactaatgaaccagaagaagatgcaagaatagaacaagatgaagatatagtaattgttgaaagggttgaacagaggttacctaaaaggtcaggtgcaccaactgtcaatcaagagaaggagacaaaaagagtgaggaaagatgcactagaagggctgatagggaggtaccttgatgtgaaaacgaagcaagttgcagatgaggctgcacaatcagcaaaagtaaaggatgttgctcaagataatgatttttctatcaagaggtgtatttctgttcttaagactatggatatgacaagagatgagaaggtcaaagcagctgaggtgttcaacataccaaattacagggaaacatttatttgtttcaatgatgatgagccagaagtcgctctcctttggctaagagggaagatggataaactctaaaggcaggtctggtggaacacggacaggctctgacttcgttcgagaccatccatttgattcttgcaccggttcttttctcagttcagttgaaagctagcactagatgcctacacggaatagaaggtccaccacagtccacagtcgttcatccaagcagctgtgtagatgtcgcctccttttattttgtcccttttctggttgtcatgtccctttttctggttgtcacgttgagctcttggtttgcagtttcatgttggtgtgcattgtctgaatagaaaactgaaaggctgttgtttcagtttcatgttggtgtgcgtcctctgaatagaaaactgaaaagttgtttcagtttcatgttggtgtgcgtcctctgaatagaaaactgaaaggctgttgttcc

SEQ ID NO: 12052 - protein, 278 aa, Zea mays subsp. mays
  peptide (1)..(278): Ceres Seq. ID no. 12341286
  misc_feature (1)..(187): Homolog of NCBI NO: 34907580 NR Description: B1078G07.31 [Oryza sativa (japonica
  misc_feature (1)..(275): Homolog of NCBI NO: 37535590 NR Description: hypothetical protein [Oryza sativa (japonica group)] >gi|22726005|gb|AAN05005.1| hypothetical protein [Oryza
  misc_feature (1)..(246): Homolog of NCBI NO: 21741991 NR Description: OSJNBa0060P14.12 [Oryza sativa (japonica
  misc_feature (1)..(275): Homolog of NCBI NO: 38344751 NR Description: OSJNBa0089K21.9 [Oryza sativa (japonica
  misc_feature (1)..(144): Homolog of NCBI NO: 34394471 NR Description: unknown protein [Oryza sativa (japonica
  misc_feature (1)..(144): Homolog of NCBI NO: 34915330 NR Description: hypothetical protein~similar to Oryza sativa
  misc_feature (1)..(144): Homolog of NCBI NO: 37535236 NR Description: hypothetical protein [Oryza sativa (japonica group)] >gi|13489169|gb|AAK27803.1| hypothetical protein [Oryza
  misc_feature (147)..(275): Homolog of NCBI NO: 34913838 NR Description: OSJNBa0042P21.26 [Oryza sativa (japonica
  misc_feature (32)..(247): Homolog of NCBI NO: 38605913 NR Description: OSJNBb0088C09.7 [Oryza sativa (japonica
  misc_feature (1)..(152): Homolog of NCBI NO: 25371570 NR Description: hypothetical protein AT4g02210 [imported] - thaliana >gi|3912927|gb|AAC78711.1| hypothetical protein thaliana] >gi|7268981|emb|CAB80714.1| hypothetical protein
MPPYRAQNGWSPDAWNKIVSEFHKKHEYVTFNKIQIQEKERELKREYKILKEARKQSGVSWNEKRCMIIAEPTIWDNIITTFPRAKKFRKKSFPLFDALGELYDGHIAQGTWNITSTQPVQNSNDGEQLKTIEVEDEDTNEPEEDARIEQDEDIVIVERVEQRLPKRSGAPTVNQEKETKRVRKDALEGLIGRYLDVKTKQVADEAAQSAKVKDVAQDNDFSIKRCISVLKTMDMTRDEKVKAAEVFNIPNYRETFICFNDDEPEVALLWLRGKMDKL

SEQ ID NO: 12053 - protein, 212 aa, Zea mays subsp. mays
  peptide (1)..(212): Ceres Seq. ID no. 12341287
  misc_feature (1)..(78): Homolog of NCBI NO: 37535236 NR Description: hypothetical protein [Oryza sativa (japonica group)] >gi|13489169|gb|AAK27803.1| hypothetical protein [Oryza
  misc_feature (81)..(209): Homolog of NCBI NO: 34913838 NR Description: OSJNBa0042P21.26 [Oryza sativa (japonica
  misc_feature (1)..(181): Homolog of NCBI NO: 38605913 NR Description: OSJNBb0088C09.7 [Oryza sativa (japonica
  misc_feature (1)..(86): Homolog of NCBI NO: 25371570 NR Description: hypothetical protein AT4g02210 [imported] - thaliana >gi|3912927|gb|AAC78711.1| hypothetical protein thaliana] >gi|7268981|emb|CAB80714.1| hypothetical protein
  misc_feature (1)..(121): Homolog of NCBI NO: 34907580 NR Description: B1078G07.31 [Oryza sativa (japonica
  misc_feature (1)..(209): Homolog of NCBI NO: 37535590 NR Description: hypothetical protein [Oryza sativa (japonica group)] >gi|22726005|gb|AAN05005.1| hypothetical protein [Oryza
  misc_feature (1)..(180): Homolog of NCBI NO: 21741991 NR Description: OSJNBa0060P14.12 [Oryza sativa (japonica
  misc_feature (1)..(209): Homolog of NCBI NO: 38344751 NR Description: OSJNBa0089K21.9 [Oryza sativa (japonica
  misc_feature (1)..(78): Homolog of NCBI NO: 34394471 NR Description: unknown protein [Oryza sativa (japonica
  misc_feature (1)..(78): Homolog of NCBI NO: 34915330 NR Description: hypothetical protein~similar to Oryza sativa
MIIAEPTIWDNIITTFPRAKKFRKKSFPLFDALGELYDGHIAQGTWNITSTQPVQNSNDGEQLKTIEVEDEDTNEPEEDARIEQDEDIVIVERVEQRLPKRSGAPTVNQEKETKRVRKDALEGLIGRYLDVKTKQVADEAAQSAKVKDVAQDNDFSIKRCISVLKTMDMTRDEKVKAAEVFNIPNYRETFICFNDDEPEVALLWLRGKMDKL

SEQ ID NO: 12054 - DNA, 803 bp, Zea mays subsp. mays
  misc_feature (1)..(803): Ceres Seq. ID no. 12413597
  misc_feature: MA Experiment ID: 108689 Result: Up-regulated in Transcription
  misc_feature: MA Experiment 108689 PARAMETER Experiment Name: Zm_Drought_Roots_P Parameter: Age (day) Value: 9
  misc_feature: MA Experiment 108689 PARAMETER Experiment Name: Zm_Drought_Roots_P Parameter: Organism Value: Zea mays
  misc_feature: MA Experiment 108689 PARAMETER Experiment Name: Zm_Drought_Roots_P Parameter: Plant Line Value: 35A19
  misc_feature: MA Experiment 108689 PARAMETER Experiment Name: Zm_Drought_Roots_P Parameter: Timepoint (hr) Value: 24
  misc_feature: MA Experiment 108689 PARAMETER Experiment Name: Zm_Drought_Roots_P Parameter: Tissue Value: Roots
  misc_feature: MA Experiment 108689 PARAMETER Experiment Name: Zm_Drought_Roots_P Parameter: Treatment Value: Drought vs. No Drought
  misc_feature: MA Experiment ID: 20000534 Result: Up-regulated in Transcription
  misc_feature: MA Experiment 20000534 PARAMETER Experiment Name: Zm_Hybrid_Pollen_P Parameter: Age (day) Value: 8
  misc_feature: MA Experiment 20000534 PARAMETER Experiment Name: Zm_Hybrid_Pollen_P Parameter: Organism Value: Zea mays
  misc_feature: MA Experiment 20000534 PARAMETER Experiment Name: Zm_Hybrid_Pollen_P Parameter: Plant Line Value: 35A19
  misc_feature: MA Experiment 20000534 PARAMETER Experiment Name: Zm_Hybrid_Pollen_P Parameter: Tissue Value: Pollen vs. Aerial
gcacgagaccattacctagaacatcctaatcgaaaagtggtgctagaagcaactgaaaacagccgagcgatctcctctccctctccctctccgatccattctccagcgcagcgaagtaaacatgtctgaccgggcaaagatgtcgtggcaggcgtacgtggacgagcacctgatgtgcgagatcgagggccaccacctcgcggcggcggccatcgtcggccacgacggtgccgcctgggcgcagagcacggcgttccccgagttcaagaccgaggacatggccaacatcatgaaggacttcgacgagccagggcacctcgcgccgacaggcctgttcctcggacctaccaagtacatggtcatccaaggcgagcctggtgccgtcatccgtggcaagaagggatcaggaggcatcaccgtgaagaagacagggcaggcactcgtcgttggcatctacgacgagccgatgacgcctggccagtgcaacatggtggtggaaaggctgggcgactacctgcttgaacagggcatgtaactactacgtaccagctggaatgcatgtcgacgacgatggtttcgagtttcgacttccaataatagtaacaacaaagcaaaggccttcctcccggcgtatttgctttgtctcttctcctccacgccataagatatctagcaattggtgactcgccttaattagttcgctttgcttttgaggttgactcgaccattttgctgtagcgtgaattgcatgcatggacatgcaacgctccaatggcctttggaatnnggaattttttttttcc

SEQ ID NO: 12055 - protein, 137 aa, Zea mays subsp. mays
  peptide (1)..(137): Ceres Seq. ID no. 12413598
  misc_feature (8)..(132): Pfam Name: Profilin Pfam Description: Profilin
  misc_feature (1)..(137): Homolog of NCBI NO: 422032 NR Description: profilin 2 - maize >gi|313140|emb|CAA51719.1|
  misc_feature (7)..(137): Homolog of NCBI NO: 548597 NR Description: PROFILIN 2 (ZMPRO2)
  misc_feature (7)..(137): Homolog of NCBI NO: 464466 NR Description: Profilin 1 (ZmPRO1) >gi|422031|pir||S35796
  misc_feature (7)..(137): Homolog of NCBI NO: 37532730 NR Description: Profilin A [Oryza sativa (japonica
  misc_feature (7)..(137): Homolog of NCBI NO: 464470 NR Description: Profilin 3 (ZmPRO3) >gi|422033|pir||S35798
  misc_feature (7)..(137): Homolog of NCBI NO: 3914422 NR Description: Profilin (Pollen allergen Cyn d 12) profilin 2 [Cynodon dactylon] >gi|2154730|emb|CAA69670.1|
  misc_feature (7)..(137): Homolog of NCBI NO: 14423860 NR Description: Profilin 3 (Pollen allergen Hev b 8.0201)
  misc_feature (7)..(137): Homolog of NCBI NO: 3914432 NR Description: PROFILIN 2/4 (POLLEN ALLERGEN PHL P 11) (PHL P >gi|2415698|emb|CAA70608.1| profilin 2 [Phleum pratense]
  misc_feature (7)..(137): Homolog of NCBI NO: 21322677 NR Description: profilin [Phoenix dactylifera]
  misc_feature (7)..(137): Homolog of NCBI NO: 464471 NR Description: PROFILIN 1 (POLLEN ALLERGEN PHL P 11) (PHL P XI)
MSDRAKMSWQAYVDEHLMCEIEGHHLAAAAIVGHDGAAWAQSTAFPEFKTEDMANIMKDFDEPGHLAPTGLFLGPTKYMVIQGEPGAVIRGKKGSGGITVKKTGQALVVGIYDEPMTPGQCNMVVERLGDYLLEQGM

SEQ ID NO: 12056 - protein, 131 aa, Zea mays subsp. mays
  peptide (1)..(131): Ceres Seq. ID no. 12413599
  misc_feature (2)..(126): Pfam Name: Profilin Pfam Description: Profilin
  misc_feature (1)..(131): Homolog of NCBI NO: 422032 NR Description: profilin 2 - maize >gi|313140|emb|CAA51719.1|
  misc_feature (1)..(131): Homolog of NCBI NO: 548597 NR Description: PROFILIN 2 (ZMPRO2)
  misc_feature (1)..(131): Homolog of NCBI NO: 464466 NR Description: Profilin 1 (ZmPRO1) >gi|422031|pir||S35796
  misc_feature (1)..(131): Homolog of NCBI NO: 37532730 NR Description: Profilin A [Oryza sativa (japonica
  misc_feature (1)..(131): Homolog of NCBI NO: 464470 NR Description: Profilin 3 (ZmPRO3) >gi|422033|pir||S35798
  misc_feature (1)..(131): Homolog of NCBI NO: 3914422 NR Description: Profilin (Pollen allergen Cyn d 12) profilin 2 [Cynodon dactylon] >gi|2154730|emb|CAA69670.1|
  misc_feature (1)..(131): Homolog of NCBI NO: 14423860 NR Description: Profilin 3 (Pollen allergen Hev b 8.0201)
  misc_feature (1)..(131): Homolog of NCBI NO: 3914432 NR Description: PROFILIN 2/4 (POLLEN ALLERGEN PHL P 11) (PHL P >gi|2415698|emb|CAA70608.1| profilin 2 [Phleum pratense]
  misc_feature (1)..(131): Homolog of NCBI NO: 21322677 NR Description: profilin [Phoenix dactylifera]
  misc_feature (1)..(131): Homolog of NCBI NO: 464471 NR Description: PROFILIN 1 (POLLEN ALLERGEN PHL P 11) (PHL P XI)
MSWQAYVDEHLMCEIEGHHLAAAAIVGHDGAAWAQSTAFPEFKTEDMANIMKDFDEPGHLAPTGLFLGPTKYMVIQGEPGAVIRGKKGSGGITVKKTGQALVVGIYDEPMTPGQCNMVVERLGDYLLEQGM

SEQ ID NO: 12057 - protein, 120 aa, Zea mays subsp. mays
  peptide (1)..(120): Ceres Seq. ID no. 12413600
  misc_feature (1)..(115): Pfam Name: Profilin Pfam Description: Profilin
  misc_feature (1)..(120): Homolog of NCBI NO: 422032 NR Description: profilin 2 - maize >gi|313140|emb|CAA51719.1|
  misc_feature (1)..(120): Homolog of NCBI NO: 548597 NR Description: PROFILIN 2 (ZMPRO2)
  misc_feature (1)..(120): Homolog of NCBI NO: 464466 NR Description: Profilin 1 (ZmPRO1) >gi|422031|pir||S35796
  misc_feature (1)..(120): Homolog of NCBI NO: 37532730 NR Description: Profilin A [Oryza sativa (japonica
  misc_feature (1)..(120): Homolog of NCBI NO: 464470 NR Description: Profilin 3 (ZmPRO3) >gi|422033|pir||S35798
  misc_feature (1)..(120): Homolog of NCBI NO: 3914422 NR Description: Profilin (Pollen allergen Cyn d 12) profilin 2 [Cynodon dactylon] >gi|2154730|emb|CAA69670.1|
  misc_feature (1)..(120): Homolog of NCBI NO: 14423860 NR Description: Profilin 3 (Pollen allergen Hev b 8.0201)
  misc_feature (1)..(120): Homolog of NCBI NO: 3914432 NR Description: PROFILIN 2/4 (POLLEN ALLERGEN PHL P 11) (PHL P >gi|2415698|emb|CAA70608.1| profilin 2 [Phleum pratense]
  misc_feature (1)..(120): Homolog of NCBI NO: 21322677 NR Description: profilin [Phoenix dactylifera]
  misc_feature (1)..(120): Homolog of NCBI NO: 464471 NR Description: PROFILIN 1 (POLLEN ALLERGEN PHL P 11) (PHL P XI)
MCEIEGHHLAAAAIVGHDGAAWAQSTAFPEFKTEDMANIMKDFDEPGHLAPTGLFLGPTKYMVIQGEPGAVIRGKKGSGGITVKKTGQALVVGIYDEPMTPGQCNMVVERLGDYLLEQGM

SEQ ID NO: 12058 - DNA, 1471 bp, Zea mays subsp. mays
  misc_feature (1)..(1471): Ceres Seq. ID no. 12579274
  misc_feature: MA Experiment ID: 108530 Result: Down-regulated in Transcription
  misc_feature: MA Experiment 108530 PARAMETER Experiment Name: Zm_Imbibed_Seeds_P Parameter: Age (day) Value: 6 vs. 2
  misc_feature: MA Experiment 108530 PARAMETER Experiment Name: Zm_Imbibed_Seeds_P Parameter: Organism Value: Zea mays
  misc_feature: MA Experiment 108530 PARAMETER Experiment Name: Zm_Imbibed_Seeds_P Parameter: Plant Line Value: 35A19
  misc_feature: MA Experiment 108530 PARAMETER Experiment Name: Zm_Imbibed_Seeds_P Parameter: Tissue Value: Aerial vs. Embryo
  misc_feature: MA Experiment ID: 108535 Result: Up-regulated in Transcription
  misc_feature: MA Experiment 108535 PARAMETER Experiment Name: Zm_Meristem_P Parameter: Age (day) Value: 8
  misc_feature: MA Experiment 108535 PARAMETER Experiment Name: Zm_Meristem_P Parameter: Organism Value: Zea mays
  misc_feature: MA Experiment 108535 PARAMETER Experiment Name: Zm_Meristem_P Parameter: Plant Line Value: 35A19
  misc_feature: MA Experiment 108535 PARAMETER Experiment Name: Zm_Meristem_P Parameter: Tissue Value: Root Meristem vs. Above Root Meristem
  misc_feature: MA Experiment ID: 20000487 Result: Up-regulated in Transcription
  misc_feature: MA Experiment 20000487 PARAMETER Experiment Name: Zm_50mM_NH4NO3_L_to_H_P Parameter: Organism Value: Zea mays
  misc_feature: MA Experiment 20000487 PARAMETER Experiment Name: Zm_50mM_NH4NO3_L_to_H_P Parameter: Timepoint (hr) Value: 4
  misc_feature: MA Experiment 20000487 PARAMETER Experiment Name: Zm_50mM_NH4NO3_L_to_H_P Parameter: Tissue Value: Leaves
  misc_feature: MA Experiment 20000487 PARAMETER Experiment Name: Zm_50mM_NH4NO3_L_to_H_P Parameter: Treatment Value: 50mM NH4NO3 vs. 100mM Mannitol
  misc_feature: MA Experiment ID: 20000488 Result: Up-regulated in Transcription
  misc_feature: MA Experiment 20000488 PARAMETER Experiment Name: Zm_50mM_NH4NO3_L_to_H_P Parameter: Organism Value: Zea mays
  misc_feature: MA Experiment 20000488 PARAMETER Experiment Name: Zm_50mM_NH4NO3_L_to_H_P Parameter: Timepoint (hr) Value: 8
  misc_feature: MA Experiment 20000488 PARAMETER Experiment Name: Zm_50mM_NH4NO3_L_to_H_P Parameter: Tissue Value: Leaves
  misc_feature: MA Experiment 20000488 PARAMETER Experiment Name: Zm_50mM_NH4NO3_L_to_H_P Parameter: Treatment Value: 50mM NH4NO3 vs. 100mM Mannitol
gcacgagaccattacctagaacatcctaatcgaaaaactgccgcgccgccaccctctacagataaggaagaggaggagggcaggatgtcgcaccgtaagttcgagcacccgaggcacggctccctcggcttccttcccaggaagcgctcctcccgtcaccgcggcaaggtgaagtcattccctagggatgacgccaagaagccttgccatctcactgccttccttggctacaaggctggcatgactcacattgtccgtgaggttgagaagccaggatccaaactccataagaaggaaacttgtgaggctgttaccatcattgaaacccctcctcttgtcattgttgggctcgtggcatatgtgaagactcctcgtggcctccgcacactcaactctgtttgggcccaacatcttagcgaagaagtgaggagaaggttctacaagaactggtgcaagagcaagaagaaggctttcacaaagtatgctctcaaatatgaaaatgatgctggcaagaaggaaattcagctgcagcttgagaagatgaagaaatatgcttctgttatccgtgtcattgctcatacccagattaggaagatgaagggtttgaagcagaagaaggctcacctgatggagattcaggtcaatggtggtaccattgctgacaaggtggactatggctacaaattctttgagaaagaggtccctgttgatgctgtcttccagaaggatgagatgattgacatcattggtgtgaccaaggggaaaggttatgagggtgtggtcactcgttggggtgtcacccggcttccccgcaagacccacaggggtctccgcaaagttgcttgtatcngtgcatggcatccggctagggtctcctanacggttgctcgtgctggtcagaatggggtaccaccaccgcactgagatgaacaagaaggtttacaagatcggcaaggctggacaagagacccacgatgcctccacagagtttgacaggactgagaaggacatcactcccatgggtggcttcccccattatggtatcgtgaagggtgactacctgatgatcaagggctgctgtgtgggtccaaagaagagggtggtgaccctccgccagtccctcctgaagcagacttcccggctggcgctggaggagatcaagctcaagtttcatcgacacatcgtccaaatttgggcacggtcgcttccagactaccgatgagaagcagaggttctttggcaagctcaaggcgtaaggtgctgcggtgcagcgaagtcccatttctcaaaatcatcaaactgtgatacttttgtttgtaaccttgctgtaccaagttttgtagccatggtccagtcgtctatggattgttccatgcttcagaactgcactgtctatgttttgtgctattttggttgtttaatgccccaatcattgcatatagattctaattgttttggtgtttgatgatcg

SEQ ID NO: 12059 - protein, 307 aa, Zea mays subsp. mays
  peptide (1)..(307): Ceres Seq. ID no. 12579275
  misc_feature (78)..(302): Pfam Name: Ribosomal protein L3 Pfam Description: Ribosomal protein L3
  misc_feature (29)..(302): Homolog of NCBI NO: 548770 NR Description: 60S RIBOSOMAL PROTEIN L3 >gi|481228|pir||S38359
  misc_feature (29)..(302): Homolog of NCBI NO: 6688812 NR Description: L3 Ribosomal protein [Medicago sativa subsp. x
  misc_feature (29)..(302): Homolog of NCBI NO: 15218306 NR Description: ribosomal protein; protein id: At1g43170.1, by cDNA: 14534., supported by cDNA: gi_11935190, supported by gi_13487799, supported by cDNA: gi_13605656, supported by cDNA:
  misc_feature (29)..(302): Homolog of NCBI NO: 15220533 NR Description: ribosomal protein; protein id: At1g61580.1 thaliana] >gi|21542436|sp|P22738|RL3B_ARATH 60S ribosomal protein
  misc_feature (29)..(302): Homolog of NCBI NO: 23397228 NR Description: putative ribosomal protein [Arabidopsis thaliana]
  misc_feature (29)..(302): Homolog of NCBI NO: 81658 NR Description: ribosomal protein L3.e (clone ARP2), cytosolic -
  misc_feature (29)..(302): Homolog of NCBI NO: 81657 NR Description: ribosomal protein L3.e (clone ARP1), cytosolic -
  misc_feature (29)..(302): Homolog of NCBI NO: 7305441 NR Description: ribosomal protein L3; ribosomal protein L3 (yeast) [Mus musculus] >gi|132956|sp|P27659|RL3_MOUSE 60S protein L3 (J1 protein) >gi|52741|emb|CAA68370.1| J1 protein [Mus
  misc_feature (29)..(302): Homolog of NCBI NO: 16307136 NR Description: ribosomal protein L3 [Mus musculus]
  misc_feature (26)..(302): Homolog of NCBI NO: 37550317 NR Description: similar to ribosomal protein L3; 60S ribosomal
  misc_feature (284)..(284): Xaa is any aa, unknown or other
  misc_feature (293)..(293): Xaa is any aa, unknown or other
ARDHYLEHPNRKTAAPPPSTDKEEEEGRMSHRKFEHPRHGSLGFLPRKRSSRHRGKVKSFPRDDAKKPCHLTAFLGYKAGMTHIVREVEKPGSKLHKKETCEAVTIIETPPLVIVGLVAYVKTPRGLRTLNSVWAQHLSEEVRRRFYKNWCKSKKKAFTKYALKYENDAGKKEIQLQLEKMKKYASVIRVIAHTQIRKMKGLKQKKAHLMEIQVNGGTIADKVDYGYKFFEKEVPVDAVFQKDEMIDIIGVTKGKGYEGVVTRWGVTRLPRKTHRGLRKVACIXAWHPARVSXTVARAGQNGVPPPH

SEQ ID NO: 12060 - protein, 279 aa, Zea mays subsp. mays
  peptide (1)..(279): Ceres Seq. ID no. 12579276
  misc_feature (50)..(274): Pfam Name: Ribosomal protein L3 Pfam Description: Ribosomal protein L3
  misc_feature (1)..(274): Homolog of NCBI NO: 548770 NR Description: 60S RIBOSOMAL PROTEIN L3 >gi|481228|pir||S38359
  misc_feature (1)..(274): Homolog of NCBI NO: 6688812 NR Description: L3 Ribosomal protein [Medicago sativa subsp. x
  misc_feature (1)..(274): Homolog of NCBI NO: 15218306 NR Description: ribosomal protein; protein id: At1g43170.1, by cDNA: 14534., supported by cDNA: gi_11935190, supported by gi_13487799, supported by cDNA: gi_13605656, supported by cDNA:
  misc_feature (1)..(274): Homolog of NCBI NO: 15220533 NR Description: ribosomal protein; protein id: At1g61580.1 thaliana] >gi|21542436|sp|P22738|RL3B_ARATH 60S ribosomal protein
  misc_feature (1)..(274): Homolog of NCBI NO: 23397228 NR Description: putative ribosomal protein [Arabidopsis thaliana]
  misc_feature (1)..(274): Homolog of NCBI NO: 81658 NR Description: ribosomal protein L3.e (clone ARP2), cytosolic -
  misc_feature (1)..(274): Homolog of NCBI NO: 81657 NR Description: ribosomal protein L3.e (clone ARP1), cytosolic -
  misc_feature (1)..(274): Homolog of NCBI NO: 7305441 NR Description: ribosomal protein L3; ribosomal protein L3 (yeast) [Mus musculus] >gi|132956|sp|P27659|RL3_MOUSE 60S protein L3 (J1 protein) >gi|52741|emb|CAA68370.1| J1 protein [Mus
  misc_feature (1)..(274): Homolog of NCBI NO: 16307136 NR Description: ribosomal protein L3 [Mus musculus]
  misc_feature (1)..(274): Homolog of NCBI NO: 37550317 NR Description: similar to ribosomal protein L3; 60S ribosomal
  misc_feature (256)..(256): Xaa is any aa, unknown or other
  misc_feature (265)..(265): Xaa is any aa, unknown or other
MSHRKFEHPRHGSLGFLPRKRSSRHRGKVKSFPRDDAKKPCHLTAFLGYKAGMTHIVREVEKPGSKLHKKETCEAVTIIETPPLVIVGLVAYVKTPRGLRTLNSVWAQHLSEEVRRRFYKNWCKSKKKAFTKYALKYENDAGKKEIQLQLEKMKKYASVIRVIAHTQIRKMKGLKQKKAHLMEIQVNGGTIADKVDYGYKFFEKEVPVDAVFQKDEMIDIIGVTKGKGYEGVVTRWGVTRLPRKTHRGLRKVACIXAWHPARVSXTVARAGQNGVPPPH

SEQ ID NO: 12061 - protein, 227 aa, Zea mays subsp. mays
  peptide (1)..(227): Ceres Seq. ID no. 12579277
  misc_feature (1)..(222): Pfam Name: Ribosomal protein L3 Pfam Description: Ribosomal protein L3
  misc_feature (1)..(222): Homolog of NCBI NO: 548770 NR Description: 60S RIBOSOMAL PROTEIN L3 >gi|481228|pir||S38359
  misc_feature (1)..(222): Homolog of NCBI NO: 6688812 NR Description: L3 Ribosomal protein [Medicago sativa subsp. x
  misc_feature (1)..(222): Homolog of NCBI NO: 15218306 NR Description: ribosomal protein; protein id: At1g43170.1, by cDNA: 14534., supported by cDNA: gi_11935190, supported by gi_13487799, supported by cDNA: gi_13605656, supported by cDNA:
  misc_feature (1)..(222): Homolog of NCBI NO: 15220533 NR Description: ribosomal protein; protein id: At1g61580.1 thaliana] >gi|21542436|sp|P22738|RL3B_ARATH 60S ribosomal protein
  misc_feature (1)..(222): Homolog of NCBI NO: 23397228 NR Description: putative ribosomal protein [Arabidopsis thaliana]
  misc_feature (1)..(222): Homolog of NCBI NO: 81658 NR Description: ribosomal protein L3.e (clone ARP2), cytosolic -
  misc_feature (1)..(222): Homolog of NCBI NO: 81657 NR Description: ribosomal protein L3.e (clone ARP1), cytosolic -
  misc_feature (1)..(222): Homolog of NCBI NO: 7305441 NR Description: ribosomal protein L3; ribosomal protein L3 (yeast) [Mus musculus] >gi|132956|sp|P27659|RL3_MOUSE 60S protein L3 (J1 protein) >gi|52741|emb|CAA68370.1| J1 protein [Mus
  misc_feature (1)..(222): Homolog of NCBI NO: 16307136 NR Description: ribosomal protein L3 [Mus musculus]
  misc_feature (1)..(222): Homolog of NCBI NO: 37550317 NR Description: similar to ribosomal protein L3; 60S ribosomal
  misc_feature (204)..(204): Xaa is any aa, unknown or other
  misc_feature (213)..(213): Xaa is any aa, unknown or other
MTHIVREVEKPGSKLHKKETCEAVTIIETPPLVIVGLVAYVKTPRGLRTLNSVWAQHLSEEVRRRFYKNWCKSKKKAFTKYALKYENDAGKKEIQLQLEKMKKYASVIRVIAHTQIRKMKGLKQKKAHLMEIQVNGGTIADKVDYGYKFFEKEVPVDAVFQKDEMIDIIGVTKGKGYEGVVTRWGVTRLPRKTHRGLRKVACIXAWHPARVSXTVARAGQNGVPPPH

SEQ ID NO: 12062 - DNA, 1167 bp, Zea mays subsp. mays
  misc_feature (1)..(1167): Ceres Seq. ID no. 12556567
  misc_feature: MA Experiment ID: 108597 Result: Down-regulated in Transcription
  misc_feature: MA Experiment 108597 PARAMETER Experiment Name: Zm_100uM_ABA_P Parameter: Age (day) Value: 9
  misc_feature: MA Experiment 108597 PARAMETER Experiment Name: Zm_100uM_ABA_P Parameter: Organism Value: Zea mays
  misc_feature: MA Experiment 108597 PARAMETER Experiment Name: Zm_100uM_ABA_P Parameter: Plant Line Value: 35A19
  misc_feature: MA Experiment 108597 PARAMETER Experiment Name: Zm_100uM_ABA_P Parameter: Timepoint (hr) Value: 24
  misc_feature: MA Experiment 108597 PARAMETER Experiment Name: Zm_100uM_ABA_P Parameter: Tissue Value: Aerial
  misc_feature: MA Experiment 108597 PARAMETER Experiment Name: Zm_100uM_ABA_P Parameter: Treatment Value: 100uM ABA vs. No Treatment
  misc_feature: MA Experiment ID: 20000480 Result: Down-regulated in Transcription
  misc_feature: MA Experiment 20000480 PARAMETER Experiment Name: Zm_Drought_P Parameter: Age (day) Value: 11
  misc_feature: MA Experiment 20000480 PARAMETER Experiment Name: Zm_Drought_P Parameter: Organism Value: Zea mays
  misc_feature: MA Experiment 20000480 PARAMETER Experiment Name: Zm_Drought_P Parameter: Plant Line Value: 35A19
  misc_feature: MA Experiment 20000480 PARAMETER Experiment Name: Zm_Drought_P Parameter: Timepoint (hr) Value: 72
  misc_feature: MA Experiment 20000480 PARAMETER Experiment Name: Zm_Drought_P Parameter: Tissue Value: Aerial
  misc_feature: MA Experiment 20000480 PARAMETER Experiment Name: Zm_Drought_P Parameter: Treatment Value: Drought vs. No Drought
gatggatgaagtataatataaagtcggtaggggttacctaagtattttatcgttccaccccaaacctccgacgttttgcatctccaagcagcatcgtctcctccccagatccatcaattcgttcggaccgcccttctcgtgtccccgttccaaagcgcggcaggctgagcggttccgtcagatttgagtcgtcatgaatcccgagtatgattaccttttcaaacttctgcttatcggtgattctggtgttggaaaatcatgcttgcttctcagatttgcagatgattcatatctggacagctacatcagcacaattggagttgactttaaaattaggacagtagagcaagacgggaagaccataaagcttcaaatttgggatactgctggacaagagcgcttcaggacaatcactagcagctactaccgcggagctcacggaatcattattgtatatgacgtgacagaccaagaaagcttcaataatgtcaagcaatggttaaacgagattgaccgttatgcaagtgacaatgttaacaagctccttgtgggaacaagagcgatctaactgctaacaaagttgtggcaaccgagacagcaaaggcgtttgctgatgagatgggcatcccattcatggagacgagtgccaaaaacgccatcaatgtggagcaggccttcatggctatggctgcatccatcaaggacaggatggccagccaaccagctgcggctaacgcaaggccagcgaccgtgcagatccgcggtcaacccgtcaaccagaagacgtcttgctgctcatcctaaggttgcctgatttttttttgtactttgtgtaaactcaaacacacaactactaccttttgtgtgcgcttgcaaatgtatttgcattattttcagaagacgctgctgatagcatctattcattgatcggacgattagggctagcttgtcgaattccatttttccaagggatttctatttttctaagagaaattatttttattttttcttaaaaaaataagaatttttttggaaaaatggagttaccaaactagctattagggagctgcaaatatgtaagcaggtacttggtgcactctcgactttccattcctttctaccctatcatacagcttcaccgtttataagccacgaattgcatttgtg

SEQ ID NO: 12063 - protein, 124 aa, Zea mays subsp. mays
  peptide (1)..(124): Ceres Seq. ID no. 12556568
  misc_feature (10)..(123): Pfam Name: Ras family Pfam Description: Ras family
  misc_feature (1)..(123): Homolog of NCBI NO: 466172 NR Description: GTP-BINDING PROTEIN YPTM2 >gi|283056|pir||B38202
  misc_feature (1)..(123): Homolog of NCBI NO: 14140133 NR Description: putative GTP-binding protein [Oryza sativa]
  misc_feature (1)..(122): Homolog of NCBI NO: 1616614 NR Description: small GTP-binding protein [Nicotiana
  misc_feature (1)..(123): Homolog of NCBI NO: 303750 NR Description: GTP-binding protein [Pisum sativum]
  misc_feature (1)..(122): Homolog of NCBI NO: 4586580 NR Description: rab-type small GTP-binding protein [Cicer
  misc_feature (1)..(122): Homolog of NCBI NO: 1053063 NR Description: small GTP-binding protein
  misc_feature (1)..(122): Homolog of NCBI NO: 1370166 NR Description: RAB1C [Lotus japonicus]
  misc_feature (1)..(123): Homolog of NCBI NO: 303732 NR Description: GTP-binding protein [Pisum sativum]
  misc_feature (1)..(123): Homolog of NCBI NO: 7643790 NR Description: small GTP-binding protein [Capsicum annuum]
  misc_feature (1)..(123): Homolog of NCBI NO: 1053067 NR Description: small GTP-binding protein
MNPEYDYLFKLLLIGDSGVGKSCLLLRFADDSYLDSYISTIGVDFKIRTVEQDGKTIKLQIWDTAGQERFRTITSSYYRGAHGIIIVYDVTDQESFNNVKQWLNEIDRYASDNVNKLLVGTRAI

SEQ ID NO: 12064 - protein, 66 aa, Zea mays subsp. mays
  peptide (1)..(66): Ceres Seq. ID no. 12556569
MRWASHSWRRVPKTPSMWSRPSWLWLHPSRTGWPANQLRLTQGQRPCRSAVNPSTRRRLAAHPKVA

SEQ ID NO: 12065 - DNA, 1805 bp, Zea mays subsp. mays
  misc_feature (1)..(1805): Ceres Seq. ID no. 12374215
  misc_feature: MA Experiment ID: 108535 Result: Down-regulated in Transcription
  misc_feature: MA Experiment 108535 PARAMETER Experiment Name: Zm_Meristem_P Parameter: Age (day) Value: 8
  misc_feature: MA Experiment 108535 PARAMETER Experiment Name: Zm_Meristem_P Parameter: Organism Value: Zea mays
  misc_feature: MA Experiment 108535 PARAMETER Experiment Name: Zm_Meristem_P Parameter: Plant Line Value: 35A19
  misc_feature: MA Experiment 108535 PARAMETER Experiment Name: Zm_Meristem_P Parameter: Tissue Value: Root Meristem vs. Above Root Meristem
  misc_feature: MA Experiment ID: 108544 Result: Up-regulated in Transcription
  misc_feature: MA Experiment ID: 20000478 Result: Up-regulated in Transcription
  misc_feature: MA Experiment 20000478 PARAMETER Experiment Name: Zm_5mM_SA_P Parameter: Age (day) Value: 11
  misc_feature: MA Experiment 20000478 PARAMETER Experiment Name: Zm_5mM_SA_P Parameter: Organism Value: Zea mays
  misc_feature: MA Experiment 20000478 PARAMETER Experiment Name: Zm_5mM_SA_P Parameter: Plant Line Value: 35A19
  misc_feature: MA Experiment 20000478 PARAMETER Experiment Name: Zm_5mM_SA_P Parameter: Timepoint (hr) Value: 72
  misc_feature: MA Experiment 20000478 PARAMETER Experiment Name: Zm_5mM_SA_P Parameter: Tissue Value: Aerial
  misc_feature: MA Experiment 20000478 PARAMETER Experiment Name: Zm_5mM_SA_P Parameter: Treatment Value: 5mM SA vs. No Treatment
  misc_feature: MA Experiment ID: 20000535 Result: Down-regulated in Transcription
  misc_feature: MA Experiment 20000535 PARAMETER Experiment Name: Zm_Hybrid_Seed_Dev_P Parameter: DAP Value: 30 vs. 12
  misc_feature: MA Experiment 20000535 PARAMETER Experiment Name: Zm_Hybrid_Seed_Dev_P Parameter: Organism Value: Zea mays
  misc_feature: MA Experiment 20000535 PARAMETER Experiment Name: Zm_Hybrid_Seed_Dev_P Parameter: Plant Line Value: 35A19
  misc_feature: MA Experiment 20000535 PARAMETER Experiment Name: Zm_Hybrid_Seed_Dev_P Parameter: Tissue Value: Embryo vs. Unfert Floret
atcgattgttgtccgctgttctccttcctcctcgtcctccttcaggccagcgggcaagaagaagaagaagaaaaatcaaggcttgcggcgagaggctgtgcccggccgaccggcgagcgaacttcgtacgcgcgtcatgggtggcggcagcaacagaggcggcgccggcgccggcgaggagagcggcagcgaccacgacggtgtgctgcggaggccgctgctcaacacggggagctggtaccggatgagctcgcggcagtccagctttgccccggggacctcctccatggccgtcctgcgcgagtcccacgtctccgccttcctctgcacgctcatcgtcgcgctcggccccatccagttcggcttcaccagcggcttctcctccccgacccaggacgccatggttcgggacctcaacctctctatctccgagttctcggcgttcggatcgctgtccaacgtcggcggcatggtcggggcgatcgccagcgggcagatggccgagtacattggccgtaaagggtcgttgatgattgctgcaatcccaaatatcatcggttggcttgcgatctcctttgcaaaagatgcctcatttctatatatgggacgattgcttgaagggtttggtgtcgggatcatatcctacacggtaccggtatacatagcagagatatctcctcagaacatgaggggagctcttggttctgtgaaccagttgtctgtgacctttggcatattcttggcctatttgctcggcatgtttattccttggagacttcttgctgtgattggagccttgccctgcacaatgttgattcctgggctattcttcattccagaatctcccagatggctggcaaagatgaatttgatggaagattgtgagacgtccctacaagtgctgagggggtttgagactgacatcacaacagaagtgaatgatataaagagggcagtggcatcatcaagtaagaggaccacaatcagttttcaagaattaaaccaaaagaaataccgcacgccactacttctagggattggcctacttgtactgcaaaatcttagtggaatcaacggtgtactgttttatgcaagtagcatcttcaaagctgcaggggttacaaacagcgacttggccacctgttcacttggtgctattcaggtccttgctactggagttacaacatggctgttagacagagctggacgacgcatccttctcattatttctacctctggcatgactctatgccttcttgctgtttctgttgtattttttctcaaggataacatttcacaggattctaactcgtactacatcttaacaatgatctcccttgttggtattgtgtctttcgtcattaccttctcgtttggtatgggtgccattccatggctcatgatgtctgagatcctcccggttagcatcaagagccttggcggaagcatcgcaacactggccaactggctgacatccttcgccataacaatgacgacgaacttgatgctcacgtggagtgttggaggcacttttctctcgtacatggttgtgagcgccttcaccatcgtttttgttgtcctttgggtgccggagacgaaggggagaactctagaggagatacaattttcgtttcgctgagcattcagcgttagctgcaatggttgcccgagtgtttatcttagggcctgtttagatctcatgagctaaagcaaaaaggagctaaaatttagtcactttataaactaaagttccaatcaagaggagctaaaagtgaataaaattgtaaaagaatatccttttagcc

SEQ ID NO: 12066 - protein, 545 aa, Zea mays subsp. mays
  peptide (1)..(545): Ceres Seq. ID no. 12374216
  misc_feature (109)..(544): Pfam Name: Sugar (and other) transporter Pfam Description: Sugar (and other) transporter
  misc_feature (50)..(545): Homolog of NCBI NO: 5091611 NR Description: Similar to gb|U43629 integral membrane protein Beta vulgaris and is a member of the sugar transporter family
  misc_feature (67)..(545): Homolog of NCBI NO: 7446725 NR Description: probable sugar transporter protein - beet
  misc_feature (69)..(545): Homolog of NCBI NO: 15223557 NR Description: integral membrane protein, putative; protein id: supported by cDNA: gi_16648956, supported by cDNA: gi_20259851 thaliana] >gi|16648957|gb|AAL24330.1| similar to integral
  misc_feature (59)..(545): Homolog of NCBI NO: 15222158 NR Description: integral membrane protein, putative; protein id:
  misc_feature (277)..(545): Homolog of NCBI NO: 8778437 NR Description: F18O14.22 [Arabidopsis thaliana]
  misc_feature (69)..(285): Homolog of NCBI NO: 8778437 NR Description: F18O14.22 [Arabidopsis thaliana]
  misc_feature (100)..(541): Homolog of NCBI NO: 23504385 NR Description: putative sugar transporter [Lycopersicon
  misc_feature (107)..(541): Homolog of NCBI NO: 21536914 NR Description: putative sugar transporter [Arabidopsis thaliana]
  misc_feature (107)..(541): Homolog of NCBI NO: 18407508 NR Description: putative sugar transporter; protein id: supported by cDNA: 114959. [Arabidopsis thaliana]
  misc_feature (101)..(545): Homolog of NCBI NO: 18419741 NR Description: sugar transporter - like protein; protein id: supported by cDNA: 3250., supported by cDNA: gi_17381264 thaliana] >gi|17381265|gb|AAL36051.1| AT5g18840/F17K4_90
SIVVRCSPSSSSSFRPAGKKKKKKNQGLRREAVPGRPASELRTRVMGGGSNRGGAGAGEESGSDHDGVLRRPLLNTGSWYRMSSRQSSFAPGTSSMAVLRESHVSAFLCTLIVALGPIQFGFTSGFSSPTQDAMVRDLNLSISEFSAFGSLSNVGGMVGAIASGQMAEYIGRKGSLMIAAIPNIIGWLAISFAKDASFLYMGRLLEGFGVGIISYTVPVYIAEISPQNMRGALGSVNQLSVTFGIFLAYLLGMFIPWRLLAVIGALPCTMLIPGLFFIPESPRWLAKMNLMEDCETSLQVLRGFETDITTEVNDIKRAVASSSKRTTISFQELNQKKYRTPLLLGIGLLVLQNLSGINGVLFYASSIFKAAGVTNSDLATCSLGAIQVLATGVTTWLLDRAGRRILLIISTSGMTLCLLAVSVVFFLKDNISQDSNSYYILTMISLVGIVSFVITFSFGMGAIPWLMMSEILPVSIKSLGGSIATLANWLTSFAITMTTNLMLTWSVGGTFLSYMVVSAFTIVFVVLWVPETKGRTLEEIQFSFR

SEQ ID NO: 12067 - protein, 500 aa, Zea mays subsp. mays
  peptide (1)..(500): Ceres Seq. ID no. 12374217
  misc_feature (64)..(499): Pfam Name: Sugar (and other) transporter Pfam Description: Sugar (and other) transporter
  misc_feature (5)..(500): Homolog of NCBI NO: 5091611 NR Description: Similar to gb|U43629 integral membrane protein Beta vulgaris and is a member of the sugar transporter family
  misc_feature (22)..(500): Homolog of NCBI NO: 7446725 NR Description: probable sugar transporter protein - beet
  misc_feature (24)..(500): Homolog of NCBI NO: 15223557 NR Description: integral membrane protein, putative; protein id: supported by cDNA: gi_16648956, supported by cDNA: gi_20259851 thaliana] >gi|16648957|gb|AAL24330.1| similar to integral
  misc_feature (14)..(500): Homolog of NCBI NO: 15222158 NR Description: integral membrane protein, putative; protein id:
  misc_feature (232)..(500): Homolog of NCBI NO: 8778437 NR Description: F18O14.22 [Arabidopsis thaliana]
  misc_feature (24)..(240): Homolog of NCBI NO: 8778437 NR Description: F18O14.22 [Arabidopsis thaliana]
  misc_feature (55)..(496): Homolog of NCBI NO: 23504385 NR Description: putative sugar transporter [Lycopersicon
  misc_feature (62)..(496): Homolog of NCBI NO: 21536914 NR Description: putative sugar transporter [Arabidopsis thaliana]
  misc_feature (62)..(496): Homolog of NCBI NO: 18407508 NR Description: putative sugar transporter; protein id: supported by cDNA: 114959. [Arabidopsis thaliana]
  misc_feature (56)..(500): Homolog of NCBI NO: 18419741 NR Description: sugar transporter - like protein; protein id: supported by cDNA: 3250., supported by cDNA: gi_17381264 thaliana] >gi|17381265|gb|AAL36051.1| AT5g18840/F17K4_90
MGGGSNRGGAGAGEESGSDHDGVLRRPLLNTGSWYRMSSRQSSFAPGTSSMAVLRESHVSAFLCTLIVALGPIQFGFTSGFSSPTQDAMVRDLNLSISEFSAFGSLSNVGGMVGAIASGQMAEYIGRKGSLMIAAIPNIIGWLAISFAKDASFLYMGRLLEGFGVGIISYTVPVYIAEISPQNMRGALGSVNQLSVTFGIFLAYLLGMFIPWRLLAVIGALPCTMLIPGLFFIPESPRWLAKMNLMEDCETSLQVLRGFETDITTEVNDIKRAVASSSKRTTISFQELNQKKYRTPLLLGIGLLVLQNLSGINGVLFYASSIFKAAGVTNSDLATCSLGAIQVLATGVTTWLLDRAGRRILLIISTSGMTLCLLAVSVVFFLKDNISQDSNSYYILTMISLVGIVSFVITFSFGMGAIPWLMMSEILPVSIKSLGGSIATLANWLTSFAITMTTNLMLTWSVGGTFLSYMVVSAFTIVFVVLWVPETKGRTLEEIQFSFR

SEQ ID NO: 12068 - protein, 464 aa, Zea mays subsp. mays
  peptide (1)..(464): Ceres Seq. ID no. 12374218
  misc_feature (28)..(463): Pfam Name: Sugar (and other) transporter Pfam Description: Sugar (and other) transporter
  misc_feature (26)..(460): Homolog of NCBI NO: 18407508 NR Description: putative sugar transporter; protein id: supported by cDNA: 114959. [Arabidopsis thaliana]
  misc_feature (1)..(464): Homolog of NCBI NO: 5091611 NR Description: Similar to gb|U43629 integral membrane protein Beta vulgaris and is a member of the sugar transporter family
  misc_feature (1)..(464): Homolog of NCBI NO: 15223557 NR Description: integral membrane protein, putative; protein id: supported by cDNA: gi_16648956, supported by cDNA: gi_20259851 thaliana] >gi|16648957|gb|AAL24330.1| similar to integral
  misc_feature (196)..(464): Homolog of NCBI NO: 8778437 NR Description: F18O14.22 [Arabidopsis thaliana]
  misc_feature (19)..(460): Homolog of NCBI NO: 23504385 NR Description: putative sugar transporter [Lycopersicon
  misc_feature (26)..(460): Homolog of NCBI NO: 21536914 NR Description: putative sugar transporter [Arabidopsis thaliana]
  misc_feature (1)..(204): Homolog of NCBI NO: 8778437 NR Description: F18O14.22 [Arabidopsis thaliana]
  misc_feature (1)..(464): Homolog of NCBI NO: 15222158 NR Description: integral membrane protein, putative; protein id:
  misc_feature (1)..(464): Homolog of NCBI NO: 7446725 NR Description: probable sugar transporter protein - beet
  misc_feature (20)..(464): Homolog of NCBI NO: 18419741 NR Description: sugar transporter - like protein; protein id: supported by cDNA: 3250., supported by cDNA: gi_17381264 thaliana] >gi|17381265|gb|AAL36051.1| AT5g18840/F17K4_90
MSSRQSSFAPGTSSMAVLRESHVSAFLCTLIVALGPIQFGFTSGFSSPTQDAMVRDLNLSISEFSAFGSLSNVGGMVGAIASGQMAEYIGRKGSLMIAAIPNIIGWLAISFAKDASFLYMGRLLEGFGVGIISYTVPVYIAEISPQNMRGALGSVNQLSVTFGIFLAYLLGMFIPWRLLAVIGALPCTMLIPGLFFIPESPRWLAKMNLMEDCETSLQVLRGFETDITTEVNDIKRAVASSSKRTTISFQELNQKKYRTPLLLGIGLLVLQNLSGINGVLFYASSIFKAAGVTNSDLATCSLGAIQVLATGVTTWLLDRAGRRILLIISTSGMTLCLLAVSVVFFLKDNISQDSNSYYILTMISLVGIVSFVITFSFGMGAIPWLMMSEILPVSIKSLGGSIATLANWLTSFAITMTTNLMLTWSVGGTFLSYMVVSAFTIVFVVLWVPETKGRTLEEIQFSFR

SEQ ID NO: 12069 - DNA, 1241 bp, Zea mays subsp. mays
  misc_feature (1)..(1241): Ceres Seq. ID no. 12387145
  misc_feature: MA Experiment ID: 108522 Result: Up-regulated in Transcription
  misc_feature: MA Experiment 108522 PARAMETER Experiment Name: Zm_42deg_Heat_P Parameter: Age (day) Value: 8
  misc_feature: MA Experiment 108522 PARAMETER Experiment Name: Zm_42deg_Heat_P Parameter: Organism Value: Zea mays
  misc_feature: MA Experiment 108522 PARAMETER Experiment Name: Zm_42deg_Heat_P Parameter: Plant Line Value: 35A19
  misc_feature: MA Experiment 108522 PARAMETER Experiment Name: Zm_42deg_Heat_P Parameter: Temperature (deg C) Value: 42 vs. 22
  misc_feature: MA Experiment 108522 PARAMETER Experiment Name: Zm_42deg_Heat_P Parameter: Timepoint (hr) Value: 1
  misc_feature: MA Experiment 108522 PARAMETER Experiment Name: Zm_42deg_Heat_P Parameter: Tissue Value: Aerial
  misc_feature: MA Experiment ID: 108527 Result: Up-regulated in Transcription
  misc_feature: MA Experiment 108527 PARAMETER Experiment Name: Zm_5mM_NO_P Parameter: Age (day) Value: 8
  misc_feature: MA Experiment 108527 PARAMETER Experiment Name: Zm_5mM_NO_P Parameter: Organism Value: Zea mays
  misc_feature: MA Experiment 108527 PARAMETER Experiment Name: Zm_5mM_NO_P Parameter: Plant Line Value: 35A19
  misc_feature: MA Experiment 108527 PARAMETER Experiment Name: Zm_5mM_NO_P Parameter: Timepoint (hr) Value: 6
  misc_feature: MA Experiment 108527 PARAMETER Experiment Name: Zm_5mM_NO_P Parameter: Tissue Value: Aerial
  misc_feature: MA Experiment 108527 PARAMETER Experiment Name: Zm_5mM_NO_P Parameter: Treatment Value: 5mM NO vs. No Treatment
  misc_feature: MA Experiment ID: 108543 Result: Up-regulated in Transcription
  misc_feature: MA Experiment ID: 20000492 Result: Down-regulated in Transcription
  misc_feature: MA Experiment 20000492 PARAMETER Experiment Name: Zm_Hybrid_Seed_Dev_P Parameter: DAP Value: 12
  misc_feature: MA Experiment 20000492 PARAMETER Experiment Name: Zm_Hybrid_Seed_Dev_P Parameter: Organism Value: Zea mays
  misc_feature: MA Experiment 20000492 PARAMETER Experiment Name: Zm_Hybrid_Seed_Dev_P Parameter: Plant Line Value: 35A19
  misc_feature: MA Experiment 20000492 PARAMETER Experiment Name: Zm_Hybrid_Seed_Dev_P Parameter: Tissue Value: Fert Kernel vs. Unfert Floret
  misc_feature: MA Experiment ID: 20000535 Result: Down-regulated in Transcription
  misc_feature: MA Experiment 20000535 PARAMETER Experiment Name: Zm_Hybrid_Seed_Dev_P Parameter: DAP Value: 30 vs. 12
  misc_feature: MA Experiment 20000535 PARAMETER Experiment Name: Zm_Hybrid_Seed_Dev_P Parameter: Organism Value: Zea mays
  misc_feature: MA Experiment 20000535 PARAMETER Experiment Name: Zm_Hybrid_Seed_Dev_P Parameter: Plant Line Value: 35A19
  misc_feature: MA Experiment 20000535 PARAMETER Experiment Name: Zm_Hybrid_Seed_Dev_P Parameter: Tissue Value: Embryo vs. Unfert Floret
agtgatgttctcctacgtgtggtccttcacgctgcagatgtacctgcaggcgcagagcaagaacgcggtgatcacgtacctggccatgctgaacctcggcctccacctgctcctgtcctggctggccaccgccaggctccgcctcggcctcgccggcgtcatgggctccatggttgtcgccatgtggatccccgtgctcggccagctcgccttcgtcttcttcggcgggtgcccgcgcacctggaccggcttctcctccgccgccttcgccgacctcgccgccatcgtcaggctgtcgctgtcgtctggcgtcatgctctgtttggagctgtggtacaacaccatactggtgctgctcactgggtacatgaagaacgcagaggttgcgctggacgccctctcaatatgcctcaacatcaacggctgggagatgatgatttccatcggctttctggtggcaaccggagtacgggtggcgaacgagctgggagccgggagcgcgaggagggccaagttcgccatctacaacgtggtggccacctcctccatcatcgggtccgtgctgttcgtgctgttcctcctcttccgcggaggcctcgcctacatattcaccgacagccaggcggtggcggacgcagtcgccggcctctcgcccctgctggccttctccatactgctcaacagcgtccagccagtgctgtcaggcgtcgctgtcggcgcgggctggcagagcgtcgtcgcctacgttaacatcacttcgtactacctcatcggcatccctcttggagccgtgctgggctacgcgctggggcttcatgtgaagggcatctggatcggcatgctgctcggaacgctggtccagactgttgtgcttctcttcataacgttgaagaccgactgggaaaaacaggtggaggttgctcaagagaggctgaagagatggtacatggaagagaacagaagactccaggggtccagacgaaacccttaggccggccctcagctccactgtgtatctctagttttccactcaccacgagaacaaaacgagggagacgactgctccacgtacaggccgatcgaggctgaaggatcatctctgggctgtatggtattgtagacacaaataatcatctgggctgggctgggcatgcaggtaatagtggtgtgcactagttctgaggttatatctctgccttgttcatcttaattcgatctgccggtgtcttgttgatcagtgc

SEQ ID NO: 12070 - protein, 329 aa, Zea mays subsp. mays
  peptide (1)..(329): Ceres Seq. ID no. 12387146
  misc_feature (1)..(320): Homolog of NCBI NO: 15223402 NR Description: unknown protein; protein id: At1g33110.1, by cDNA: gi_17065359 [Arabidopsis thaliana] Unknown protein [Arabidopsis thaliana]
  misc_feature (1)..(304): Homolog of NCBI NO: 25518156 NR Description: T9L6.1 protein - Arabidopsis thaliana
  misc_feature (1)..(320): Homolog of NCBI NO: 15223391 NR Description: hypothetical protein; protein id: At1g33090.1
  misc_feature (1)..(319): Homolog of NCBI NO: 22329916 NR Description: hypothetical protein; protein id: At1g33080.1, by cDNA: gi_19423993 [Arabidopsis thaliana] unknown protein [Arabidopsis thaliana]
  misc_feature (1)..(320): Homolog of NCBI NO: 15223394 NR Description: unknown protein; protein id: At1g33100.1
  misc_feature (1)..(274): Homolog of NCBI NO: 6910584 NR Description: CDS [Arabidopsis thaliana]
  misc_feature (3)..(314): Homolog of NCBI NO: 15238439 NR Description: putative protein; protein id: At5g65380.1, by cDNA: gi_14030730 [Arabidopsis thaliana] emb|CAB89401.1~gene_id:MNA5.11~strong similarity to unknown
  misc_feature (2)..(314): Homolog of NCBI NO: 22326870 NR Description: putative protein; protein id: At5g17700.1, by cDNA: gi_20466399 [Arabidopsis thaliana] putative protein [Arabidopsis thaliana]
  misc_feature (2)..(304): Homolog of NCBI NO: 15228595 NR Description: unknown protein; protein id: At3g03620.1 thaliana] >gi|6091760|gb|AAF03470.1|AC009327_9 unknown protein
  misc_feature (2)..(304): Homolog of NCBI NO: 9759047 NR Description: gb|AAF03470.1~gene_id:MVA3.5~strong similarity to
VMFSYVWSFTLQMYLQAQSKNAVITYLAMLNLGLHLLLSWLATARLRLGLAGVMGSMVVAMWIPVLGQLAFVFFGGCPRTWTGFSSAAFADLAAIVRLSLSSGVMLCLELWYNTILVLLTGYMKNAEVALDALSICLNINGWEMMISIGFLVATGVRVANELGAGSARRAKFAIYNVVATSSIIGSVLFVLFLLFRGGLAYIFTDSQAVADAVAGLSPLLAFSILLNSVQPVLSGVAVGAGWQSVVAYVNITSYYLIGIPLGAVLGYALGLHVKGIWIGMLLGTLVQTVVLLFITLKTDWEKQVEVAQERLKRWYMEENRRLQGSRRNP

SEQ ID NO: 12071 - protein, 328 aa, Zea mays subsp. mays
  peptide (1)..(328): Ceres Seq. ID no. 12387147
  misc_feature (1)..(319): Homolog of NCBI NO: 15223402 NR Description: unknown protein; protein id: At1g33110.1, by cDNA: gi_17065359 [Arabidopsis thaliana] Unknown protein [Arabidopsis thaliana]
  misc_feature (1)..(303): Homolog of NCBI NO: 25518156 NR Description: T9L6.1 protein - Arabidopsis thaliana
  misc_feature (1)..(319): Homolog of NCBI NO: 15223391 NR Description: hypothetical protein; protein id: At1g33090.1
  misc_feature (1)..(318): Homolog of NCBI NO: 22329916 NR Description: hypothetical protein; protein id: At1g33080.1, by cDNA: gi_19423993 [Arabidopsis thaliana] unknown protein [Arabidopsis thaliana]
  misc_feature (1)..(319): Homolog of NCBI NO: 15223394 NR Description: unknown protein; protein id: At1g33100.1
  misc_feature (1)..(273): Homolog of NCBI NO: 6910584 NR Description: CDS [Arabidopsis thaliana]
  misc_feature (2)..(313): Homolog of NCBI NO: 15238439 NR Description: putative protein; protein id: At5g65380.1, by cDNA: gi_14030730 [Arabidopsis thaliana] emb|CAB89401.1~gene_id:MNA5.11~strong similarity to unknown
  misc_feature (1)..(313): Homolog of NCBI NO: 22326870 NR Description: putative protein; protein id: At5g17700.1, by cDNA: gi_20466399 [Arabidopsis thaliana] putative protein [Arabidopsis thaliana]
  misc_feature (1)..(303): Homolog of NCBI NO: 15228595 NR Description: unknown protein; protein id: At3g03620.1 thaliana] >gi|6091760|gb|AAF03470.1|AC009327_9 unknown protein
  misc_feature (1)..(303): Homolog of NCBI NO: 9759047 NR Description: gb|AAF03470.1~gene_id:MVA3.5~strong similarity to
MFSYVWSFTLQMYLQAQSKNAVITYLAMLNLGLHLLLSWLATARLRLGLAGVMGSMVVAMWIPVLGQLAFVFFGGCPRTWTGFSSAAFADLAAIVRLSLSSGVMLCLELWYNTILVLLTGYMKNAEVALDALSICLNINGWEMMISIGFLVATGVRVANELGAGSARRAKFAIYNVVATSSIIGSVLFVLFLLFRGGLAYIFTDSQAVADAVAGLSPLLAFSILLNSVQPVLSGVAVGAGWQSVVAYVNITSYYLIGIPLGAVLGYALGLHVKGIWIGMLLGTLVQTVVLLFITLKTDWEKQVEVAQERLKRWYMEENRRLQGSRRNP

SEQ ID NO: 12072 - protein, 317 aa, Zea mays subsp. mays
  peptide (1)..(317): Ceres Seq. ID no. 12387148
  misc_feature (1)..(308): Homolog of NCBI NO: 15223402 NR Description: unknown protein; protein id: At1g33110.1, by cDNA: gi_17065359 [Arabidopsis thaliana] Unknown protein [Arabidopsis thaliana]
  misc_feature (1)..(292): Homolog of NCBI NO: 25518156 NR Description: T9L6.1 protein - Arabidopsis thaliana
  misc_feature (1)..(308): Homolog of NCBI NO: 15223391 NR Description: hypothetical protein; protein id: At1g33090.1
  misc_feature (1)..(307): Homolog of NCBI NO: 22329916 NR Description: hypothetical protein; protein id: At1g33080.1, by cDNA: gi_19423993 [Arabidopsis thaliana] unknown protein [Arabidopsis thaliana]
  misc_feature (1)..(308): Homolog of NCBI NO: 15223394 NR Description: unknown protein; protein id: At1g33100.1
  misc_feature (1)..(262): Homolog of NCBI NO: 6910584 NR Description: CDS [Arabidopsis thaliana]
  misc_feature (1)..(302): Homolog of NCBI NO: 15238439 NR Description: putative protein; protein id: At5g65380.1, by cDNA: gi_14030730 [Arabidopsis thaliana] emb|CAB89401.1~gene_id:MNA5.11~strong similarity to unknown
  misc_feature (1)..(302): Homolog of NCBI NO: 22326870 NR Description: putative protein; protein id: At5g17700.1, by cDNA: gi_20466399 [Arabidopsis thaliana] putative protein [Arabidopsis thaliana]
  misc_feature (1)..(292): Homolog of NCBI NO: 15228595 NR Description: unknown protein; protein id: At3g03620.1 thaliana] >gi|6091760|gb|AAF03470.1|AC009327_9 unknown protein
  misc_feature (1)..(292): Homolog of NCBI NO: 9759047 NR Description: gb|AAF03470.1~gene_id:MVA3.5~strong similarity to
MYLQAQSKNAVITYLAMLNLGLHLLLSWLATARLRLGLAGVMGSMVVAMWIPVLGQLAFVFFGGCPRTWTGFSSAAFADLAAIVRLSLSSGVMLCLELWYNTILVLLTGYMKNAEVALDALSICLNINGWEMMISIGFLVATGVRVANELGAGSARRAKFAIYNVVATSSIIGSVLFVLFLLFRGGLAYIFTDSQAVADAVAGLSPLLAFSILLNSVQPVLSGVAVGAGWQSVVAYVNITSYYLIGIPLGAVLGYALGLHVKGIWIGMLLGTLVQTVVLLFITLKTDWEKQVEVAQERLKRWYMEENRRLQGSRRNP

SEQ ID NO: 12073 - DNA, 1467 bp, Zea mays subsp. mays
  misc_feature (1)..(1467): Ceres Seq. ID no. 12411666
  misc_feature: MA Experiment ID: 108536 Result: Up-regulated in Transcription
  misc_feature: MA Experiment 108536 PARAMETER Experiment Name: Zm_Meristem_P Parameter: Age (day) Value: 8
  misc_feature: MA Experiment 108536 PARAMETER Experiment Name: Zm_Meristem_P Parameter: Organism Value: Zea mays
  misc_feature: MA Experiment 108536 PARAMETER Experiment Name: Zm_Meristem_P Parameter: Plant Line Value: 35A19
  misc_feature: MA Experiment 108536 PARAMETER Experiment Name: Zm_Meristem_P Parameter: Tissue Value: Shoot Meristem vs. Above Shoot Meristem
  misc_feature: MA Experiment ID: 108543 Result: Up-regulated in Transcription
  misc_feature: MA Experiment ID: 108546 Result: Down-regulated in Transcription
  misc_feature: MA Experiment 108546 PARAMETER Experiment Name: Zm_Imbibed_Seeds_P Parameter: Age (day) Value: 3 vs. 2
  misc_feature: MA Experiment 108546 PARAMETER Experiment Name: Zm_Imbibed_Seeds_P Parameter: Organism Value: Zea mays
  misc_feature: MA Experiment 108546 PARAMETER Experiment Name: Zm_Imbibed_Seeds_P Parameter: Plant Line Value: 35A19
  misc_feature: MA Experiment 108546 PARAMETER Experiment Name: Zm_Imbibed_Seeds_P Parameter: Tissue Value: Roots vs. Embryo
  misc_feature: MA Experiment ID: 20000477 Result: Down-regulated in Transcription
  misc_feature: MA Experiment 20000477 PARAMETER Experiment Name: Zm_5mM_SA_P Parameter: Age (day) Value: 10
  misc_feature: MA Experiment 20000477 PARAMETER Experiment Name: Zm_5mM_SA_P Parameter: Organism Value: Zea mays
  misc_feature: MA Experiment 20000477 PARAMETER Experiment Name: Zm_5mM_SA_P Parameter: Plant Line Value: 35A19
  misc_feature: MA Experiment 20000477 PARAMETER Experiment Name: Zm_5mM_SA_P Parameter: Timepoint (hr) Value: 48
  misc_feature: MA Experiment 20000477 PARAMETER Experiment Name: Zm_5mM_SA_P Parameter: Tissue Value: Aerial
  misc_feature: MA Experiment 20000477 PARAMETER Experiment Name: Zm_5mM_SA_P Parameter: Treatment Value: 5mM SA vs. No Treatment
  misc_feature: MA Experiment ID: 20000492 Result: Down-regulated in Transcription
  misc_feature: MA Experiment 20000492 PARAMETER Experiment Name: Zm_Hybrid_Seed_Dev_P Parameter: DAP Value: 12
  misc_feature: MA Experiment 20000492 PARAMETER Experiment Name: Zm_Hybrid_Seed_Dev_P Parameter: Organism Value: Zea mays
  misc_feature: MA Experiment 20000492 PARAMETER Experiment Name: Zm_Hybrid_Seed_Dev_P Parameter: Plant Line Value: 35A19
  misc_feature: MA Experiment 20000492 PARAMETER Experiment Name: Zm_Hybrid_Seed_Dev_P Parameter: Tissue Value: Fert Kernel vs. Unfert Floret
  misc_feature: MA Experiment ID: 20000632 Result: Down-regulated in Transcription
  misc_feature: MA Experiment 20000632 PARAMETER Experiment Name: Zm_Herbicide-Treatments_P Parameter: Timepoint (hr) Value: 4
  misc_feature: MA Experiment 20000632 PARAMETER Experiment Name: Zm_Herbicide-Treatments_P Parameter: Tissue Value: Aerial
  misc_feature: MA Experiment 20000632 PARAMETER Experiment Name: Zm_Herbicide-Treatments_P Parameter: Treatment Value: Glean vs. No Treatment
acatacctgactctcctccgatctctcagcacgctcctcttctgctaccttgctttccctgctgcgatccgttccttgccctattagtattagctagccggccggccggatcgacgatcgagcaaggagaggcgccccagcagtcctcgtcggatctatccatctcgtcgacagcgtcagcgcctcaggtggatcggagcggaggtggtggaccgggagctagtagctgccacacatttcggtcttcgaaaccacatatcatgatgtcgtcctcgtcctcgtcgtcggccgcctgctgcttcccgctggaccacctcgcgccgtcccccaccgagcagctctgctacgtgcactgcaactgctgcgacaccatcctcgccgtcggcgtgccctgcagcagcctgttcaagacggtgacggtgcgctgcggccactgcgccaacctactctccgtcaacctccgcggcctcctgctcccgcccgccgcgccggcgccgcccaaccatctcaacttcgctcactccttgctgtcacccacatccccgcatggcctcttggacgagttggctctccagcaggcgccgagcttcctgatggagcaggcgagtgccaacctgagcagcaccatgacgggccgcagcagcaacagcagctgcgccagcaacctgccgccgccggcgccgatgccggcagctcagcctgtgcagcaggaagccgaactgcccaagaccgccccgtcggtaaacaggcctccggagaagcggcagagagtcccgtcggcatacaaccggttcatcaaggacgagatccagcgcatcaaggccggcaacccggacatcacccaccgggaggcgttcagcgcagccgcaaagaattgggcccatttcccccacatccacttcggcctcatgccggaccagggcctcaagaagaccttcaagactcaggatggcgctgaagacatgctactcaaagacgatctctacgccgcagcggctgcagctgcagcagccaacatgggcatcactccattctaataactctggttaggcatgtgttctgaatcagctggcacgtcgtagtggctatcgccctttgtgctgcattctagggtttcgtctcagatcttgatctcaacatcgatcgtgtgtcgtttaattagagtactttccagtgtggggatagaaatggagaataatcaagttagagcgcgcacctagtaggccactgatgatccggtaggtacagacttgattgtctcctctaaatatcccttttcatttcatgttctctctgtttttcctattttttttgttcctggaccccttcaactcgccagtagagagctcgttgtgcctctctgatcccatgtttgcgtatgtctgctcaacaacatgtttttaccatggagaacaagttgaacatctgttagatctatcaacagtgtcatatatatgttccatcgtc

SEQ ID NO: 12074 - protein, 344 aa, Zea mays subsp. mays
  peptide (1)..(344): Ceres Seq. ID no. 12411667
  misc_feature (103)..(302): Pfam Name: YABBY protein Pfam Description: YABBY protein
  misc_feature (94)..(344): Homolog of NCBI NO: 38605890 NR Description: OSJNBb0020O11.2 [Oryza sativa (japonica
  misc_feature (222)..(344): Homolog of NCBI NO: 27804377 NR Description: MADS-box transcription factor CDM51
  misc_feature (91)..(204): Homolog of NCBI NO: 27804377 NR Description: MADS-box transcription factor CDM51
  misc_feature (87)..(338): Homolog of NCBI NO: 18411242 NR Description: putative YABBY3 axial regulator; protein id: supported by cDNA: gi_14335013, supported by cDNA: gi_4928752 thaliana] >gi|4928753|gb|AAD33717.1|AF136540_1 YABBY3
  misc_feature (159)..(344): Homolog of NCBI NO: 37535908 NR Description: hypothetical protein [Oryza sativa (japonica group)] >gi|22267600|gb|AAM94935.1| putative transcription factor
  misc_feature (87)..(153): Homolog of NCBI NO: 7486543 NR Description: hypothetical protein F6N15.22 - Arabidopsis >gi|3193331|gb|AAC19313.1| F6N15.22 gene product [Arabidopsis >gi|7267105|emb|CAB80776.1| putative YABBY3 axial regulator
  misc_feature (246)..(305): Homolog of NCBI NO: 7486543 NR Description: hypothetical protein F6N15.22 - Arabidopsis >gi|3193331|gb|AAC19313.1| F6N15.22 gene product [Arabidopsis >gi|7267105|emb|CAB80776.1| putative YABBY3 axial regulator
  misc_feature (116)..(344): Homolog of NCBI NO: 37551421 NR Description: FIL-like protein [Triticum aestivum]
  misc_feature (247)..(303): Homolog of NCBI NO: 30683176 NR Description: expressed protein [Arabidopsis thaliana] expressed protein [Arabidopsis thaliana] unknown protein [Arabidopsis thaliana]
  misc_feature (110)..(163): Homolog of NCBI NO: 30683176 NR Description: expressed protein [Arabidopsis thaliana] expressed protein [Arabidopsis thaliana] unknown protein [Arabidopsis thaliana]
IPDSPPISQHAPLLLPCFPCCDPFLALLVLASRPAGSTIEQGEAPQQSSSDLSISSTASAPQVDRSGGGGPGASSCHTFRSSKPHIMMSSSSSSSAACCFPLDHLAPSPTEQLCYVHCNCCDTILAVGVPCSSLFKTVTVRCGHCANLLSVNLRGLLLPPAAPAPPNHLNFAHSLLSPTSPHGLLDELALQQAPSFLMEQASANLSSTMTGRSSNSSCASNLPPPAPMPAAQPVQQEAELPKTAPSVNRPPEKRQRVPSAYNRFIKDEIQRIKAGNPDITHREAFSAAAKNWAHFPHIHFGLMPDQGLKKTFKTQDGAEDMLLKDDLYAAAAAAAAANMGITPF

SEQ ID NO: 12075 - protein, 258 aa, Zea mays subsp. mays
  peptide (1)..(258): Ceres Seq. ID no. 12411668
  misc_feature (17)..(216): Pfam Name: YABBY protein Pfam Description: YABBY protein
  misc_feature (8)..(258): Homolog of NCBI NO: 38605890 NR Description: OSJNBb0020O11.2 [Oryza sativa (japonica
  misc_feature (136)..(258): Homolog of NCBI NO: 27804377 NR Description: MADS-box transcription factor CDM51
  misc_feature (5)..(118): Homolog of NCBI NO: 27804377 NR Description: MADS-box transcription factor CDM51
  misc_feature (1)..(252): Homolog of NCBI NO: 18411242 NR Description: putative YABBY3 axial regulator; protein id: supported by cDNA: gi_14335013, supported by cDNA: gi_4928752 thaliana] >gi|4928753|gb|AAD33717.1|AF136540_1 YABBY3
  misc_feature (73)..(258): Homolog of NCBI NO: 37535908 NR Description: hypothetical protein [Oryza sativa (japonica group)] >gi|22267600|gb|AAM94935.1| putative transcription factor
  misc_feature (1)..(67): Homolog of NCBI NO: 7486543 NR Description: hypothetical protein F6N15.22 - Arabidopsis >gi|3193331|gb|AAC19313.1| F6N15.22 gene product [Arabidopsis >gi|7267105|emb|CAB80776.1| putative YABBY3 axial regulator
  misc_feature (160)..(219): Homolog of NCBI NO: 7486543 NR Description: hypothetical protein F6N15.22 - Arabidopsis >gi|3193331|gb|AAC19313.1| F6N15.22 gene product [Arabidopsis >gi|7267105|emb|CAB80776.1| putative YABBY3 axial regulator
  misc_feature (30)..(258): Homolog of NCBI NO: 37551421 NR Description: FIL-like protein [Triticum aestivum]
  misc_feature (161)..(217): Homolog of NCBI NO: 30683176 NR Description: expressed protein [Arabidopsis thaliana] expressed protein [Arabidopsis thaliana] unknown protein [Arabidopsis thaliana]
  misc_feature (24)..(77): Homolog of NCBI NO: 30683176 NR Description: expressed protein [Arabidopsis thaliana] expressed protein [Arabidopsis thaliana] unknown protein [Arabidopsis thaliana]
MMSSSSSSSAACCFPLDHLAPSPTEQLCYVHCNCCDTILAVGVPCSSLFKTVTVRCGHCANLLSVNLRGLLLPPAAPAPPNHLNFAHSLLSPTSPHGLLDELALQQAPSFLMEQASANLSSTMTGRSSNSSCASNLPPPAPMPAAQPVQQEAELPKTAPSVNRPPEKRQRVPSAYNRFIKDEIQRIKAGNPDITHREAFSAAAKNWAHFPHIHFGLMPDQGLKKTFKTQDGAEDMLLKDDLYAAAAAAAAANMGITPF

SEQ ID NO: 12076 - protein, 257 aa, Zea mays subsp. mays
  peptide (1)..(257): Ceres Seq. ID no. 12411669
  misc_feature (16)..(215): Pfam Name: YABBY protein Pfam Description: YABBY protein
  misc_feature (7)..(257): Homolog of NCBI NO: 38605890 NR Description: OSJNBb0020O11.2 [Oryza sativa (japonica
  misc_feature (135)..(257): Homolog of NCBI NO: 27804377 NR Description: MADS-box transcription factor CDM51
  misc_feature (4)..(117): Homolog of NCBI NO: 27804377 NR Description: MADS-box transcription factor CDM51
  misc_feature (1)..(251): Homolog of NCBI NO: 18411242 NR Description: putative YABBY3 axial regulator; protein id: supported by cDNA: gi_14335013, supported by cDNA: gi_4928752 thaliana] >gi|4928753|gb|AAD33717.1|AF136540_1 YABBY3
  misc_feature (72)..(257): Homolog of NCBI NO: 37535908 NR Description: hypothetical protein [Oryza sativa (japonica group)] >gi|22267600|gb|AAM94935.1| putative transcription factor
  misc_feature (1)..(66): Homolog of NCBI NO: 7486543 NR Description: hypothetical protein F6N15.22 - Arabidopsis >gi|3193331|gb|AAC19313.1| F6N15.22 gene product [Arabidopsis >gi|7267105|emb|CAB80776.1| putative YABBY3 axial regulator
  misc_feature (159)..(218): Homolog of NCBI NO: 7486543 NR Description: hypothetical protein F6N15.22 - Arabidopsis >gi|3193331|gb|AAC19313.1| F6N15.22 gene product [Arabidopsis >gi|7267105|emb|CAB80776.1| putative YABBY3 axial regulator
  misc_feature (29)..(257): Homolog of NCBI NO: 37551421 NR Description: FIL-like protein [Triticum aestivum]
  misc_feature (160)..(216): Homolog of NCBI NO: 30683176 NR Description: expressed protein [Arabidopsis thaliana] expressed protein [Arabidopsis thaliana] unknown protein [Arabidopsis thaliana]
  misc_feature (23)..(76): Homolog of NCBI NO: 30683176 NR Description: expressed protein [Arabidopsis thaliana] expressed protein [Arabidopsis thaliana] unknown protein [Arabidopsis thaliana]
MSSSSSSSAACCFPLDHLAPSPTEQLCYVHCNCCDTILAVGVPCSSLFKTVTVRCGHCANLLSVNLRGLLLPPAAPAPPNHLNFAHSLLSPTSPHGLLDELALQQAPSFLMEQASANLSSTMTGRSSNSSCASNLPPPAPMPAAQPVQQEAELPKTAPSVNRPPEKRQRVPSAYNRFIKDEIQRIKAGNPDITHREAFSAAAKNWAHFPHIHFGLMPDQGLKKTFKTQDGAEDMLLKDDLYAAAAAAAAANMGITPF

SEQ ID NO: 12077 - DNA, 1224 bp, Zea mays subsp. mays
  misc_feature (1)..(1224): Ceres Seq. ID no. 12425143
  misc_feature: MA Experiment ID: 108687 Result: Down-regulated in Transcription
  misc_feature: MA Experiment 108687 PARAMETER Experiment Name: Zm_Embryos-Flowers__P Parameter: Tissue Value: Embryo vs. Aerial+
  misc_feature: MA Experiment ID: 20000535 Result: Down-regulated in Transcription
  misc_feature: MA Experiment 20000535 PARAMETER Experiment Name: Zm_Hybrid_Seed_Dev_P Parameter: DAP Value: 30 vs. 12
  misc_feature: MA Experiment 20000535 PARAMETER Experiment Name: Zm_Hybrid_Seed_Dev_P Parameter: Organism Value: Zea mays
  misc_feature: MA Experiment 20000535 PARAMETER Experiment Name: Zm_Hybrid_Seed_Dev_P Parameter: Plant Line Value: 35A19
  misc_feature: MA Experiment 20000535 PARAMETER Experiment Name: Zm_Hybrid_Seed_Dev_P Parameter: Tissue Value: Embryo vs. Unfert Floret
gcacgagaccattacctagaacatcctaatcgaaaaattttttggtgagtgccccctttcccttccctagaccagatcctcgccccgttttccacttttgcctccaccgccggcccaattcggataacaagctccctccgcctcgccgcgtctcctcccagccgcaggagccgccgccatccgatccggaagagggaggaggggggagggaggaggatctgtgtcccgattcgattggagctctcgtccccggcggtccaggatggtgcggggcaagacgcagatgaagcggatagagaacccggccagtcgccaggtcaccttctccaagcgccgcaacggcctgctcaagaaggcgttcgagctctccgtcctctgcgacgccgaggtcgcgctcgtcgtcttctccccgcgcggcaagctctacgaattcgccagcggaagtgcccagaaaacaattgaacgttatagaacgtacacaaaggataatgtcagcaacaagacagcacatcaggacattgagcaagtaaaagctgatgctgagggcctggcaaagaaactggaagcacttgaagcttacaaaagaaaacttttgggtgagaggttggaagaatgctcctttgaagaactgcacagtttggaagtgaaactcgaaaagagccttcattgcatcaggggaagaaagactcagctgctggaggagcaactccataagctgaaggagaaggagatgaatctgcgcaagagcaacgaagatttacgtgaaaagtgcaagaagcagccgccgccgccgccgcctatgctgatggctcctccgccgcctccagcgccggcagccatcgatcacacggggccgaaggatgtcgggatggacgtggagacggagctgtacataggattgcccggcagagattaccgctcaaacaacaaagacatgactgcacagtagctgtcaggtcaggtcaggtcaggctagccagcagtgcagagaataatcttagatctgtggtgcggagaactggagatgcaagccaagcccaagccaatcaacatgataaggatcatgagtgtcgcgtcgtgttttacaaacctgtccaccgtccgtcaaaggcacatgcgccagaacgtccgtcagagaacacttaccccctcatctccctctattagctanctgctccggcctgctcatgtcgaaaccttctgttcaagtatgttctcctcctg

SEQ ID NO: 12078 - protein, 228 aa, Zea mays subsp. mays
  peptide (1)..(228): Ceres Seq. ID no. 12425144
  misc_feature (74)..(172): Pfam Name: K-box region Pfam Description: K-box region
  misc_feature (1)..(228): Homolog of NCBI NO: 12002139 NR Description: MADS box protein 1 [Zea mays]
  misc_feature (1)..(220): Homolog of NCBI NO: 5295990 NR Description: MADS box-like protein [Oryza sativa (japonica
  misc_feature (1)..(226): Homolog of NCBI NO: 33621123 NR Description: transcription factor MADS56 [Oryza sativa
  misc_feature (1)..(226): Homolog of NCBI NO: 5051933 NR Description: MADS-box protein FDRMADS8 [Oryza sativa]
  misc_feature (1)..(226): Homolog of NCBI NO: 37536442 NR Description: putative transcription factor [Oryza sativa
  misc_feature (1)..(221): Homolog of NCBI NO: 6635740 NR Description: agamous-like MADS box protein OPMADS1 [Elaeis
  misc_feature (1)..(214): Homolog of NCBI NO: 7446552 NR Description: MADS box protein A - white mustard
  misc_feature (1)..(214): Homolog of NCBI NO: 15225534 NR Description: MADS-box protein (AGL20); protein id: supported by cDNA: 5467., supported by cDNA: gi_11496164, by cDNA: gi_14326553, supported by cDNA: gi_20334733 [Arabidopsis
  misc_feature (1)..(214): Homolog of NCBI NO: 30171309 NR Description: MADS-box protein [Cardamine flexuosa]
  misc_feature (1)..(219): Homolog of NCBI NO: 3493647 NR Description: transcription activator [Pimpinella brachycarpa]
MVRGKTQMKRIENPASRQVTFSKRRNGLLKKAFELSVLCDAEVALVVFSPRGKLYEFASGSAQKTIERYRTYTKDNVSNKTAHQDIEQVKADAEGLAKKLEALEAYKRKLLGERLEECSFEELHSLEVKLEKSLHCIRGRKTQLLEEQLHKLKEKEMNLRKSNEDLREKCKKQPPPPPPMLMAPPPPPAPAAIDHTGPKDVGMDVETELYIGLPGRDYRSNNKDMTAQ

SEQ ID NO: 12079 - protein, 221 aa, Zea mays subsp. mays
  peptide (1)..(221): Ceres Seq. ID no. 12425145
  misc_feature (67)..(165): Pfam Name: K-box region Pfam Description: K-box region
  misc_feature (1)..(221): Homolog of NCBI NO: 12002139 NR Description: MADS box protein 1 [Zea mays]
  misc_feature (1)..(213): Homolog of NCBI NO: 5295990 NR Description: MADS box-like protein [Oryza sativa (japonica
  misc_feature (1)..(219): Homolog of NCBI NO: 33621123 NR Description: transcription factor MADS56 [Oryza sativa
  misc_feature (1)..(219): Homolog of NCBI NO: 5051933 NR Description: MADS-box protein FDRMADS8 [Oryza sativa]
  misc_feature (1)..(219): Homolog of NCBI NO: 37536442 NR Description: putative transcription factor [Oryza sativa
  misc_feature (1)..(214): Homolog of NCBI NO: 6635740 NR Description: agamous-like MADS box protein OPMADS1 [Elaeis
  misc_feature (1)..(207): Homolog of NCBI NO: 7446552 NR Description: MADS box protein A - white mustard
  misc_feature (1)..(207): Homolog of NCBI NO: 15225534 NR Description: MADS-box protein (AGL20); protein id: supported by cDNA: 5467., supported by cDNA: gi_11496164, by cDNA: gi_14326553, supported by cDNA: gi_20334733 [Arabidopsis
  misc_feature (1)..(207): Homolog of NCBI NO: 30171309 NR Description: MADS-box protein [Cardamine flexuosa]
  misc_feature (1)..(212): Homolog of NCBI NO: 3493647 NR Description: transcription activator [Pimpinella brachycarpa]
MKRIENPASRQVTFSKRRNGLLKKAFELSVLCDAEVALVVFSPRGKLYEFASGSAQKTIERYRTYTKDNVSNKTAHQDIEQVKADAEGLAKKLEALEAYKRKLLGERLEECSFEELHSLEVKLEKSLHCIRGRKTQLLEEQLHKLKEKEMNLRKSNEDLREKCKKQPPPPPPMLMAPPPPPAPAAIDHTGPKDVGMDVETELYIGLPGRDYRSNNKDMTAQ

SEQ ID NO: 12080 - DNA, 1803 bp, Zea mays subsp. mays
  misc_feature (1)..(1803): Ceres Seq. ID no. 12342358
  misc_feature: MA Experiment ID: 108535 Result: Up-regulated in Transcription
  misc_feature: MA Experiment 108535 PARAMETER Experiment Name: Zm_Meristem_P Parameter: Age (day) Value: 8
  misc_feature: MA Experiment 108535 PARAMETER Experiment Name: Zm_Meristem_P Parameter: Organism Value: Zea mays
  misc_feature: MA Experiment 108535 PARAMETER Experiment Name: Zm_Meristem_P Parameter: Plant Line Value: 35A19
  misc_feature: MA Experiment 108535 PARAMETER Experiment Name: Zm_Meristem_P Parameter: Tissue Value: Root Meristem vs. Above Root Meristem
  misc_feature: MA Experiment ID: 20000108 Result: Up-regulated in Transcription
  misc_feature: MA Experiment 20000108 PARAMETER Experiment Name: Zm_Root-Tips_P Parameter: Age (day) Value: 12
  misc_feature: MA Experiment 20000108 PARAMETER Experiment Name: Zm_Root-Tips_P Parameter: Organism Value: Zea mays
  misc_feature: MA Experiment 20000108 PARAMETER Experiment Name: Zm_Root-Tips_P Parameter: Tissue Value: Root tips vs. Root mid region    35
  misc_feature: MA Experiment 20000108 PARAMETER Experiment Name: Zm_Root-Tips_P Parameter: Tissue Value: Root tips vs. Root mid region   Sequence Listing-Misc Features (4)
  misc_feature: MA Experiment ID: 20000477 Result: Down-regulated in Transcription
  misc_feature: MA Experiment 20000477 PARAMETER Experiment Name: Zm_5mM_SA_P Parameter: Age (day) Value: 10
  misc_feature: MA Experiment 20000477 PARAMETER Experiment Name: Zm_5mM_SA_P Parameter: Organism Value: Zea mays
  misc_feature: MA Experiment 20000477 PARAMETER Experiment Name: Zm_5mM_SA_P Parameter: Plant Line Value: 35A19
  misc_feature: MA Experiment 20000477 PARAMETER Experiment Name: Zm_5mM_SA_P Parameter: Timepoint (hr) Value: 48
  misc_feature: MA Experiment 20000477 PARAMETER Experiment Name: Zm_5mM_SA_P Parameter: Tissue Value: Aerial
  misc_feature: MA Experiment 20000477 PARAMETER Experiment Name: Zm_5mM_SA_P Parameter: Treatment Value: 5mM SA vs. No Treatment
  misc_feature: MA Experiment ID: 20000480 Result: Down-regulated in Transcription
  misc_feature: MA Experiment 20000480 PARAMETER Experiment Name: Zm_Drought_P Parameter: Age (day) Value: 11
  misc_feature: MA Experiment 20000480 PARAMETER Experiment Name: Zm_Drought_P Parameter: Organism Value: Zea mays
  misc_feature: MA Experiment 20000480 PARAMETER Experiment Name: Zm_Drought_P Parameter: Plant Line Value: 35A19
  misc_feature: MA Experiment 20000480 PARAMETER Experiment Name: Zm_Drought_P Parameter: Timepoint (hr) Value: 72
  misc_feature: MA Experiment 20000480 PARAMETER Experiment Name: Zm_Drought_P Parameter: Tissue Value: Aerial
  misc_feature: MA Experiment 20000480 PARAMETER Experiment Name: Zm_Drought_P Parameter: Treatment Value: Drought vs. No Drought
  misc_feature: MA Experiment ID: 20000534 Result: Down-regulated in Transcription
  misc_feature: MA Experiment 20000534 PARAMETER Experiment Name: Zm_Hybrid_Pollen_P Parameter: Age (day) Value: 8
  misc_feature: MA Experiment 20000534 PARAMETER Experiment Name: Zm_Hybrid_Pollen_P Parameter: Organism Value: Zea mays
  misc_feature: MA Experiment 20000534 PARAMETER Experiment Name: Zm_Hybrid_Pollen_P Parameter: Plant Line Value: 35A19
  misc_feature: MA Experiment 20000534 PARAMETER Experiment Name: Zm_Hybrid_Pollen_P Parameter: Tissue Value: Pollen vs. Aerial
gcatcgccgccccccgtcccgacgaattggaatacggaaagcgaaagatgatggatctcgccgacccccagcagcagcagcggctcatcgccggcgcggcgctgctgctggcaaccgcggccttcctcaggctcctcctggagctcccgctcccggggcggcaagcgcctgccgcccaccatcccgggggcgccggtgatcggcggcctcgtcaagttcatgcgcgggcccatccccatgatccgggagcagtacgcccgcctcggcagcgtcttcaccgtccccatcatcacccgcaggatcacgttcctcgtcggccctgaggtgtccgcgcacttcttcaagggcaacgaggccgagatgagccagcaggaggtgtacaggttcaacgtgcccacgttcggcccccggggtcgtcttcgacgtcgactactccgtcaggcaggagcagttcaggttctttaccgaggcgctccgggcgaacaagctgcgcagctatgtcgaccagatggttgctgaggctgaggagtacttctcaaagtggggagaaagtggcactgttgatttgaagtatgagttggagcacctcatcatactgacagctagccggtgcttgctgggaagggaggtgcgagaaaagctgttcgacgatgtttctgctctcttccatgaccttgacaacgggatgcagccaatcagtgtactcttcccatacctcccaatccctgcacataagcgccgcgacagggcacgtgcacgtctggcagaaatctttgccaccatcatcaagtcccgcaaggcctctggacagtctgaagaagacatgctgcagtgcttcattgattccaagtacaagaatgggcgttccaccagtgagggcgaggtaaccgggctacttatcgcagcactcttcgctgggcagcacaccagctctatcacctcaacctggactggagcatacatgcttcggttcaagcagtacttcgcagaggctgtagaggagcagaaggatgtcatgaaacggcacggcgacaagattgatcatgacatcctcgcggagatggacgtcctctaccggtgcatcaaggaggccctccgtctccacccgccgctaatcatgttgcttcgtcaatcacacagcgacttcaccgtgacaacaaaggaaggcaaagtgtatgacatccccaagggccacatcgtcgcgacatcaccatccttcgccaacaggctgccccacatctacaagaaccctgactcatatgaccctgaccggttcggtcccggaagggaggaggacaaggctgcaggtgccttctcgtacatctccttcggtggtggcaggcatgggtgcctcggtgagcccttcgcctaccttcagatcaaggcgatctggacgcacctactgaggaactttgagttcgagctggtatcgccgttcccagagaacgactggaacgccatggtggttggcatcaagggcgaggtgatggttaactacaagaggcggaagcttgtcgtggacaactaagattgtggtcgccagtctctatctcttagatgcttgcttgcttctttttgattcgattgctttcacctgtctgtcagcatttgttcggtgcaagttctgctgcacacacgccagctttgtaggggtgtttctgttgtttaggattctgtaatttgcttcaccatgggggtctgccatgatgtgcaacatccgcttgttagctagcttcctagctcagcattccccttagtcaaatctgtaacctgtagcatctataagcgtgtggctttattgtc

SEQ ID NO: 12081 - protein, 339 aa, Zea mays subsp. mays
  peptide (1)..(339): Ceres Seq. ID no. 12342359
  misc_feature (1)..(335): Homolog of NCBI NO: 15221075 NR Description: putative obtusifoliol 14-alpha demethylase; id: At1g11680.1, supported by cDNA: 110306., supported by cDNA: supported by cDNA: gi_15292852, supported by cDNA:
  misc_feature (1)..(335): Homolog of NCBI NO: 18000074 NR Description: obtusifoliol-14-demethylase [Nicotiana tabacum]
  misc_feature (1)..(335): Homolog of NCBI NO: 27461067 NR Description: obtusifoliol-14-demethylase [Nicotiana tabacum]
  misc_feature (1)..(333): Homolog of NCBI NO: 15227817 NR Description: putative obtusifoliol 14-alpha demethylase; id: At2g17330.1 [Arabidopsis thaliana] >gi|25282617|pir||H84550
  misc_feature (27)..(339): Homolog of NCBI NO: 7489685 NR Description: probable obtusifoliol 14-alpha-demethylase CYP51
  misc_feature (1)..(334): Homolog of NCBI NO: 40748287 NR Description: 14-alpha demethylase [Fundulus heteroclitus]
  misc_feature (1)..(339): Homolog of NCBI NO: 27542762 NR Description: cytochrome P450-like protein [Sorghum bicolor]
  misc_feature (1)..(339): Homolog of NCBI NO: 5921924 NR Description: Cytochrome P450 51 (CYPL1) (P450-L1A1)
  misc_feature (1)..(339): Homolog of NCBI NO: 6166036 NR Description: Cytochrome P450 51 (CYPL1) (P450-L1A1)
  misc_feature (1)..(339): Homolog of NCBI NO: 4586676 NR Description: sterol 14-demethylase [Oryza sativa (japonica
MVAEAEEYFSKWGESGTVDLKYELEHLIILTASRCLLGREVREKLFDDVSALFHDLDNGMQPISVLFPYLPIPAHKRRDRARARLAEIFATIIKSRKASGQSEEDMLQCFIDSKYKNGRSTSEGEVTGLLIAALFAGQHTSSITSTWTGAYMLRFKQYFAEAVEEQKDVMKRHGDKIDHDILAEMDVLYRCIKEALRLHPPLIMLLRQSHSDFTVTTKEGKVYDIPKGHIVATSPSFANRLPHIYKNPDSYDPDRFGPGREEDKAAGAFSYISFGGGRHGCLGEPFAYLQIKAIWTHLLRNFEFELVSPFPENDWNAMVVGIKGEVMVNYKRRKLVVDN

SEQ ID NO: 12082 - protein, 280 aa, Zea mays subsp. mays
  peptide (1)..(280): Ceres Seq. ID no. 12342360
  misc_feature (1)..(280): Homolog of NCBI NO: 27542762 NR Description: cytochrome P450-like protein [Sorghum bicolor]
  misc_feature (1)..(280): Homolog of NCBI NO: 5921924 NR Description: Cytochrome P450 51 (CYPL1) (P450-L1A1)
  misc_feature (1)..(280): Homolog of NCBI NO: 6166036 NR Description: Cytochrome P450 51 (CYPL1) (P450-L1A1)
  misc_feature (1)..(280): Homolog of NCBI NO: 4586676 NR Description: sterol 14-demethylase [Oryza sativa (japonica
  misc_feature (1)..(276): Homolog of NCBI NO: 15221075 NR Description: putative obtusifoliol 14-alpha demethylase; id: At1g11680.1, supported by cDNA: 110306., supported by cDNA: supported by cDNA: gi_15292852, supported by cDNA:
  misc_feature (1)..(276): Homolog of NCBI NO: 18000074 NR Description: obtusifoliol-14-demethylase [Nicotiana tabacum]
  misc_feature (1)..(276): Homolog of NCBI NO: 27461067 NR Description: obtusifoliol-14-demethylase [Nicotiana tabacum]
  misc_feature (1)..(274): Homolog of NCBI NO: 15227817 NR Description: putative obtusifoliol 14-alpha demethylase; id: At2g17330.1 [Arabidopsis thaliana] >gi|25282617|pir||H84550
  misc_feature (1)..(280): Homolog of NCBI NO: 7489685 NR Description: probable obtusifoliol 14-alpha-demethylase CYP51
  misc_feature (1)..(275): Homolog of NCBI NO: 40748287 NR Description: 14-alpha demethylase [Fundulus heteroclitus]
MQPISVLFPYLPIPAHKRRDRARARLAEIFATIIKSRKASGQSEEDMLQCFIDSKYKNGRSTSEGEVTGLLIAALFAGQHTSSITSTWTGAYMLRFKQYFAEAVEEQKDVMKRHGDKIDHDILAEMDVLYRCIKEALRLHPPLIMLLRQSHSDFTVTTKEGKVYDIPKGHIVATSPSFANRLPHIYKNPDSYDPDRFGPGREEDKAAGAFSYISFGGGRHGCLGEPFAYLQIKAIWTHLLRNFEFELVSPFPENDWNAMVVGIKGEVMVNYKRRKLVVDN

SEQ ID NO: 12083 - protein, 234 aa, Zea mays subsp. mays
  peptide (1)..(234): Ceres Seq. ID no. 12342361
  misc_feature (1)..(234): Homolog of NCBI NO: 27542762 NR Description: cytochrome P450-like protein [Sorghum bicolor]
  misc_feature (1)..(234): Homolog of NCBI NO: 5921924 NR Description: Cytochrome P450 51 (CYPL1) (P450-L1A1)
  misc_feature (1)..(234): Homolog of NCBI NO: 6166036 NR Description: Cytochrome P450 51 (CYPL1) (P450-L1A1)
  misc_feature (1)..(234): Homolog of NCBI NO: 4586676 NR Description: sterol 14-demethylase [Oryza sativa (japonica
  misc_feature (1)..(230): Homolog of NCBI NO: 15221075 NR Description: putative obtusifoliol 14-alpha demethylase; id: At1g11680.1, supported by cDNA: 110306., supported by cDNA: supported by cDNA: gi_15292852, supported by cDNA:
  misc_feature (1)..(230): Homolog of NCBI NO: 18000074 NR Description: obtusifoliol-14-demethylase [Nicotiana tabacum]
  misc_feature (1)..(230): Homolog of NCBI NO: 27461067 NR Description: obtusifoliol-14-demethylase [Nicotiana tabacum]
  misc_feature (1)..(228): Homolog of NCBI NO: 15227817 NR Description: putative obtusifoliol 14-alpha demethylase; id: At2g17330.1 [Arabidopsis thaliana] >gi|25282617|pir||H84550
  misc_feature (1)..(234): Homolog of NCBI NO: 7489685 NR Description: probable obtusifoliol 14-alpha-demethylase CYP51
  misc_feature (1)..(229): Homolog of NCBI NO: 40748287 NR Description: 14-alpha demethylase [Fundulus heteroclitus]
MLQCFIDSKYKNGRSTSEGEVTGLLIAALFAGQHTSSITSTWTGAYMLRFKQYFAEAVEEQKDVMKRHGDKIDHDILAEMDVLYRCIKEALRLHPPLIMLLRQSHSDFTVTTKEGKVYDIPKGHIVATSPSFANRLPHIYKNPDSYDPDRFGPGREEDKAAGAFSYISFGGGRHGCLGEPFAYLQIKAIWTHLLRNFEFELVSPFPENDWNAMVVGIKGEVMVNYKRRKLVVDN

SEQ ID NO: 12084 - DNA, 1968 bp, Zea mays subsp. mays
  misc_feature (1)..(1968): Ceres Seq. ID no. 12367168
  misc_feature: MA Experiment ID: 108527 Result: Up-regulated in Transcription
  misc_feature: MA Experiment 108527 PARAMETER Experiment Name: Zm_5mM_NO_P Parameter: Age (day) Value: 8
  misc_feature: MA Experiment 108527 PARAMETER Experiment Name: Zm_5mM_NO_P Parameter: Organism Value: Zea mays
  misc_feature: MA Experiment 108527 PARAMETER Experiment Name: Zm_5mM_NO_P Parameter: Plant Line Value: 35A19
  misc_feature: MA Experiment 108527 PARAMETER Experiment Name: Zm_5mM_NO_P Parameter: Timepoint (hr) Value: 6
  misc_feature: MA Experiment 108527 PARAMETER Experiment Name: Zm_5mM_NO_P Parameter: Tissue Value: Aerial
  misc_feature: MA Experiment 108527 PARAMETER Experiment Name: Zm_5mM_NO_P Parameter: Treatment Value: 5mM NO vs. No Treatment
  misc_feature: MA Experiment ID: 108528 Result: Down-regulated in Transcription
  misc_feature: MA Experiment 108528 PARAMETER Experiment Name: Zm_Imbibed_Seeds_P Parameter: Age (day) Value: 5 vs. 2
  misc_feature: MA Experiment 108528 PARAMETER Experiment Name: Zm_Imbibed_Seeds_P Parameter: Organism Value: Zea mays
  misc_feature: MA Experiment 108528 PARAMETER Experiment Name: Zm_Imbibed_Seeds_P Parameter: Plant Line Value: 35A19
  misc_feature: MA Experiment 108528 PARAMETER Experiment Name: Zm_Imbibed_Seeds_P Parameter: Tissue Value: Aerial vs. Embryo
  misc_feature: MA Experiment ID: 108529 Result: Down-regulated in Transcription
  misc_feature: MA Experiment 108529 PARAMETER Experiment Name: Zm_Imbibed_Seeds_P Parameter: Age (day) Value: 5 vs. 2
  misc_feature: MA Experiment 108529 PARAMETER Experiment Name: Zm_Imbibed_Seeds_P Parameter: Organism Value: Zea mays
  misc_feature: MA Experiment 108529 PARAMETER Experiment Name: Zm_Imbibed_Seeds_P Parameter: Plant Line Value: 35A19
  misc_feature: MA Experiment 108529 PARAMETER Experiment Name: Zm_Imbibed_Seeds_P Parameter: Tissue Value: Roots vs. Embryo
  misc_feature: MA Experiment ID: 108530 Result: Down-regulated in Transcription
  misc_feature: MA Experiment 108530 PARAMETER Experiment Name: Zm_Imbibed_Seeds_P Parameter: Age (day) Value: 6 vs. 2
  misc_feature: MA Experiment 108530 PARAMETER Experiment Name: Zm_Imbibed_Seeds_P Parameter: Organism Value: Zea mays
  misc_feature: MA Experiment 108530 PARAMETER Experiment Name: Zm_Imbibed_Seeds_P Parameter: Plant Line Value: 35A19
  misc_feature: MA Experiment 108530 PARAMETER Experiment Name: Zm_Imbibed_Seeds_P Parameter: Tissue Value: Aerial vs. Embryo
  misc_feature: MA Experiment ID: 108535 Result: Down-regulated in Transcription
  misc_feature: MA Experiment 108535 PARAMETER Experiment Name: Zm_Meristem_P Parameter: Age (day) Value: 8
  misc_feature: MA Experiment 108535 PARAMETER Experiment Name: Zm_Meristem_P Parameter: Organism Value: Zea mays
  misc_feature: MA Experiment 108535 PARAMETER Experiment Name: Zm_Meristem_P Parameter: Plant Line Value: 35A19
  misc_feature: MA Experiment 108535 PARAMETER Experiment Name: Zm_Meristem_P Parameter: Tissue Value: Root Meristem vs. Above Root Meristem
  misc_feature: MA Experiment ID: 108536 Result: Up-regulated in Transcription
  misc_feature: MA Experiment 108536 PARAMETER Experiment Name: Zm_Meristem_P Parameter: Age (day) Value: 8
  misc_feature: MA Experiment 108536 PARAMETER Experiment Name: Zm_Meristem_P Parameter: Organism Value: Zea mays
  misc_feature: MA Experiment 108536 PARAMETER Experiment Name: Zm_Meristem_P Parameter: Plant Line Value: 35A19
  misc_feature: MA Experiment 108536 PARAMETER Experiment Name: Zm_Meristem_P Parameter: Tissue Value: Shoot Meristem vs. Above Shoot Meristem
  misc_feature: MA Experiment ID: 108547 Result: Down-regulated in Transcription
  misc_feature: MA Experiment 108547 PARAMETER Experiment Name: Zm_Imbibed_Seeds_P Parameter: Age (day) Value: 4 vs. 2
  misc_feature: MA Experiment 108547 PARAMETER Experiment Name: Zm_Imbibed_Seeds_P Parameter: Organism Value: Zea mays
  misc_feature: MA Experiment 108547 PARAMETER Experiment Name: Zm_Imbibed_Seeds_P Parameter: Plant Line Value: 35A19
  misc_feature: MA Experiment 108547 PARAMETER Experiment Name: Zm_Imbibed_Seeds_P Parameter: Tissue Value: Aerial vs. Embryo
  misc_feature: MA Experiment ID: 108559 Result: Up-regulated in Transcription
  misc_feature: MA Experiment 108559 PARAMETER Experiment Name: Zm_5mM_NO_P Parameter: Age (day) Value: 8
  misc_feature: MA Experiment 108559 PARAMETER Experiment Name: Zm_5mM_NO_P Parameter: Organism Value: Zea mays
  misc_feature: MA Experiment 108559 PARAMETER Experiment Name: Zm_5mM_NO_P Parameter: Plant Line Value: 35A19
  misc_feature: MA Experiment 108559 PARAMETER Experiment Name: Zm_5mM_NO_P Parameter: Timepoint (hr) Value: 12
  misc_feature: MA Experiment 108559 PARAMETER Experiment Name: Zm_5mM_NO_P Parameter: Tissue Value: Aerial
  misc_feature: MA Experiment 108559 PARAMETER Experiment Name: Zm_5mM_NO_P Parameter: Treatment Value: 5mM NO vs. No Treatment
  misc_feature: MA Experiment ID: 108597 Result: Down-regulated in Transcription
  misc_feature: MA Experiment 108597 PARAMETER Experiment Name: Zm_100uM_ABA_P Parameter: Age (day) Value: 9
  misc_feature: MA Experiment 108597 PARAMETER Experiment Name: Zm_100uM_ABA_P Parameter: Organism Value: Zea mays
  misc_feature: MA Experiment 108597 PARAMETER Experiment Name: Zm_100uM_ABA_P Parameter: Plant Line Value: 35A19
  misc_feature: MA Experiment 108597 PARAMETER Experiment Name: Zm_100uM_ABA_P Parameter: Timepoint (hr) Value: 24
  misc_feature: MA Experiment 108597 PARAMETER Experiment Name: Zm_100uM_ABA_P Parameter: Tissue Value: Aerial
  misc_feature: MA Experiment 108597 PARAMETER Experiment Name: Zm_100uM_ABA_P Parameter: Treatment Value: 100uM ABA vs. No Treatment
  misc_feature: MA Experiment ID: 108689 Result: Down-regulated in Transcription
  misc_feature: MA Experiment 108689 PARAMETER Experiment Name: Zm_Drought_Roots_P Parameter: Age (day) Value: 9
  misc_feature: MA Experiment 108689 PARAMETER Experiment Name: Zm_Drought_Roots_P Parameter: Organism Value: Zea mays
  misc_feature: MA Experiment 108689 PARAMETER Experiment Name: Zm_Drought_Roots_P Parameter: Plant Line Value: 35A19
  misc_feature: MA Experiment 108689 PARAMETER Experiment Name: Zm_Drought_Roots_P Parameter: Timepoint (hr) Value: 24
  misc_feature: MA Experiment 108689 PARAMETER Experiment Name: Zm_Drought_Roots_P Parameter: Tissue Value: Roots
  misc_feature: MA Experiment 108689 PARAMETER Experiment Name: Zm_Drought_Roots_P Parameter: Treatment Value: Drought vs. No Drought
  misc_feature: MA Experiment ID: 20000478 Result: Down-regulated in Transcription
  misc_feature: MA Experiment 20000478 PARAMETER Experiment Name: Zm_5mM_SA_P Parameter: Age (day) Value: 11
  misc_feature: MA Experiment 20000478 PARAMETER Experiment Name: Zm_5mM_SA_P Parameter: Organism Value: Zea mays
  misc_feature: MA Experiment 20000478 PARAMETER Experiment Name: Zm_5mM_SA_P Parameter: Plant Line Value: 35A19
  misc_feature: MA Experiment 20000478 PARAMETER Experiment Name: Zm_5mM_SA_P Parameter: Timepoint (hr) Value: 72
  misc_feature: MA Experiment 20000478 PARAMETER Experiment Name: Zm_5mM_SA_P Parameter: Tissue Value: Aerial
  misc_feature: MA Experiment 20000478 PARAMETER Experiment Name: Zm_5mM_SA_P Parameter: Treatment Value: 5mM SA vs. No Treatment
  misc_feature: MA Experiment ID: 20000487 Result: Down-regulated in Transcription
  misc_feature: MA Experiment 20000487 PARAMETER Experiment Name: Zm_50mM_NH4NO3_L_to_H_P Parameter: Organism Value: Zea mays
  misc_feature: MA Experiment 20000487 PARAMETER Experiment Name: Zm_50mM_NH4NO3_L_to_H_P Parameter: Timepoint (hr) Value: 4
  misc_feature: MA Experiment 20000487 PARAMETER Experiment Name: Zm_50mM_NH4NO3_L_to_H_P Parameter: Tissue Value: Leaves
  misc_feature: MA Experiment 20000487 PARAMETER Experiment Name: Zm_50mM_NH4NO3_L_to_H_P Parameter: Treatment Value: 50mM NH4NO3 vs. 100mM Mannitol
  misc_feature: MA Experiment ID: 20000488 Result: Down-regulated in Transcription
  misc_feature: MA Experiment 20000488 PARAMETER Experiment Name: Zm_50mM_NH4NO3_L_to_H_P Parameter: Organism Value: Zea mays
  misc_feature: MA Experiment 20000488 PARAMETER Experiment Name: Zm_50mM_NH4NO3_L_to_H_P Parameter: Timepoint (hr) Value: 8
  misc_feature: MA Experiment 20000488 PARAMETER Experiment Name: Zm_50mM_NH4NO3_L_to_H_P Parameter: Tissue Value: Leaves
  misc_feature: MA Experiment 20000488 PARAMETER Experiment Name: Zm_50mM_NH4NO3_L_to_H_P Parameter: Treatment Value: 50mM NH4NO3 vs. 100mM Mannitol
gcacgagaccattacctagaacatcctaatcgaaaaagtcccgtactcccgtccaaggcagcagagaccagagagcgaaggaggccaaggccatcgctctcctagcctcggagacttgcctttgcatacacatccccccggagggcggtggccggagctgacccctgatcggacgcgcttagcgcctgagggcatggctgcaaccgtgaggagggctgcttcctccgtcctctctcgcttcctcctcacaaagccttcgccttcgcctgcttctgccgccggcaataattccgctctcctcggatcaggggctgctgctcttcacaggttcagcaccgcaccggcatccgcggccgcggccgcagaggagccgatccagcccgcggtggaggtgaagcacacccagctcctcatcaatggcaacttcgtcgacgctgcttctgggaagacgttcccgacgctggacccgcgcaccggcgaggtcatcgcgcgcgtcgccgagggcgacagcgaggacatcgaccgcgccgtggccgccgcccgcagggccttcgacgagggcccgtggccgaggatgaccgcctacgatcggtgccgcgtgctgctgcgcttcgcggacctgatcgagcggcacgcggaggaggtcgcggcgctggagacgtgggacaacggcaagacgctggcgcaggcggcgggggccgaggtgcccatggtggcgcggtgcgtccggtactacgccggctgggcggacaagatccacggcctggtggcgccggccgacggcgcgcaccacgtgcaggtgctgcacgagccggtcggcgtggccggccagatcatcccctggaacttcccgctgctcatgttcgcctggaaggtcggcccggcgctcgcctgcggcaacaccgtcgtcctcaagaccgccgagcagacgccgctctccgcgctctacgtggccaacctcctccacgaggctgggctccccgagggtgttctgaacgtggtgtccggcttcggcccgacggccggcgcagcgctctccagccacatgggtgtcgacaagcttgcgttcacgggatcgacgggcacggggcagatcgtgctcgagctggcggcgaggagcaaccttaagccggtgacgctggagctcggtggcaagtcccctttcatcgtcatggacgacgccgacgtcgaccaggccgtcgagctcgcgcaccaggcggtcttcttcaaccagggccaatgctgctgcgccgggtcgcggacgttcgtgcacgagcgcgtgtacgacgagttcgtggagaagtccaaggcccgcgccctgaagcgcgtcgtcggcgaccccttcagggacggggtcgaacaggggcctcagatcgacggcgagcaattcaacaagatcttgcggtacgtccagtccggcgtcgacagcggtgccaccctcgtcgccggcggcgacagggtaggcgacaggggcttctacatacagccgacggtgtttgccgacgccaaggacgaaatgaagatcgctcgggaggagatattcgggccggtgcaaaccattctcaagttcagcggcgtggaggaggtgatccggcgcgcgaacgcgacgccctacgggctggcggcgggggtgttcacgcggagcctggacgcggccaacaccctgtcgcgggcgctgcgggcgggcaccgtgtgggtgaactgctacgacgtgttcgacgccaccatcccgttcggcggctacaagatgagcggcgtcgggcgggagaagggcatctacgccctccgcaactacctccagacaaaggccgtcgtcacacccatcaagaaccccgcatggctgtaaatcacatcctccgtccttgcccgcacggcgctgcgccggttctcggagaacgtgacgaataaaacaaacggtttggttaaaaagacaaggacgacggaaaatgggtcatttttatctccccc

SEQ ID NO: 12085 - protein, 550 aa, Zea mays subsp. mays
  peptide (1)..(550): Ceres Seq. ID no. 12367169
  misc_feature (1)..(550): Homolog of NCBI NO: 19850251 NR Description: mitochondrial aldehyde dehydrogenase RF2B [Zea >gi|19850253|gb|AAL99614.1|AF348418_1 mitochondrial aldehyde
  misc_feature (1)..(550): Homolog of NCBI NO: 20530129 NR Description: mitochondrial aldehyde dehydrogenase [Sorghum
  misc_feature (1)..(550): Homolog of NCBI NO: 8574429 NR Description: mitochondrial aldehyde dehydrogenase ALDH2a
  misc_feature (6)..(550): Homolog of NCBI NO: 20530131 NR Description: mitochondrial aldehyde dehydrogenase [Sorghum
  misc_feature (2)..(550): Homolog of NCBI NO: 15128580 NR Description: mitochondrial aldehyde dehydrogenase ALDH2
  misc_feature (2)..(550): Homolog of NCBI NO: 20530127 NR Description: mitochondrial aldehyde dehydrogenase [Secale
  misc_feature (6)..(550): Homolog of NCBI NO: 7431451 NR Description: rf2 nuclear restorer protein - maize RF2 >gi|12004294|gb|AAG43988.1|AF215823_1 T cytoplasm male
  misc_feature (1)..(550): Homolog of NCBI NO: 11691926 NR Description: aldehyde dehydrogenase ALDH2b [Oryza sativa
  misc_feature (1)..(550): Homolog of NCBI NO: 8163730 NR Description: aldehyde dehydrogenase [Oryza sativa]
  misc_feature (6)..(550): Homolog of NCBI NO: 14276718 NR Description: T-cytoplasm male sterility restorer factor 2 [Zea
MAATVRRAASSVLSRFLLTKPSPSPASAAGNNSALLGSGAAALHRFSTAPASAAAAAEEPIQPAVEVKHTQLLINGNFVDAASGKTFPTLDPRTGEVIARVAEGDSEDIDRAVAAARRAFDEGPWPRMTAYDRCRVLLRFADLIERHAEEVAALETWDNGKTLAQAAGAEVPMVARCVRYYAGWADKIHGLVAPADGAHHVQVLHEPVGVAGQIIPWNFPLLMFAWKVGPALACGNTVVLKTAEQTPLSALYVANLLHEAGLPEGVLNVVSGFGPTAGAALSSHMGVDKLAFTGSTGTGQIVLELAARSNLKPVTLELGGKSPFIVMDDADVDQAVELAHQAVFFNQGQCCCAGSRTFVHERVYDEFVEKSKARALKRVVGDPFRDGVEQGPQIDGEQFNKILRYVQSGVDSGATLVAGGDRVGDRGFYIQPTVFADAKDEMKIAREEIFGPVQTILKFSGVEEVIRRANATPYGLAAGVFTRSLDAANTLSRALRAGTVWVNCYDVFDATIPFGGYKMSGVGREKGIYALRNYLQTKAVVTPIKNPAWL

SEQ ID NO: 12086 - protein, 423 aa, Zea mays subsp. mays
  peptide (1)..(423): Ceres Seq. ID no. 12367170
  misc_feature (1)..(423): Homolog of NCBI NO: 19850251 NR Description: mitochondrial aldehyde dehydrogenase RF2B [Zea >gi|19850253|gb|AAL99614.1|AF348418_1 mitochondrial aldehyde
  misc_feature (1)..(423): Homolog of NCBI NO: 20530129 NR Description: mitochondrial aldehyde dehydrogenase [Sorghum
  misc_feature (1)..(423): Homolog of NCBI NO: 8574429 NR Description: mitochondrial aldehyde dehydrogenase ALDH2a
  misc_feature (1)..(423): Homolog of NCBI NO: 20530131 NR Description: mitochondrial aldehyde dehydrogenase [Sorghum
  misc_feature (1)..(423): Homolog of NCBI NO: 15128580 NR Description: mitochondrial aldehyde dehydrogenase ALDH2
  misc_feature (1)..(423): Homolog of NCBI NO: 20530127 NR Description: mitochondrial aldehyde dehydrogenase [Secale
  misc_feature (1)..(423): Homolog of NCBI NO: 7431451 NR Description: rf2 nuclear restorer protein - maize RF2 >gi|12004294|gb|AAG43988.1|AF215823_1 T cytoplasm male
  misc_feature (1)..(423): Homolog of NCBI NO: 11691926 NR Description: aldehyde dehydrogenase ALDH2b [Oryza sativa
  misc_feature (1)..(423): Homolog of NCBI NO: 8163730 NR Description: aldehyde dehydrogenase [Oryza sativa]
  misc_feature (1)..(423): Homolog of NCBI NO: 14276718 NR Description: T-cytoplasm male sterility restorer factor 2 [Zea
MTAYDRCRVLLRFADLIERHAEEVAALETWDNGKTLAQAAGAEVPMVARCVRYYAGWADKIHGLVAPADGAHHVQVLHEPVGVAGQIIPWNFPLLMFAWKVGPALACGNTVVLKTAEQTPLSALYVANLLHEAGLPEGVLNVVSGFGPTAGAALSSHMGVDKLAFTGSTGTGQIVLELAARSNLKPVTLELGGKSPFIVMDDADVDQAVELAHQAVFFNQGQCCCAGSRTFVHERVYDEFVEKSKARALKRVVGDPFRDGVEQGPQIDGEQFNKILRYVQSGVDSGATLVAGGDRVGDRGFYIQPTVFADAKDEMKIAREEIFGPVQTILKFSGVEEVIRRANATPYGLAAGVFTRSLDAANTLSRALRAGTVWVNCYDVFDATIPFGGYKMSGVGREKGIYALRNYLQTKAVVTPIKNPAWL

SEQ ID NO: 12087 - protein, 378 aa, Zea mays subsp. mays
  peptide (1)..(378): Ceres Seq. ID no. 12367171
  misc_feature (1)..(378): Homolog of NCBI NO: 19850251 NR Description: mitochondrial aldehyde dehydrogenase RF2B [Zea >gi|19850253|gb|AAL99614.1|AF348418_1 mitochondrial aldehyde
  misc_feature (1)..(378): Homolog of NCBI NO: 20530129 NR Description: mitochondrial aldehyde dehydrogenase [Sorghum
  misc_feature (1)..(378): Homolog of NCBI NO: 8574429 NR Description: mitochondrial aldehyde dehydrogenase ALDH2a
  misc_feature (1)..(378): Homolog of NCBI NO: 20530131 NR Description: mitochondrial aldehyde dehydrogenase [Sorghum
  misc_feature (1)..(378): Homolog of NCBI NO: 15128580 NR Description: mitochondrial aldehyde dehydrogenase ALDH2
  misc_feature (1)..(378): Homolog of NCBI NO: 20530127 NR Description: mitochondrial aldehyde dehydrogenase [Secale
  misc_feature (1)..(378): Homolog of NCBI NO: 7431451 NR Description: rf2 nuclear restorer protein - maize RF2 >gi|12004294|gb|AAG43988.1|AF215823_1 T cytoplasm male
  misc_feature (1)..(378): Homolog of NCBI NO: 11691926 NR Description: aldehyde dehydrogenase ALDH2b [Oryza sativa
  misc_feature (1)..(378): Homolog of NCBI NO: 8163730 NR Description: aldehyde dehydrogenase [Oryza sativa]
  misc_feature (1)..(378): Homolog of NCBI NO: 14276718 NR Description: T-cytoplasm male sterility restorer factor 2 [Zea
MVARCVRYYAGWADKIHGLVAPADGAHHVQVLHEPVGVAGQIIPWNFPLLMFAWKVGPALACGNTVVLKTAEQTPLSALYVANLLHEAGLPEGVLNVVSGFGPTAGAALSSHMGVDKLAFTGSTGTGQIVLELAARSNLKPVTLELGGKSPFIVMDDADVDQAVELAHQAVFFNQGQCCCAGSRTFVHERVYDEFVEKSKARALKRVVGDPFRDGVEQGPQIDGEQFNKILRYVQSGVDSGATLVAGGDRVGDRGFYIQPTVFADAKDEMKIAREEIFGPVQTILKFSGVEEVIRRANATPYGLAAGVFTRSLDAANTLSRALRAGTVWVNCYDVFDATIPFGGYKMSGVGREKGIYALRNYLQTKAVVTPIKNPAWL

SEQ ID NO: 12088 - DNA, 1624 bp, Zea mays subsp. mays
  misc_feature (1)..(1624): Ceres Seq. ID no. 13493048
  misc_feature: MA Experiment ID: 108530 Result: Down-regulated in Transcription
  misc_feature: MA Experiment 108530 PARAMETER Experiment Name: Zm_Imbibed_Seeds_P Parameter: Age (day) Value: 6 vs. 2
  misc_feature: MA Experiment 108530 PARAMETER Experiment Name: Zm_Imbibed_Seeds_P Parameter: Organism Value: Zea mays
  misc_feature: MA Experiment 108530 PARAMETER Experiment Name: Zm_Imbibed_Seeds_P Parameter: Plant Line Value: 35A19
  misc_feature: MA Experiment 108530 PARAMETER Experiment Name: Zm_Imbibed_Seeds_P Parameter: Tissue Value: Aerial vs. Embryo
  misc_feature: MA Experiment ID: 108535 Result: Up-regulated in Transcription
  misc_feature: MA Experiment 108535 PARAMETER Experiment Name: Zm_Meristem_P Parameter: Age (day) Value: 8
  misc_feature: MA Experiment 108535 PARAMETER Experiment Name: Zm_Meristem_P Parameter: Organism Value: Zea mays
  misc_feature: MA Experiment 108535 PARAMETER Experiment Name: Zm_Meristem_P Parameter: Plant Line Value: 35A19
  misc_feature: MA Experiment 108535 PARAMETER Experiment Name: Zm_Meristem_P Parameter: Tissue Value: Root Meristem vs. Above Root Meristem
  misc_feature: MA Experiment ID: 108543 Result: Down-regulated in Transcription
cattacctagaacatcctaatcgaaaacaacagaagctagaaacagccagtactgaagaaaaggacatggttttttcagaaataatgcctcaagctctcacattgatgactgatgtatttggaaattatgttgtccaaaagttttttgagcatggaagcactacccagataaaggaattggctggtcagcttattggacgtgtccttgctcttagtcttcagatgtatgggtgccgggttatacagaaggctatagaagttgttgatttggatctgcagactaaaatggttgcggagctggagggccatgtcatgcgctgtgtacgtgatcaaaatgggaaccatgttatacagaaatgcatagagtgcattcctcagcatgctatcgagttcattgtctcgacattctatggccaagttgtaatgttatccactcatccatatggttgccgagttattcagagggttctagagcattgtgatgatcctaagacacagcaaataatgatggatgagattctccagtctgtttgcttgctagctcaggatcagtatggcaactatgtggttcagcatgttctggaacatggcaaaccccatgagagatcagccattattgagaagctaattggccaagttgtgcaaatgagccagcaaaagtttgcctcaaatgtcattgagaagtgcttagcctttggaaatcctgtagaacgtcaggttctgattggtgagatgcttggatccactagcgaaagcgaacctcttgaggtaatgatgaaagaccagtttgcaaactatgtggtgcagaaggtgctagaaacttgtgacgatcagcagagggagatgatcctaacaaggataaagacacacctgaacacactcaagaagtacacatacgggaagcacatagtagcgcgtgtagagaagcttgttgctgctggagagaagcgccttgggcttcaaccagcatgcaccgccgcctgaagggcaaactctctaagttgtacagctaacagttgctaggtttgcgctcatgtttttttctctactaaaaaccttatatgaaggccccttttggcctcgccaggaaaaaaaatactgtatgtttgcggggaagagtgtacattaattctttagcagaaagaccccccctacccatgcggcggaatcaagggaggagtgatgcgtgagtccgatcgatctgaaggctgctgtaaagaggaagatggaaggaaggagtgagaagcatgtcagttactctgctgctgtacaaattaaacttagctcttagagtgaggagaaagtaagctgttagctgtctgcctaaaggaaagaaaggaaaaaaaagaagctggaggccattggcaccctgtttcatgtgttggtatagctgctgtggctctcctgttgtctgtctggcctttgttgtaacataaagctgaggcgcactagcctgccttcgttttcacagttaagctgaagttattagtatcagctttcctgaactgcttggtatgtaatgtgactgtgttttcttccttgtactaatgcttgtctcatgtaatccattcccctaatgtctgaatgttttaatctcaattttcacctctgaaacgttttttct

SEQ ID NO: 12089 - protein, 327 aa, Zea mays subsp. mays
  peptide (1)..(327): Ceres Seq. ID no. 13493049
  misc_feature (135)..(169): Pfam Name: Pumilio-family RNA binding repeat Pfam Description: Pumilio-family RNA binding repeat
  misc_feature (10)..(327): Homolog of NCBI NO: 14719326 NR Description: putative pumilio/Mpt5 family RNA-binding protein
  misc_feature (10)..(327): Homolog of NCBI NO: 20513851 NR Description: BPM [Hordeum vulgare]
  misc_feature (10)..(327): Homolog of NCBI NO: 34906006 NR Description: P0518C01.14 [Oryza sativa (japonica
  misc_feature (10)..(321): Homolog of NCBI NO: 34908236 NR Description: putative pumilio/Mpt5 family RNA-binding protein
  misc_feature (10)..(321): Homolog of NCBI NO: 15227052 NR Description: pumilio-family RNA-binding protein, putative
  misc_feature (10)..(321): Homolog of NCBI NO: 15227038 NR Description: pumilio-family RNA-binding protein, putative
  misc_feature (10)..(321): Homolog of NCBI NO: 20465637 NR Description: putative pumilio/Mpt5 family RNA-binding protein
  misc_feature (10)..(321): Homolog of NCBI NO: 15227051 NR Description: pumilio-family RNA-binding protein, putative
  misc_feature (10)..(326): Homolog of NCBI NO: 22330960 NR Description: pumilio-family RNA-binding protein, putative
  misc_feature (10)..(326): Homolog of NCBI NO: 26450884 NR Description: putative RNA binding protein [Arabidopsis
HYLEHPNRKQQKLETASTEEKDMVFSEIMPQALTLMTDVFGNYVVQKFFEHGSTTQIKELAGQLIGRVLALSLQMYGCRVIQKAIEVVDLDLQTKMVAELEGHVMRCVRDQNGNHVIQKCIECIPQHAIEFIVSTFYGQVVMLSTHPYGCRVIQRVLEHCDDPKTQQIMMDEILQSVCLLAQDQYGNYVVQHVLEHGKPHERSAIIEKLIGQVVQMSQQKFASNVIEKCLAFGNPVERQVLIGEMLGSTSESEPLEVMMKDQFANYVVQKVLETCDDQQREMILTRIKTHLNTLKKYTYGKHIVARVEKLVAAGEKRLGLQPACTAA

SEQ ID NO: 12090 - protein, 305 aa, Zea mays subsp. mays
  peptide (1)..(305): Ceres Seq. ID no. 13493050
  misc_feature (113)..(147): Pfam Name: Pumilio-family RNA binding repeat Pfam Description: Pumilio-family RNA binding repeat
  misc_feature (1)..(305): Homolog of NCBI NO: 14719326 NR Description: putative pumilio/Mpt5 family RNA-binding protein
  misc_feature (1)..(305): Homolog of NCBI NO: 20513851 NR Description: BPM [Hordeum vulgare]
  misc_feature (1)..(305): Homolog of NCBI NO: 34906006 NR Description: P0518C01.14 [Oryza sativa (japonica
  misc_feature (1)..(299): Homolog of NCBI NO: 34908236 NR Description: putative pumilio/Mpt5 family RNA-binding protein
  misc_feature (1)..(299): Homolog of NCBI NO: 15227052 NR Description: pumilio-family RNA-binding protein, putative
  misc_feature (1)..(299): Homolog of NCBI NO: 15227038 NR Description: pumilio-family RNA-binding protein, putative
  misc_feature (1)..(299): Homolog of NCBI NO: 20465637 NR Description: putative pumilio/Mpt5 family RNA-binding protein
  misc_feature (1)..(299): Homolog of NCBI NO: 15227051 NR Description: pumilio-family RNA-binding protein, putative
  misc_feature (1)..(304): Homolog of NCBI NO: 22330960 NR Description: pumilio-family RNA-binding protein, putative
  misc_feature (1)..(304): Homolog of NCBI NO: 26450884 NR Description: putative RNA binding protein [Arabidopsis
MVFSEIMPQALTLMTDVFGNYVVQKFFEHGSTTQIKELAGQLIGRVLALSLQMYGCRVIQKAIEVVDLDLQTKMVAELEGHVMRCVRDQNGNHVIQKCIECIPQHAIEFIVSTFYGQVVMLSTHPYGCRVIQRVLEHCDDPKTQQIMMDEILQSVCLLAQDQYGNYVVQHVLEHGKPHERSAIIEKLIGQVVQMSQQKFASNVIEKCLAFGNPVERQVLIGEMLGSTSESEPLEVMMKDQFANYVVQKVLETCDDQQREMILTRIKTHLNTLKKYTYGKHIVARVEKLVAAGEKRLGLQPACTAA

SEQ ID NO: 12091 - protein, 299 aa, Zea mays subsp. mays
  peptide (1)..(299): Ceres Seq. ID no. 13493051
  misc_feature (107)..(141): Pfam Name: Pumilio-family RNA binding repeat Pfam Description: Pumilio-family RNA binding repeat
  misc_feature (1)..(299): Homolog of NCBI NO: 14719326 NR Description: putative pumilio/Mpt5 family RNA-binding protein
  misc_feature (1)..(299): Homolog of NCBI NO: 20513851 NR Description: BPM [Hordeum vulgare]
  misc_feature (1)..(299): Homolog of NCBI NO: 34906006 NR Description: P0518C01.14 [Oryza sativa (japonica
  misc_feature (1)..(293): Homolog of NCBI NO: 34908236 NR Description: putative pumilio/Mpt5 family RNA-binding protein
  misc_feature (1)..(293): Homolog of NCBI NO: 15227052 NR Description: pumilio-family RNA-binding protein, putative
  misc_feature (1)..(293): Homolog of NCBI NO: 15227038 NR Description: pumilio-family RNA-binding protein, putative
  misc_feature (1)..(293): Homolog of NCBI NO: 20465637 NR Description: putative pumilio/Mpt5 family RNA-binding protein
  misc_feature (1)..(293): Homolog of NCBI NO: 15227051 NR Description: pumilio-family RNA-binding protein, putative
  misc_feature (1)..(298): Homolog of NCBI NO: 22330960 NR Description: pumilio-family RNA-binding protein, putative
  misc_feature (1)..(298): Homolog of NCBI NO: 26450884 NR Description: putative RNA binding protein [Arabidopsis
MPQALTLMTDVFGNYVVQKFFEHGSTTQIKELAGQLIGRVLALSLQMYGCRVIQKAIEVVDLDLQTKMVAELEGHVMRCVRDQNGNHVIQKCIECIPQHAIEFIVSTFYGQVVMLSTHPYGCRVIQRVLEHCDDPKTQQIMMDEILQSVCLLAQDQYGNYVVQHVLEHGKPHERSAIIEKLIGQVVQMSQQKFASNVIEKCLAFGNPVERQVLIGEMLGSTSESEPLEVMMKDQFANYVVQKVLETCDDQQREMILTRIKTHLNTLKKYTYGKHIVARVEKLVAAGEKRLGLQPACTAA

SEQ ID NO: 12092 - DNA, 1296 bp, Zea mays subsp. mays
  misc_feature (1)..(1296): Ceres Seq. ID no. 12360769
  misc_feature: MA Experiment ID: 108527 Result: Down-regulated in Transcription
  misc_feature: MA Experiment 108527 PARAMETER Experiment Name: Zm_5mM_NO_P Parameter: Age (day) Value: 8
  misc_feature: MA Experiment 108527 PARAMETER Experiment Name: Zm_5mM_NO_P Parameter: Organism Value: Zea mays
  misc_feature: MA Experiment 108527 PARAMETER Experiment Name: Zm_5mM_NO_P Parameter: Plant Line Value: 35A19
  misc_feature: MA Experiment 108527 PARAMETER Experiment Name: Zm_5mM_NO_P Parameter: Timepoint (hr) Value: 6
  misc_feature: MA Experiment 108527 PARAMETER Experiment Name: Zm_5mM_NO_P Parameter: Tissue Value: Aerial
  misc_feature: MA Experiment 108527 PARAMETER Experiment Name: Zm_5mM_NO_P Parameter: Treatment Value: 5mM NO vs. No Treatment
  misc_feature: MA Experiment ID: 108535 Result: Down-regulated in Transcription
  misc_feature: MA Experiment 108535 PARAMETER Experiment Name: Zm_Meristem_P Parameter: Age (day) Value: 8
  misc_feature: MA Experiment 108535 PARAMETER Experiment Name: Zm_Meristem_P Parameter: Organism Value: Zea mays
  misc_feature: MA Experiment 108535 PARAMETER Experiment Name: Zm_Meristem_P Parameter: Plant Line Value: 35A19
  misc_feature: MA Experiment 108535 PARAMETER Experiment Name: Zm_Meristem_P Parameter: Tissue Value: Root Meristem vs. Above Root Meristem
  misc_feature: MA Experiment ID: 108543 Result: Up-regulated in Transcription
  misc_feature: MA Experiment ID: 108546 Result: Up-regulated in Transcription
  misc_feature: MA Experiment 108546 PARAMETER Experiment Name: Zm_Imbibed_Seeds_P Parameter: Age (day) Value: 3 vs. 2
  misc_feature: MA Experiment 108546 PARAMETER Experiment Name: Zm_Imbibed_Seeds_P Parameter: Organism Value: Zea mays
  misc_feature: MA Experiment 108546 PARAMETER Experiment Name: Zm_Imbibed_Seeds_P Parameter: Plant Line Value: 35A19
  misc_feature: MA Experiment 108546 PARAMETER Experiment Name: Zm_Imbibed_Seeds_P Parameter: Tissue Value: Roots vs. Embryo
  misc_feature: MA Experiment ID: 20000488 Result: Down-regulated in Transcription
  misc_feature: MA Experiment 20000488 PARAMETER Experiment Name: Zm_50mM_NH4NO3_L_to_H_P Parameter: Organism Value: Zea mays
  misc_feature: MA Experiment 20000488 PARAMETER Experiment Name: Zm_50mM_NH4NO3_L_to_H_P Parameter: Timepoint (hr) Value: 8
  misc_feature: MA Experiment 20000488 PARAMETER Experiment Name: Zm_50mM_NH4NO3_L_to_H_P Parameter: Tissue Value: Leaves
  misc_feature: MA Experiment 20000488 PARAMETER Experiment Name: Zm_50mM_NH4NO3_L_to_H_P Parameter: Treatment Value: 50mM NH4NO3 vs. 100mM Mannitol
  misc_feature: MA Experiment ID: 20000534 Result: Down-regulated in Transcription
  misc_feature: MA Experiment 20000534 PARAMETER Experiment Name: Zm_Hybrid_Pollen_P Parameter: Age (day) Value: 8
  misc_feature: MA Experiment 20000534 PARAMETER Experiment Name: Zm_Hybrid_Pollen_P Parameter: Organism Value: Zea mays
  misc_feature: MA Experiment 20000534 PARAMETER Experiment Name: Zm_Hybrid_Pollen_P Parameter: Plant Line Value: 35A19
  misc_feature: MA Experiment 20000534 PARAMETER Experiment Name: Zm_Hybrid_Pollen_P Parameter: Tissue Value: Pollen vs. Aerial
  misc_feature: MA Experiment ID: 20000535 Result: Down-regulated in Transcription
  misc_feature: MA Experiment 20000535 PARAMETER Experiment Name: Zm_Hybrid_Seed_Dev_P Parameter: DAP Value: 30 vs. 12
  misc_feature: MA Experiment 20000535 PARAMETER Experiment Name: Zm_Hybrid_Seed_Dev_P Parameter: Organism Value: Zea mays
  misc_feature: MA Experiment 20000535 PARAMETER Experiment Name: Zm_Hybrid_Seed_Dev_P Parameter: Plant Line Value: 35A19
  misc_feature: MA Experiment 20000535 PARAMETER Experiment Name: Zm_Hybrid_Seed_Dev_P Parameter: Tissue Value: Embryo vs. Unfert Floret
gcacgagaccattacctagaacatcctaatcgaaaaagtcctctaatcctctctcgctcgctctctagtctcttttcttctctggtctcgcgttctccctcctctgttcgccgctttataccgcccgcccgcccaccagaacgacatacatcctcctcccccgtcccctccaatggggaacccgccggagctgtaccacaagatcctcaacatccccaaggacacctctccgcaggaactccgcgccgcgtacaagagcctcgtcaagaaatggcaccccgacaagcacccgccgtcgtccaggccggaggccgaggcgcgcttcaaggccatcagcgaggcctacgaggcgctcctggaccagcaagagaacagggccgtgttcgggccgtgcaacggcgaccgggcgggtggaggcgccggggcgcgcgtggagaggacgcgcagtgacggtttctgcgcgaggagcgcgcccggcaccccggccagggagttgaagaaggtgtacagcgccggcaaccccggcgggcgccccgccttcgccgagttctccagttccatcgtgcgcaaggcgccgccgctggagcgcaggctcgagtgcaccctcgaggagctctgccgcggatgcagcaaggaggtcacgttcacccgcgacgtcgtcaccaggaacgggtcgatcgtgaagaaggaggtgacgcagacggtgcaggtgaagccagggtggaggaaagggaagcaggtggtgctggaaggcatgggggacgagcggccggggtgcctgccgggcgacgccgtcctgacggtgtccgagaggaggcacccggcgttcaagcgggtgggcgacgacctggtgctcagggcggaggtgccgctggcgggcgcgctcaccggctggtccctctcgttccggctcctcggcggccggaaggtgacctgctcgttcgaggacgaggtcatccgccccgggcacgagagggtgatccgcggcgagggcatgccggtccccgggcggaaggacggcgcgcgcggcgacctcagggtgaagctcgaggtcgtgttccccacggagctctccgacgagcagcgcgccggcctcgccgagatcctcagagggtcctgctgatcggtcggtgtcgccgtcggtccaattaagtcctatcgtatcaagttttcttgggcgtgtgaccgtgtccgatgagtaactgagtacataaagagagatggtcgacgttcgttgtacatacgggttgtctatgtatatgtcgatatatatgaaacgtgaggcaagccttgtgc

SEQ ID NO: 12093 - protein, 316 aa, Zea mays subsp. mays
  peptide (1)..(316): Ceres Seq. ID no. 12360770
  misc_feature (189)..(312): Pfam Name: DnaJ C terminal region Pfam Description: DnaJ C terminal region
  misc_feature (81)..(314): Homolog of NCBI NO: 34907316 NR Description: putative heat shock protein [Oryza sativa
  misc_feature (1)..(167): Homolog of NCBI NO: 34907316 NR Description: putative heat shock protein [Oryza sativa
  misc_feature (8)..(315): Homolog of NCBI NO: 15231987 NR Description: putative heat shock protein; protein id: supported by cDNA: 96785. [Arabidopsis thaliana]
  misc_feature (8)..(315): Homolog of NCBI NO: 21618097 NR Description: putative heat shock protein [Arabidopsis thaliana]
  misc_feature (111)..(315): Homolog of NCBI NO: 6179940 NR Description: DnaJ-like protein [Nicotiana tabacum]
  misc_feature (8)..(82): Homolog of NCBI NO: 6179940 NR Description: DnaJ-like protein [Nicotiana tabacum]
  misc_feature (132)..(312): Homolog of NCBI NO: 15240968 NR Description: heat shock protein 40-like; protein id: supported by cDNA: 114622. [Arabidopsis thaliana]
  misc_feature (8)..(71): Homolog of NCBI NO: 15240968 NR Description: heat shock protein 40-like; protein id: supported by cDNA: 114622. [Arabidopsis thaliana]
  misc_feature (80)..(315): Homolog of NCBI NO: 11863723 NR Description: DnaJ like protein [Lycopersicon esculentum]
  misc_feature (8)..(82): Homolog of NCBI NO: 11863723 NR Description: DnaJ like protein [Lycopersicon esculentum]
MGNPPELYHKILNIPKDTSPQELRAAYKSLVKKWHPDKHPPSSRPEAEARFKAISEAYEALLDQQENRAVFGPCNGDRAGGGAGARVERTRSDGFCARSAPGTPARELKKVYSAGNPGGRPAFAEFSSSIVRKAPPLERRLECTLEELCRGCSKEVTFTRDVVTRNGSIVKKEVTQTVQVKPGWRKGKQVVLEGMGDERPGCLPGDAVLTVSERRHPAFKRVGDDLVLRAEVPLAGALTGWSLSFRLLGGRKVTCSFEDEVIRPGHERVIRGEGMPVPGRKDGARGDLRVKLEVVFPTELSDEQRAGLAEILRGSC

SEQ ID NO: 12094 - protein, 175 aa, Zea mays subsp. mays
  peptide (1)..(175): Ceres Seq. ID no. 12360771
MQQGGHVHPRRRHQERVDREEGGDADGAGEARVEEREAGGAGRHGGRAAGVPAGRRRPDGVREEAPGVQAGGRRPGAQGGGAAGGRAHRLVPLVPAPRRPEGDLLVRGRGHPPRAREGDPRRGHAGPRAEGRRARRPQGEARGRVPHGALRRAARRPRRDPQRVLLIGRCRRRSN

SEQ ID NO: 12095 - DNA, 1101 bp, Zea mays subsp. mays
  misc_feature (1)..(1101): Ceres Seq. ID no. 12413114
  misc_feature: MA Experiment ID: 108528 Result: Up-regulated in Transcription
  misc_feature: MA Experiment 108528 PARAMETER Experiment Name: Zm_Imbibed_Seeds_P Parameter: Age (day) Value: 5 vs. 2
  misc_feature: MA Experiment 108528 PARAMETER Experiment Name: Zm_Imbibed_Seeds_P Parameter: Organism Value: Zea mays
  misc_feature: MA Experiment 108528 PARAMETER Experiment Name: Zm_Imbibed_Seeds_P Parameter: Plant Line Value: 35A19
  misc_feature: MA Experiment 108528 PARAMETER Experiment Name: Zm_Imbibed_Seeds_P Parameter: Tissue Value: Aerial vs. Embryo
  misc_feature: MA Experiment ID: 108530 Result: Up-regulated in Transcription
  misc_feature: MA Experiment 108530 PARAMETER Experiment Name: Zm_Imbibed_Seeds_P Parameter: Age (day) Value: 6 vs. 2
  misc_feature: MA Experiment 108530 PARAMETER Experiment Name: Zm_Imbibed_Seeds_P Parameter: Organism Value: Zea mays
  misc_feature: MA Experiment 108530 PARAMETER Experiment Name: Zm_Imbibed_Seeds_P Parameter: Plant Line Value: 35A19
  misc_feature: MA Experiment 108530 PARAMETER Experiment Name: Zm_Imbibed_Seeds_P Parameter: Tissue Value: Aerial vs. Embryo
  misc_feature: MA Experiment ID: 108535 Result: Down-regulated in Transcription
  misc_feature: MA Experiment 108535 PARAMETER Experiment Name: Zm_Meristem_P Parameter: Age (day) Value: 8
  misc_feature: MA Experiment 108535 PARAMETER Experiment Name: Zm_Meristem_P Parameter: Organism Value: Zea mays
  misc_feature: MA Experiment 108535 PARAMETER Experiment Name: Zm_Meristem_P Parameter: Plant Line Value: 35A19
  misc_feature: MA Experiment 108535 PARAMETER Experiment Name: Zm_Meristem_P Parameter: Tissue Value: Root Meristem vs. Above Root Meristem
  misc_feature: MA Experiment ID: 108544 Result: Up-regulated in Transcription
  misc_feature: MA Experiment ID: 108545 Result: Up-regulated in Transcription
  misc_feature: MA Experiment 108545 PARAMETER Experiment Name: Zm_Imbibed_Seeds_P Parameter: Age (day) Value: 3 vs. 2
  misc_feature: MA Experiment 108545 PARAMETER Experiment Name: Zm_Imbibed_Seeds_P Parameter: Organism Value: Zea mays
  misc_feature: MA Experiment 108545 PARAMETER Experiment Name: Zm_Imbibed_Seeds_P Parameter: Plant Line Value: 35A19
  misc_feature: MA Experiment 108545 PARAMETER Experiment Name: Zm_Imbibed_Seeds_P Parameter: Tissue Value: Aerial vs. Embryo
  misc_feature: MA Experiment ID: 108547 Result: Up-regulated in Transcription
  misc_feature: MA Experiment 108547 PARAMETER Experiment Name: Zm_Imbibed_Seeds_P Parameter: Age (day) Value: 4 vs. 2
  misc_feature: MA Experiment 108547 PARAMETER Experiment Name: Zm_Imbibed_Seeds_P Parameter: Organism Value: Zea mays
  misc_feature: MA Experiment 108547 PARAMETER Experiment Name: Zm_Imbibed_Seeds_P Parameter: Plant Line Value: 35A19
  misc_feature: MA Experiment 108547 PARAMETER Experiment Name: Zm_Imbibed_Seeds_P Parameter: Tissue Value: Aerial vs. Embryo
  misc_feature: MA Experiment ID: 108559 Result: Down-regulated in Transcription
  misc_feature: MA Experiment 108559 PARAMETER Experiment Name: Zm_5mM_NO_P Parameter: Age (day) Value: 8
  misc_feature: MA Experiment 108559 PARAMETER Experiment Name: Zm_5mM_NO_P Parameter: Organism Value: Zea mays
  misc_feature: MA Experiment 108559 PARAMETER Experiment Name: Zm_5mM_NO_P Parameter: Plant Line Value: 35A19
  misc_feature: MA Experiment 108559 PARAMETER Experiment Name: Zm_5mM_NO_P Parameter: Timepoint (hr) Value: 12
  misc_feature: MA Experiment 108559 PARAMETER Experiment Name: Zm_5mM_NO_P Parameter: Tissue Value: Aerial
  misc_feature: MA Experiment 108559 PARAMETER Experiment Name: Zm_5mM_NO_P Parameter: Treatment Value: 5mM NO vs. No Treatment
  misc_feature: MA Experiment ID: 20000479 Result: Down-regulated in Transcription
  misc_feature: MA Experiment 20000479 PARAMETER Experiment Name: Zm_Drought_P Parameter: Age (day) Value: 10
  misc_feature: MA Experiment 20000479 PARAMETER Experiment Name: Zm_Drought_P Parameter: Organism Value: Zea mays
  misc_feature: MA Experiment 20000479 PARAMETER Experiment Name: Zm_Drought_P Parameter: Plant Line Value: 35A19
  misc_feature: MA Experiment 20000479 PARAMETER Experiment Name: Zm_Drought_P Parameter: Timepoint (hr) Value: 48
  misc_feature: MA Experiment 20000479 PARAMETER Experiment Name: Zm_Drought_P Parameter: Tissue Value: Aerial
  misc_feature: MA Experiment 20000479 PARAMETER Experiment Name: Zm_Drought_P Parameter: Treatment Value: Drought vs. No Drought
  misc_feature: MA Experiment ID: 20000535 Result: Down-regulated in Transcription
  misc_feature: MA Experiment 20000535 PARAMETER Experiment Name: Zm_Hybrid_Seed_Dev_P Parameter: DAP Value: 30 vs. 12
  misc_feature: MA Experiment 20000535 PARAMETER Experiment Name: Zm_Hybrid_Seed_Dev_P Parameter: Organism Value: Zea mays
  misc_feature: MA Experiment 20000535 PARAMETER Experiment Name: Zm_Hybrid_Seed_Dev_P Parameter: Plant Line Value: 35A19
  misc_feature: MA Experiment 20000535 PARAMETER Experiment Name: Zm_Hybrid_Seed_Dev_P Parameter: Tissue Value: Embryo vs. Unfert Floret
  misc_feature: MA Experiment ID: 20000626 Result: Down-regulated in Transcription
  misc_feature: MA Experiment 20000626 PARAMETER Experiment Name: Zm_Herbicide-Treatments_P Parameter: Timepoint (hr) Value: 12
  misc_feature: MA Experiment 20000626 PARAMETER Experiment Name: Zm_Herbicide-Treatments_P Parameter: Tissue Value: Aerial
  misc_feature: MA Experiment 20000626 PARAMETER Experiment Name: Zm_Herbicide-Treatments_P Parameter: Treatment Value: Roundup vs. No Treatment
  misc_feature: MA Experiment ID: 20001608 Result: Up-regulated in Transcription
  misc_feature: MA Experiment 20001608 PARAMETER Experiment Name: Zm_50ppm_KNO3_L-to-H_P Parameter: Age (day) Value: 21
  misc_feature: MA Experiment 20001608 PARAMETER Experiment Name: Zm_50ppm_KNO3_L-to-H_P Parameter: Organism Value: Zea mays
  misc_feature: MA Experiment 20001608 PARAMETER Experiment Name: Zm_50ppm_KNO3_L-to-H_P Parameter: Plant Line Value: 35A19
  misc_feature: MA Experiment 20001608 PARAMETER Experiment Name: Zm_50ppm_KNO3_L-to-H_P Parameter: Timepoint (hr) Value: 48
  misc_feature: MA Experiment 20001608 PARAMETER Experiment Name: Zm_50ppm_KNO3_L-to-H_P Parameter: Tissue Value: Shoots
  misc_feature: MA Experiment 20001608 PARAMETER Experiment Name: Zm_50ppm_KNO3_L-to-H_P Parameter: Treatment Value: 50ppm KNO3 vs. 50ppm KCl
attttcaatcccagaacagggcccgagcgagagcccacgaacgaagggctccttctctctcctctcgttgctgcagttgcagacttgcagtgttgcagataattttggatgccattcaagcgttctacggctccaatttctctgacttctccctgagcctttgcggccggctggagctggacggtccccgggcagcgcaggcagccggactgcgggagtcacctccatggcctcggctgctactgcaaccctccccaaggttcagttgaggccaagatgcaacagctactttcaggtgaccggtcaagtccatgcccacaccaaaacatgcgttgcctgcaagtgtccgacccatatccacgggttgcttgtttcagctggaggaaggaggacattcctgccggtgtctgcagttggatcaggtcagggctcatcggtcactgaggccgacaggaagagcgatttgtcgctggagaacgtcaagacgtccgttgtatcccgcgacgatgaaaagattaatgtacgagtgcagttgcctggaaaggcgacgcaaaaggtgtttgatgaggctctgacgttcttggcccgtgatgcgccaccggttcctggttttaggaagtccaaaggagggaaaacatcaaatatacccagcagcatcctgctgcagatgcttggcaagagccgggtcaccaaattcgttcttcaggaaatactgagcatcaccattgaagaatttgtcaagaaggaaaacctgaaggtgaaacctgagatccagacaacccagtccgaaggcgagatggagtccgcgttcgcgccgggatcagcatttgggttcaatgttgtccttcagctcgagacacctgactctgatgatccagaggagaaacctggctctgatgacgatttacaggaggaatctggttcctcagagtagaaagaaatgcatatcgcctgcatgcatctatcaaccttcttcatgtgccattccttatgaatgaatgtactgaatggaaagccgttgcaaccgttttgagttgagagttgcaactgaaacatttctgaagatatgagtggccgactcgcctctcttaacatgttggc

SEQ ID NO: 12096 - protein, 235 aa, Zea mays subsp. mays
  peptide (1)..(235): Ceres Seq. ID no. 12413115
  misc_feature (96)..(210): Pfam Name: Bacterial trigger factor protein (TF) Pfam Description: Bacterial trigger factor protein (TF)
  misc_feature (99)..(231): Homolog of NCBI NO: 34907590 NR Description: B1078G07.36 [Oryza sativa (japonica
  misc_feature (41)..(210): Homolog of NCBI NO: 18402430 NR Description: Expressed protein; protein id: At2g30695.1, by cDNA: gi_15724149, supported by cDNA: gi_20334857 [Arabidopsis >gi|15724150|gb|AAL06467.1|AF411777_1 At2g30700/T11J7.9
MASAATATLPKVQLRPRCNSYFQVTGQVHAHTKTCVACKCPTHIHGLLVSAGGRRTFLPVSAVGSGQGSSVTEADRKSDLSLENVKTSVVSRDDEKINVRVQLPGKATQKVFDEALTFLARDAPPVPGFRKSKGGKTSNIPSSILLQMLGKSRVTKFVLQEILSITIEEFVKKENLKVKPEIQTTQSEGEMESAFAPGSAFGFNVVLQLETPDSDDPEEKPGSDDDLQEESGSSE

SEQ ID NO: 12097 - DNA, 1426 bp, Zea mays subsp. mays
  misc_feature (1)..(1426): Ceres Seq. ID no. 12411646
  misc_feature: MA Experiment ID: 20000534 Result: Down-regulated in Transcription
  misc_feature: MA Experiment 20000534 PARAMETER Experiment Name: Zm_Hybrid_Pollen_P Parameter: Age (day) Value: 8
  misc_feature: MA Experiment 20000534 PARAMETER Experiment Name: Zm_Hybrid_Pollen_P Parameter: Organism Value: Zea mays
  misc_feature: MA Experiment 20000534 PARAMETER Experiment Name: Zm_Hybrid_Pollen_P Parameter: Plant Line Value: 35A19
  misc_feature: MA Experiment 20000534 PARAMETER Experiment Name: Zm_Hybrid_Pollen_P Parameter: Tissue Value: Pollen vs. Aerial
gaaagggaagagaatgaatctattaactagttctcaacactccttcgtggggcgtgctcgctcctagaatcctagggtcctcttctgcgtcaccgatcggtagtaagcacagagtcaccgcaccgccgcgtctaggtcaccgccatggccggggactggcaggagctgggccaagcggcggccatcggcctcctcttcgccttcctggtcgccaagctcatctccaccgtgatcgccttcaaggaggacaacctccgcatcacgcgctcccctccgacctcccccactgccgccgccgcagccgcgcctcccgtcccctcccactacggctccaccgacggaggcagcggcagcgacagcgactgggagggcgtggagagcaccgagctcgatgaggagttcagcgccgcctccgccttcatcgcggcctccgccgcctccggcaccagcgtccccgaggaagcgcagctgcgcctctacggcctctacaagatcgccaccgaggggccctgcaccgcgccccagccgtccgcgctcaagctcaaggcccgtgccaaatggaatgcttggcataagctgggtgctatgcctacagaagaagctatgcaagggtacatcacaattgttcaggacctattccctaactgggatgcaggtgcaagtgcgaaaaggaaagatgaagatagcattgcttccgcatcagcttcaaaggggcccatgggacctgtgtttagcagtttaatgtatgaggaagacgaaggaaatgaatcagaacttggtgacatccatgtttcagcaagggaaggggcgactgatgacatagtgaagcttctggcagctggtgttgaggtcaacgtgagagataccgaaggtagaagtccgttgcactgggctgttgatcgtggccatcttagtgctgtcgaggttcttgcaaatgcaaatgcagatctgaatgctaaggacaatgaagggcaaacggcactccactatgctgctgtttgtgaaagagaagacattgcagagttgcttgtcaagcatcatgctgatcttcggatcaaggacgaggacgggaacacggcacatgacttgtgcccttcgagctggtcttttatgaaccaggcaaactgataacacgaatatacggatatgcttgaaggtgtcatctgccaagaaacatgctagctgtatcctaaagcccatacggcacatatggtgtatcttagtgtcatgtgtgacgtgtgggaaatcaggcaggttgtttgcgtacgtggtgccctctctgaaatcagatgagttgttttatcgtcctcatcgaaccagttgtcaaaggatagtattagtgttgggaagatacatgtattgctttaatcaaaagaatcatgctggacaccaatgcaagcccaaatgggaagaaaaggatgtgcgg

SEQ ID NO: 12098 - protein, 327 aa, Zea mays subsp. mays
  peptide (1)..(327): Ceres Seq. ID no. 12411647
  misc_feature (82)..(166): Pfam Name: Acyl CoA binding protein Pfam Description: Acyl CoA binding protein
  misc_feature (68)..(326): Homolog of NCBI NO: 15234270 NR Description: putative acyl-CoA binding protein; protein id: supported by cDNA: 7361., supported by cDNA: gi_12039031, by cDNA: gi_13661741, supported by cDNA: gi_19699101 [Arabidopsis
  misc_feature (3)..(73): Homolog of NCBI NO: 15234270 NR Description: putative acyl-CoA binding protein; protein id: supported by cDNA: 7361., supported by cDNA: gi_12039031, by cDNA: gi_13661741, supported by cDNA: gi_19699101 [Arabidopsis
  misc_feature (4)..(325): Homolog of NCBI NO: 15238757 NR Description: putative protein; protein id: At5g53470.1, by cDNA: 35856., supported by cDNA: gi_16649022, supported by gi_20260069, supported by cDNA: gi_21284388 [Arabidopsis
  misc_feature (4)..(325): Homolog of NCBI NO: 21284389 NR Description: acyl-CoA binding protein [Arabidopsis thaliana]
  misc_feature (4)..(325): Homolog of NCBI NO: 21593070 NR Description: putative acyl-CoA binding protein [Arabidopsis
  misc_feature (68)..(250): Homolog of NCBI NO: 12039034 NR Description: acyl-CoA binding protein 2 [Arabidopsis thaliana]
  misc_feature (3)..(73): Homolog of NCBI NO: 12039034 NR Description: acyl-CoA binding protein 2 [Arabidopsis thaliana]
  misc_feature (51)..(309): Homolog of NCBI NO: 14150169 NR Description: hypothetical protein MGC2404 [Homo sapiens]
  misc_feature (53)..(309): Homolog of NCBI NO: 34880749 NR Description: similar to RIKEN cDNA 2610100E10 [Rattus
  misc_feature (53)..(309): Homolog of NCBI NO: 21312284 NR Description: RIKEN cDNA 2610100E10 [Mus musculus]
MAGDWQELGQAAAIGLLFAFLVAKLISTVIAFKEDNLRITRSPPTSPTAAAAAAPPVPSHYGSTDGGSGSDSDWEGVESTELDEEFSAASAFIAASAASGTSVPEEAQLRLYGLYKIATEGPCTAPQPSALKLKARAKWNAWHKLGAMPTEEAMQGYITIVQDLFPNWDAGASAKRKDEDSIASASASKGPMGPVFSSLMYEEDEGNESELGDIHVSAREGATDDIVKLLAAGVEVNVRDTEGRSPLHWAVDRGHLSAVEVLANANADLNAKDNEGQTALHYAAVCEREDIAELLVKHHADLRIKDEDGNTAHDLCPSSWSFMNQAN

SEQ ID NO: 12099 - protein, 180 aa, Zea mays subsp. mays
  peptide (1)..(180): Ceres Seq. ID no. 12411648
  misc_feature (95)..(127): Pfam Name: Ankyrin repeat Pfam Description: Ankyrin repeat
  misc_feature (1)..(179): Homolog of NCBI NO: 15234270 NR Description: putative acyl-CoA binding protein; protein id: supported by cDNA: 7361., supported by cDNA: gi_12039031, by cDNA: gi_13661741, supported by cDNA: gi_19699101 [Arabidopsis
  misc_feature (1)..(178): Homolog of NCBI NO: 15238757 NR Description: putative protein; protein id: At5g53470.1, by cDNA: 35856., supported by cDNA: gi_16649022, supported by gi_20260069, supported by cDNA: gi_21284388 [Arabidopsis
  misc_feature (1)..(178): Homolog of NCBI NO: 21284389 NR Description: acyl-CoA binding protein [Arabidopsis thaliana]
  misc_feature (1)..(178): Homolog of NCBI NO: 21593070 NR Description: putative acyl-CoA binding protein [Arabidopsis
  misc_feature (1)..(103): Homolog of NCBI NO: 12039034 NR Description: acyl-CoA binding protein 2 [Arabidopsis thaliana]
  misc_feature (1)..(162): Homolog of NCBI NO: 14150169 NR Description: hypothetical protein MGC2404 [Homo sapiens]
  misc_feature (1)..(162): Homolog of NCBI NO: 34880749 NR Description: similar to RIKEN cDNA 2610100E10 [Rattus
  misc_feature (1)..(162): Homolog of NCBI NO: 21312284 NR Description: RIKEN cDNA 2610100E10 [Mus musculus]
  misc_feature (1)..(148): Homolog of NCBI NO: 28571300 NR Description: CG33071-PA [Drosophila melanogaster]
  misc_feature (1)..(66): Homolog of NCBI NO: 30686450 NR Description: expressed protein [Arabidopsis thaliana]
MPTEEAMQGYITIVQDLFPNWDAGASAKRKDEDSIASASASKGPMGPVFSSLMYEEDEGNESELGDIHVSAREGATDDIVKLLAAGVEVNVRDTEGRSPLHWAVDRGHLSAVEVLANANADLNAKDNEGQTALHYAAVCEREDIAELLVKHHADLRIKDEDGNTAHDLCPSSWSFMNQAN

SEQ ID NO: 12100 - protein, 174 aa, Zea mays subsp. mays
  peptide (1)..(174): Ceres Seq. ID no. 12411649
  misc_feature (89)..(121): Pfam Name: Ankyrin repeat Pfam Description: Ankyrin repeat
  misc_feature (1)..(173): Homolog of NCBI NO: 15234270 NR Description: putative acyl-CoA binding protein; protein id: supported by cDNA: 7361., supported by cDNA: gi_12039031, by cDNA: gi_13661741, supported by cDNA: gi_19699101 [Arabidopsis
  misc_feature (1)..(172): Homolog of NCBI NO: 15238757 NR Description: putative protein; protein id: At5g53470.1, by cDNA: 35856., supported by cDNA: gi_16649022, supported by gi_20260069, supported by cDNA: gi_21284388 [Arabidopsis
  misc_feature (1)..(172): Homolog of NCBI NO: 21284389 NR Description: acyl-CoA binding protein [Arabidopsis thaliana]
  misc_feature (1)..(172): Homolog of NCBI NO: 21593070 NR Description: putative acyl-CoA binding protein [Arabidopsis
  misc_feature (1)..(97): Homolog of NCBI NO: 12039034 NR Description: acyl-CoA binding protein 2 [Arabidopsis thaliana]
  misc_feature (1)..(156): Homolog of NCBI NO: 14150169 NR Description: hypothetical protein MGC2404 [Homo sapiens]
  misc_feature (1)..(156): Homolog of NCBI NO: 34880749 NR Description: similar to RIKEN cDNA 2610100E10 [Rattus
  misc_feature (1)..(156): Homolog of NCBI NO: 21312284 NR Description: RIKEN cDNA 2610100E10 [Mus musculus]
  misc_feature (1)..(142): Homolog of NCBI NO: 28571300 NR Description: CG33071-PA [Drosophila melanogaster]
  misc_feature (1)..(60): Homolog of NCBI NO: 30686450 NR Description: expressed protein [Arabidopsis thaliana]
MQGYITIVQDLFPNWDAGASAKRKDEDSIASASASKGPMGPVFSSLMYEEDEGNESELGDIHVSAREGATDDIVKLLAAGVEVNVRDTEGRSPLHWAVDRGHLSAVEVLANANADLNAKDNEGQTALHYAAVCEREDIAELLVKHHADLRIKDEDGNTAHDLCPSSWSFMNQAN

SEQ ID NO: 12101 - DNA, 1791 bp, Zea mays subsp. mays
  misc_feature (1)..(1791): Ceres Seq. ID no. 12368040
  misc_feature: MA Experiment ID: 108528 Result: Down-regulated in Transcription
  misc_feature: MA Experiment 108528 PARAMETER Experiment Name: Zm_Imbibed_Seeds_P Parameter: Age (day) Value: 5 vs. 2
  misc_feature: MA Experiment 108528 PARAMETER Experiment Name: Zm_Imbibed_Seeds_P Parameter: Organism Value: Zea mays
  misc_feature: MA Experiment 108528 PARAMETER Experiment Name: Zm_Imbibed_Seeds_P Parameter: Plant Line Value: 35A19
  misc_feature: MA Experiment 108528 PARAMETER Experiment Name: Zm_Imbibed_Seeds_P Parameter: Tissue Value: Aerial vs. Embryo
  misc_feature: MA Experiment ID: 108535 Result: Down-regulated in Transcription
  misc_feature: MA Experiment 108535 PARAMETER Experiment Name: Zm_Meristem_P Parameter: Age (day) Value: 8
  misc_feature: MA Experiment 108535 PARAMETER Experiment Name: Zm_Meristem_P Parameter: Organism Value: Zea mays
  misc_feature: MA Experiment 108535 PARAMETER Experiment Name: Zm_Meristem_P Parameter: Plant Line Value: 35A19
  misc_feature: MA Experiment 108535 PARAMETER Experiment Name: Zm_Meristem_P Parameter: Tissue Value: Root Meristem vs. Above Root Meristem
  misc_feature: MA Experiment ID: 108556 Result: Up-regulated in Transcription
  misc_feature: MA Experiment 108556 PARAMETER Experiment Name: Zm_Drought_P Parameter: Age (day) Value: 9
  misc_feature: MA Experiment 108556 PARAMETER Experiment Name: Zm_Drought_P Parameter: Organism Value: Zea mays
  misc_feature: MA Experiment 108556 PARAMETER Experiment Name: Zm_Drought_P Parameter: Plant Line Value: 35A19
  misc_feature: MA Experiment 108556 PARAMETER Experiment Name: Zm_Drought_P Parameter: Timepoint (hr) Value: 24
  misc_feature: MA Experiment 108556 PARAMETER Experiment Name: Zm_Drought_P Parameter: Tissue Value: Aerial
  misc_feature: MA Experiment 108556 PARAMETER Experiment Name: Zm_Drought_P Parameter: Treatment Value: Drought vs. No Drought
  misc_feature: MA Experiment ID: 20000479 Result: Up-regulated in Transcription
  misc_feature: MA Experiment 20000479 PARAMETER Experiment Name: Zm_Drought_P Parameter: Age (day) Value: 10
  misc_feature: MA Experiment 20000479 PARAMETER Experiment Name: Zm_Drought_P Parameter: Organism Value: Zea mays
  misc_feature: MA Experiment 20000479 PARAMETER Experiment Name: Zm_Drought_P Parameter: Plant Line Value: 35A19
  misc_feature: MA Experiment 20000479 PARAMETER Experiment Name: Zm_Drought_P Parameter: Timepoint (hr) Value: 48
  misc_feature: MA Experiment 20000479 PARAMETER Experiment Name: Zm_Drought_P Parameter: Tissue Value: Aerial
  misc_feature: MA Experiment 20000479 PARAMETER Experiment Name: Zm_Drought_P Parameter: Treatment Value: Drought vs. No Drought
agatatatgcaagaaaagaaaagagaagagcctctgtggatagtggtgggtgctggatcactgggcggagcagcttctcatatcggatcgatcgattaattaatatatactataaacatacaatcaattacatacatatacgccaagagaagaggaacgccggcccgtttcacttgtctccttcctccgatccctcccggcggccggccgggctcgggcgtttttccccttttgtttcccatggaggacgccaagatggggaacggcgccaccatccgcgcggtgctcgccatcctccagtggtggggattcaacgtcaccgtcatcatcatcaacaagtggatcttccaggtcccgtccctcgcgcttgctcttgtttaaatcctggtcttctttttttgtttcaattcaatttccagagatggccatgtatgtagttatatatatattcattcaaggggatttaggggtggatccgtcaggacaaccaagagatttcgtctctttttagttcttgccttcatccaatcgttcgataggtgcagattaatcgcccccatgatgttgtcgtctttttcttcagtgatttggtaggaacataaaggaatcatccttttttttttgtccgactgaaaagaaaattacttacttgaaccggtggtggttcgtagattggatttccagatttaattgtaatcatggtaagaagagcctgttcttatcctgtgacgctgactctgtgtggggttgtcagaaactggagttcaagttcccccctgacggtgtcgtgcgtccacttcatatgttcctccatcggagcctacatcgcgatcaaagtcctgagaacgaagccgctgatcgaggtggcctcggaggaccggtggaggaggatattccccatgtcgttggtgttctgcgtcaacatcgtgctggggaacgtgagcctgaggtacataccagtgtcattcatgcagacgatcaagtcgttcactccggcaacgacagtggttcttcagtggctggtttggaggaaatactttgagtggcgcatctgggcgtccttggtgcccatcgttggaggaatccttgtcacctccgtgacggagctgagcttcaacacggctggcttctgcgccgcgctggtggggtgcctggccacgtccaccaagaccatcctggcagagtcgctgctccacggctacaagttcgacagcatcaacacggtgtactacatggctccgctggccacgctgatcctgtcggtgccggccgtggcgctggagggcggcgccgtgctggggtggctgcggacgcacgagtccgtgggaccggcgctggcggtcgtcgtcacctccggggtgctggccttctgcctcaacttctccatcttctacgtcatccactccacgacggcagtcaccttcaacgtggccggcaacctcaaggtggccgtggcggtgctggcgtcctggatggtgttccggaaccccatctccgccatgaacgcactcggctgcggcgtcacgctcgtcggatgcaccttctacggctacgtcaggcaccgactctcgcagaaccaggcgcccagagcccgcttggagatgctgccgctcaccgccgtcgacaagcaaggcgacaagatataaaaagtcttttcgaataaaccatctgattctttctgatccacctagcctaaccgccgatcgagaatgcatccaccatcagagatgacaggaaattattttttgttggcagccagattttgataatgagtcagttcagttgttgctt

SEQ ID NO: 12102 - protein, 315 aa, Zea mays subsp. mays
  peptide (1)..(315): Ceres Seq. ID no. 12368041
  misc_feature (26)..(134): Pfam Name: Integral membrane protein DUF6 Pfam Description: Integral membrane protein DUF6
  misc_feature (26)..(315): Homolog of NCBI NO: 18411611 NR Description: expressed protein; protein id: At1g77610.1, by cDNA: gi_13430497, supported by cDNA: gi_21281057 [Arabidopsis
  misc_feature (26)..(315): Homolog of NCBI NO: 15219121 NR Description: glucose 6 phosphate/phosphate translocator, protein id: At1g21870.1 [Arabidopsis thaliana] T26F17.9 [Arabidopsis thaliana] >gi|29329825|emb|CAD83089.1|
  misc_feature (1)..(315): Homolog of NCBI NO: 38567832 NR Description: OSJNBb0020J19.10 [Oryza sativa (japonica
  misc_feature (17)..(289): Homolog of NCBI NO: 9759107 NR Description: phosphate/phosphoenolpyruvate translocator
  misc_feature (17)..(289): Homolog of NCBI NO: 30681126 NR Description: phosphate translocator-related [Arabidopsis
  misc_feature (17)..(289): Homolog of NCBI NO: 27476065 NR Description: Putative phosphate/phosphoenolpyruvate
  misc_feature (17)..(289): Homolog of NCBI NO: 15237644 NR Description: phosphate/phosphoenolpyruvate translocator - like protein id: At5g04160.1, supported by cDNA: 100777., supported by
  misc_feature (17)..(289): Homolog of NCBI NO: 17064798 NR Description: phosphate/phosphoenolpyruvate translocator-like [Arabidopsis thaliana] >gi|20259810|gb|AAM13252.1|
  misc_feature (17)..(289): Homolog of NCBI NO: 15228248 NR Description: unknown protein; protein id: At3g10290.1 thaliana] >gi|6056196|gb|AAF02813.1|AC009400_9 unknown protein
  misc_feature (26)..(289): Homolog of NCBI NO: 15221371 NR Description: hypothetical protein; protein id: At1g12500.1 thaliana] >gi|8778643|gb|AAF79651.1|AC025416_25 F5O11.25 thaliana] >gi|9502394|gb|AAF88101.1|AC025417_29 T12C24.5
MVRRACSYPVTLTLCGVVRNWSSSSPLTVSCVHFICSSIGAYIAIKVLRTKPLIEVASEDRWRRIFPMSLVFCVNIVLGNVSLRYIPVSFMQTIKSFTPATTVVLQWLVWRKYFEWRIWASLVPIVGGILVTSVTELSFNTAGFCAALVGCLATSTKTILAESLLHGYKFDSINTVYYMAPLATLILSVPAVALEGGAVLGWLRTHESVGPALAVVVTSGVLAFCLNFSIFYVIHSTTAVTFNVAGNLKVAVAVLASWMVFRNPISAMNALGCGVTLVGCTFYGYVRHRLSQNQAPRARLEMLPLTAVDKQGDKI

SEQ ID NO: 12103 - protein, 248 aa, Zea mays subsp. mays; identical to SEQ ID NO: 4930
  peptide (1)..(248): Ceres Seq. ID no. 12368042
  misc_feature (1)..(67): Pfam Name: Integral membrane protein DUF6 Pfam Description: Integral membrane protein DUF6
  misc_feature (1)..(248): Homolog of NCBI NO: 18411611 NR Description: expressed protein; protein id: At1g77610.1, by cDNA: gi_13430497, supported by cDNA: gi_21281057 [Arabidopsis
  misc_feature (1)..(248): Homolog of NCBI NO: 15219121 NR Description: glucose 6 phosphate/phosphate translocator, protein id: At1g21870.1 [Arabidopsis thaliana] T26F17.9 [Arabidopsis thaliana] >gi|29329825|emb|CAD83089.1|
  misc_feature (1)..(248): Homolog of NCBI NO: 38567832 NR Description: OSJNBb0020J19.10 [Oryza sativa (japonica
  misc_feature (1)..(222): Homolog of NCBI NO: 9759107 NR Description: phosphate/phosphoenolpyruvate translocator
  misc_feature (1)..(222): Homolog of NCBI NO: 30681126 NR Description: phosphate translocator-related [Arabidopsis
  misc_feature (1)..(222): Homolog of NCBI NO: 27476065 NR Description: Putative phosphate/phosphoenolpyruvate
  misc_feature (1)..(222): Homolog of NCBI NO: 15237644 NR Description: phosphate/phosphoenolpyruvate translocator - like protein id: At5g04160.1, supported by cDNA: 100777., supported by
  misc_feature (1)..(222): Homolog of NCBI NO: 17064798 NR Description: phosphate/phosphoenolpyruvate translocator-like [Arabidopsis thaliana] >gi|20259810|gb|AAM13252.1|
  misc_feature (1)..(222): Homolog of NCBI NO: 15228248 NR Description: unknown protein; protein id: At3g10290.1 thaliana] >gi|6056196|gb|AAF02813.1|AC009400_9 unknown protein
  misc_feature (1)..(222): Homolog of NCBI NO: 15221371 NR Description: hypothetical protein; protein id: At1g12500.1 thaliana] >gi|8778643|gb|AAF79651.1|AC025416_25 F5O11.25 thaliana] >gi|9502394|gb|AAF88101.1|AC025417_29 T12C24.5

SEQ ID NO: 12104 - protein, 225 aa, Zea mays subsp. mays
  peptide (1)..(225): Ceres Seq. ID no. 12368043
  misc_feature (1)..(225): Homolog of NCBI NO: 18411611 NR Description: expressed protein; protein id: At1g77610.1, by cDNA: gi_13430497, supported by cDNA: gi_21281057 [Arabidopsis
  misc_feature (1)..(225): Homolog of NCBI NO: 15219121 NR Description: glucose 6 phosphate/phosphate translocator, protein id: At1g21870.1 [Arabidopsis thaliana] T26F17.9 [Arabidopsis thaliana] >gi|29329825|emb|CAD83089.1|
  misc_feature (1)..(225): Homolog of NCBI NO: 38567832 NR Description: OSJNBb0020J19.10 [Oryza sativa (japonica
  misc_feature (1)..(199): Homolog of NCBI NO: 9759107 NR Description: phosphate/phosphoenolpyruvate translocator
  misc_feature (1)..(199): Homolog of NCBI NO: 30681126 NR Description: phosphate translocator-related [Arabidopsis
  misc_feature (1)..(199): Homolog of NCBI NO: 27476065 NR Description: Putative phosphate/phosphoenolpyruvate
  misc_feature (1)..(199): Homolog of NCBI NO: 15237644 NR Description: phosphate/phosphoenolpyruvate translocator - like protein id: At5g04160.1, supported by cDNA: 100777., supported by
  misc_feature (1)..(199): Homolog of NCBI NO: 17064798 NR Description: phosphate/phosphoenolpyruvate translocator-like [Arabidopsis thaliana] >gi|20259810|gb|AAM13252.1|
  misc_feature (1)..(199): Homolog of NCBI NO: 15228248 NR Description: unknown protein; protein id: At3g10290.1 thaliana] >gi|6056196|gb|AAF02813.1|AC009400_9 unknown protein
  misc_feature (1)..(199): Homolog of NCBI NO: 15221371 NR Description: hypothetical protein; protein id: At1g12500.1 thaliana] >gi|8778643|gb|AAF79651.1|AC025416_25 F5O11.25 thaliana] >gi|9502394|gb|AAF88101.1|AC025417_29 T12C24.5
MQTIKSFTPATTVVLQWLVWRKYFEWRIWASLVPIVGGILVTSVTELSFNTAGFCAALVGCLATSTKTILAESLLHGYKFDSINTVYYMAPLATLILSVPAVALEGGAVLGWLRTHESVGPALAVVVTSGVLAFCLNFSIFYVIHSTTAVTFNVAGNLKVAVAVLASWMVFRNPISAMNALGCGVTLVGCTFYGYVRHRLSQNQAPRARLEMLPLTAVDKQGDKI

SEQ ID NO: 12105 - DNA, 1352 bp, Zea mays subsp. mays
  misc_feature (1)..(1352): Ceres Seq. ID no. 12566161
  misc_feature: MA Experiment ID: 108522 Result: Up-regulated in Transcription
  misc_feature: MA Experiment 108522 PARAMETER Experiment Name: Zm_42deg_Heat_P Parameter: Age (day) Value: 8
  misc_feature: MA Experiment 108522 PARAMETER Experiment Name: Zm_42deg_Heat_P Parameter: Organism Value: Zea mays
  misc_feature: MA Experiment 108522 PARAMETER Experiment Name: Zm_42deg_Heat_P Parameter: Plant Line Value: 35A19
  misc_feature: MA Experiment 108522 PARAMETER Experiment Name: Zm_42deg_Heat_P Parameter: Temperature (deg C) Value: 42 vs. 22
  misc_feature: MA Experiment 108522 PARAMETER Experiment Name: Zm_42deg_Heat_P Parameter: Timepoint (hr) Value: 1
  misc_feature: MA Experiment 108522 PARAMETER Experiment Name: Zm_42deg_Heat_P Parameter: Tissue Value: Aerial
  misc_feature: MA Experiment ID: 108523 Result: Up-regulated in Transcription
  misc_feature: MA Experiment 108523 PARAMETER Experiment Name: Zm_42deg_Heat_P Parameter: Age (day) Value: 8
  misc_feature: MA Experiment 108523 PARAMETER Experiment Name: Zm_42deg_Heat_P Parameter: Organism Value: Zea mays
  misc_feature: MA Experiment 108523 PARAMETER Experiment Name: Zm_42deg_Heat_P Parameter: Plant Line Value: 35A19
  misc_feature: MA Experiment 108523 PARAMETER Experiment Name: Zm_42deg_Heat_P Parameter: Temperature (deg C) Value: 42 vs. 22
  misc_feature: MA Experiment 108523 PARAMETER Experiment Name: Zm_42deg_Heat_P Parameter: Timepoint (hr) Value: 6
  misc_feature: MA Experiment 108523 PARAMETER Experiment Name: Zm_42deg_Heat_P Parameter: Tissue Value: Aerial
  misc_feature: MA Experiment ID: 108535 Result: Up-regulated in Transcription
  misc_feature: MA Experiment 108535 PARAMETER Experiment Name: Zm_Meristem_P Parameter: Age (day) Value: 8
  misc_feature: MA Experiment 108535 PARAMETER Experiment Name: Zm_Meristem_P Parameter: Organism Value: Zea mays
  misc_feature: MA Experiment 108535 PARAMETER Experiment Name: Zm_Meristem_P Parameter: Plant Line Value: 35A19
  misc_feature: MA Experiment 108535 PARAMETER Experiment Name: Zm_Meristem_P Parameter: Tissue Value: Root Meristem vs. Above Root Meristem
  misc_feature: MA Experiment ID: 108544 Result: Down-regulated in Transcription
  misc_feature: MA Experiment ID: 20000492 Result: Up-regulated in Transcription
  misc_feature: MA Experiment 20000492 PARAMETER Experiment Name: Zm_Hybrid_Seed_Dev_P Parameter: DAP Value: 12
  misc_feature: MA Experiment 20000492 PARAMETER Experiment Name: Zm_Hybrid_Seed_Dev_P Parameter: Organism Value: Zea mays
  misc_feature: MA Experiment 20000492 PARAMETER Experiment Name: Zm_Hybrid_Seed_Dev_P Parameter: Plant Line Value: 35A19
  misc_feature: MA Experiment 20000492 PARAMETER Experiment Name: Zm_Hybrid_Seed_Dev_P Parameter: Tissue Value: Fert Kernel vs. Unfert Floret
  misc_feature: MA Experiment ID: 20000535 Result: Up-regulated in Transcription
  misc_feature: MA Experiment 20000535 PARAMETER Experiment Name: Zm_Hybrid_Seed_Dev_P Parameter: DAP Value: 30 vs. 12
  misc_feature: MA Experiment 20000535 PARAMETER Experiment Name: Zm_Hybrid_Seed_Dev_P Parameter: Organism Value: Zea mays
  misc_feature: MA Experiment 20000535 PARAMETER Experiment Name: Zm_Hybrid_Seed_Dev_P Parameter: Plant Line Value: 35A19
  misc_feature: MA Experiment 20000535 PARAMETER Experiment Name: Zm_Hybrid_Seed_Dev_P Parameter: Tissue Value: Embryo vs. Unfert Floret
aaaagaccaaaaaccctcacgaaattctgagatccatccagaaacgtcgctccatggcgattatctccgacttcaaggaggacgagaccccgcagcagccggcggcggtcggccccggcgtcgaggagaccctggtggcagcgctagagaggaccggcggtgcactcccctttctccaggcggccatcgatgtcgctcaccgcaggtctggcctgttccgcgacccttcggcggtgagcaaggttaccgcgatggcggcggccgtcagggcgcaggtggagaccgaggagagggcagccagagaggtcaagaggaaggcggaggaggccgagaggaaggctgcggccgaggcgcagaagcctgacatggaggcggcgacggcgacggcggaggagaagctggagaaggaccgtatggatgcggataaggcggaggaaggcaacgttagacaaccaaatgctggcaatggtcttgatttggagaagtactcatggactcaacagttgcctgaggttaacatcactattcctgttcctcaaggaacaaaatcaagatttgtggtcgttgatataaagaagaaccatctgaaggttgttctgaagggccagccacctatcattgatggtgagctctataagccagttaaggttgatgattgcttctggagcatagaggatggaaaaactctttccatattgcttacaaagcacaaccaaatggagtggtggaagtctgttataaagggtggccctgaagttgatacccaaaaggtggaacctgagaacagcaaactctctgatttggatcctgagactagacaaactgtggagaagatgatgtttgaccagcgccagaagcagatgggccttccgacaagtgatgaaatgcaaaagcaagaaattctcaagaagttcatgtctgagcacccggagatggacttctctagagcgaaaatgccttgaggatttgttcgggcagttatttctaccagtctgcttaggttgtctttgagtctggtatcggtgtcaaacaaatcttcatctgttttttttttgtaatgcgtcaggaatatcaggcttgttctttttcatctcaatccatatgcattggaaacgtttgggtgggtttaaatccatagtaggtcaaaagctttactaaattttccaatccaatccattccattggtcacgtggcttgaggatttgttcgggcagttatttctaccagtctgcttaggttgtctttgtgtgattgtgtctggtgttagtgtggaacagatgtctttgtgtgattgtgtctggtgttagtgtggaacagatcatctttttttagtagcgtcagaaatatcattt

SEQ ID NO: 12106 - protein, 319 aa, Zea mays subsp. mays
  peptide (1)..(319): Ceres Seq. ID no. 12566162
  misc_feature (152)..(303): Pfam Name: Nuclear movement protein Pfam Description: Nuclear movement protein
  misc_feature (18)..(317): Homolog of NCBI NO: 30524691 NR Description: salt tolerance protein 5 [Beta vulgaris]
  misc_feature (18)..(317): Homolog of NCBI NO: 21593329 NR Description: unknown [Arabidopsis thaliana]
  misc_feature (18)..(317): Homolog of NCBI NO: 15238732 NR Description: putative protein; protein id: At5g53400.1, by cDNA: 38105. [Arabidopsis thaliana] contains similarity to nuclear movement protein
  misc_feature (18)..(317): Homolog of NCBI NO: 15234308 NR Description: putative protein; protein id: At4g27890.1
  misc_feature (93)..(317): Homolog of NCBI NO: 6754910 NR Description: nuclear distribution gene C homolog (Aspergillus) musculus] >gi|20846655|ref|XP_124402.1| nuclear distribution gene homolog [Mus musculus] >gi|2654358|emb|CAA75677.1| MNUDC protein
  misc_feature (93)..(317): Homolog of NCBI NO: 8394272 NR Description: nuclear distribution gene C homolog [Rattus
  misc_feature (93)..(317): Homolog of NCBI NO: 5729953 NR Description: nuclear distribution gene C homolog (A. nuclear distribution gene C (A.nidulans) homolog [Homo sapiens] nuclear distribution protein C (A.nidulans) homolog [Homo
  misc_feature (58)..(317): Homolog of NCBI NO: 8101760 NR Description: putative nuclear movement protein PNUDC
  misc_feature (65)..(317): Homolog of NCBI NO: 28279157 NR Description: Similar to nuclear distribution gene C homolog
  misc_feature (93)..(317): Homolog of NCBI NO: 12052969 NR Description: hypothetical protein [Homo sapiens]
KTKNPHEILRSIQKRRSMAIISDFKEDETPQQPAAVGPGVEETLVAALERTGGALPFLQAAIDVAHRRSGLFRDPSAVSKVTAMAAAVRAQVETEERAAREVKRKAEEAERKAAAEAQKPDMEAATATAEEKLEKDRMDADKAEEGNVRQPNAGNGLDLEKYSWTQQLPEVNITIPVPQGTKSRFVVVDIKKNHLKVVLKGQPPIIDGELYKPVKVDDCFWSIEDGKTLSILLTKHNQMEWWKSVIKGGPEVDTQKVEPENSKLSDLDPETRQTVEKMMFDQRQKQMGLPTSDEMQKQEILKKFMSEHPEMDFSRAKMP

SEQ ID NO: 12107 - protein, 302 aa, Zea mays subsp. mays
  peptide (1)..(302): Ceres Seq. ID no. 12566163
  misc_feature (135)..(286): Pfam Name: Nuclear movement protein Pfam Description: Nuclear movement protein
  misc_feature (1)..(300): Homolog of NCBI NO: 30524691 NR Description: salt tolerance protein 5 [Beta vulgaris]
  misc_feature (1)..(300): Homolog of NCBI NO: 21593329 NR Description: unknown [Arabidopsis thaliana]
  misc_feature (1)..(300): Homolog of NCBI NO: 15238732 NR Description: putative protein; protein id: At5g53400.1, by cDNA: 38105. [Arabidopsis thaliana] contains similarity to nuclear movement protein
  misc_feature (1)..(300): Homolog of NCBI NO: 15234308 NR Description: putative protein; protein id: At4g27890.1
  misc_feature (76)..(300): Homolog of NCBI NO: 6754910 NR Description: nuclear distribution gene C homolog (Aspergillus) musculus] >gi|20846655|ref|XP_124402.1| nuclear distribution gene homolog [Mus musculus] >gi|2654358|emb|CAA75677.1| MNUDC protein
  misc_feature (76)..(300): Homolog of NCBI NO: 8394272 NR Description: nuclear distribution gene C homolog [Rattus
  misc_feature (76)..(300): Homolog of NCBI NO: 5729953 NR Description: nuclear distribution gene C homolog (A. nuclear distribution gene C (A.nidulans) homolog [Homo sapiens] nuclear distribution protein C (A.nidulans) homolog [Homo
  misc_feature (41)..(300): Homolog of NCBI NO: 8101760 NR Description: putative nuclear movement protein PNUDC
  misc_feature (48)..(300): Homolog of NCBI NO: 28279157 NR Description: Similar to nuclear distribution gene C homolog
  misc_feature (76)..(300): Homolog of NCBI NO: 12052969 NR Description: hypothetical protein [Homo sapiens]
MAIISDFKEDETPQQPAAVGPGVEETLVAALERTGGALPFLQAAIDVAHRRSGLFRDPSAVSKVTAMAAAVRAQVETEERAAREVKRKAEEAERKAAAEAQKPDMEAATATAEEKLEKDRMDADKAEEGNVRQPNAGNGLDLEKYSWTQQLPEVNITIPVPQGTKSRFVVVDIKKNHLKVVLKGQPPIIDGELYKPVKVDDCFWSIEDGKTLSILLTKHNQMEWWKSVIKGGPEVDTQKVEPENSKLSDLDPETRQTVEKMMFDQRQKQMGLPTSDEMQKQEILKKFMSEHPEMDFSRAKMP

SEQ ID NO: 12108 - protein, 236 aa, Zea mays subsp. mays
  peptide (1)..(236): Ceres Seq. ID no. 12566164
  misc_feature (69)..(220): Pfam Name: Nuclear movement protein Pfam Description: Nuclear movement protein
  misc_feature (1)..(234): Homolog of NCBI NO: 30524691 NR Description: salt tolerance protein 5 [Beta vulgaris]
  misc_feature (1)..(234): Homolog of NCBI NO: 21593329 NR Description: unknown [Arabidopsis thaliana]
  misc_feature (1)..(234): Homolog of NCBI NO: 15238732 NR Description: putative protein; protein id: At5g53400.1, by cDNA: 38105. [Arabidopsis thaliana] contains similarity to nuclear movement protein
  misc_feature (1)..(234): Homolog of NCBI NO: 15234308 NR Description: putative protein; protein id: At4g27890.1
  misc_feature (10)..(234): Homolog of NCBI NO: 6754910 NR Description: nuclear distribution gene C homolog (Aspergillus) musculus] >gi|20846655|ref|XP_124402.1| nuclear distribution gene homolog [Mus musculus] >gi|2654358|emb|CAA75677.1| MNUDC protein
  misc_feature (10)..(234): Homolog of NCBI NO: 8394272 NR Description: nuclear distribution gene C homolog [Rattus
  misc_feature (10)..(234): Homolog of NCBI NO: 5729953 NR Description: nuclear distribution gene C homolog (A. nuclear distribution gene C (A.nidulans) homolog [Homo sapiens] nuclear distribution protein C (A.nidulans) homolog [Homo
  misc_feature (1)..(234): Homolog of NCBI NO: 8101760 NR Description: putative nuclear movement protein PNUDC
  misc_feature (1)..(234): Homolog of NCBI NO: 28279157 NR Description: Similar to nuclear distribution gene C homolog
  misc_feature (10)..(234): Homolog of NCBI NO: 12052969 NR Description: hypothetical protein [Homo sapiens]
MAAAVRAQVETEERAAREVKRKAEEAERKAAAEAQKPDMEAATATAEEKLEKDRMDADKAEEGNVRQPNAGNGLDLEKYSWTQQLPEVNITIPVPQGTKSRFVVVDIKKNHLKVVLKGQPPIIDGELYKPVKVDDCFWSIEDGKTLSILLTKHNQMEWWKSVIKGGPEVDTQKVEPENSKLSDLDPETRQTVEKMMFDQRQKQMGLPTSDEMQKQEILKKFMSEHPEMDFSRAKMP

SEQ ID NO: 12109 - DNA, 1719 bp, Zea mays subsp. mays
  misc_feature (1)..(1719): Ceres Seq. ID no. 12406579
  misc_feature: MA Experiment ID: 108527 Result: Up-regulated in Transcription
  misc_feature: MA Experiment 108527 PARAMETER Experiment Name: Zm_5mM_NO_P Parameter: Age (day) Value: 8
  misc_feature: MA Experiment 108527 PARAMETER Experiment Name: Zm_5mM_NO_P Parameter: Organism Value: Zea mays
  misc_feature: MA Experiment 108527 PARAMETER Experiment Name: Zm_5mM_NO_P Parameter: Plant Line Value: 35A19
  misc_feature: MA Experiment 108527 PARAMETER Experiment Name: Zm_5mM_NO_P Parameter: Timepoint (hr) Value: 6
  misc_feature: MA Experiment 108527 PARAMETER Experiment Name: Zm_5mM_NO_P Parameter: Tissue Value: Aerial
  misc_feature: MA Experiment 108527 PARAMETER Experiment Name: Zm_5mM_NO_P Parameter: Treatment Value: 5mM NO vs. No Treatment
  misc_feature: MA Experiment ID: 108559 Result: Up-regulated in Transcription
  misc_feature: MA Experiment 108559 PARAMETER Experiment Name: Zm_5mM_NO_P Parameter: Age (day) Value: 8
  misc_feature: MA Experiment 108559 PARAMETER Experiment Name: Zm_5mM_NO_P Parameter: Organism Value: Zea mays
  misc_feature: MA Experiment 108559 PARAMETER Experiment Name: Zm_5mM_NO_P Parameter: Plant Line Value: 35A19
  misc_feature: MA Experiment 108559 PARAMETER Experiment Name: Zm_5mM_NO_P Parameter: Timepoint (hr) Value: 12
  misc_feature: MA Experiment 108559 PARAMETER Experiment Name: Zm_5mM_NO_P Parameter: Tissue Value: Aerial
  misc_feature: MA Experiment 108559 PARAMETER Experiment Name: Zm_5mM_NO_P Parameter: Treatment Value: 5mM NO vs. No Treatment
  misc_feature: MA Experiment ID: 20000632 Result: Down-regulated in Transcription
  misc_feature: MA Experiment 20000632 PARAMETER Experiment Name: Zm_Herbicide-Treatments_P Parameter: Timepoint (hr) Value: 4
  misc_feature: MA Experiment 20000632 PARAMETER Experiment Name: Zm_Herbicide-Treatments_P Parameter: Tissue Value: Aerial
  misc_feature: MA Experiment 20000632 PARAMETER Experiment Name: Zm_Herbicide-Treatments_P Parameter: Treatment Value: Glean vs. No Treatment
actcttcgcttctaactccgctgggccaccagctttgaccgccgcctcccttcccctccgctactgctcctccccaccccactcccccgcaggagcggcggcggcggcggcgaggtcgtaccccacatcggcgagcggcggcggcaccgccggaggcaaaggcaagatgttcgggcgcgcgccgaagaagagcgacaacaccaagtactacgagatcctcggggtgcccaagtcggcgtcccaggacgatctcaagaaggcctaccgcaaggctgctatcaagaaccaccccgacaagggcggtgaccccgagaagttcaaggagctcgcacaagcctatgaggttttgagtgatccagagaaacgtgagatttatgatcagtatggtgaagatgcccttaaggaaggaatgggcggtggaggatcccatgttgatccatttgacatcttctcatcattttttggaccctcttttggaggaggtggtggaagcagcaggggaagaaggcaaaggaggggagaagatgtagttcacccacttaaagtttctctggaagatctttacaatggcacctcaaagaagctctctctttcgcgcaatgtcatctgctccaagtgcaagggcaagggctcgaagtctggtgcctcaatgaggtgccctggttgccagggctcaggcatgaaagtcactattcgtcagctgggcccttccatgatacagcagatgcagcagccttgcaatgagtgcaaggggactggagagagcatcaatgagaaggaccgctgtccagggtgcaagggtgagaaggtcattcaagagaagaaggttcttgaggttcatgttgagaaggggatgcaacacaaccagaagatcaccttccctggtgaagctgatgaagcgcctgatactgtcactggagacattgtattcgtcctccagcagaaggatcactccaaattcaaaagaaagggtgaagatctcttctatgagcacaccttgtctctgaccgaagcactatgtgggttccaatttgttcttacacatctggacaacaggcagcttctcatcaaatcagaccctggtgaagttgttaaacctgaccaattcaaggcgattaatgatgaggggatgccaatttaccagaggcctttcatgaaggggaagctgtacatccatttcacggtggagttccctgactcgttggcaccagagcagtgcaaggctctcgagacagtacttccaccaaggccttcatccaagctgacagacatggagatagatgaatgcgaggagacgactatgcatgatgtgaacaacatcgaggaagagatgcgcaggaagcaagctcacgctgcccaggaggcgtacgaggaggacgacgagatgccgggcggagcccagagagtgcagtgcgcgcaacagtaagcagactatcatcaaggcaattgggaggggtggtgcccttaaagcatgggagtgatctctggttttgctgtcgccgagctgggaaataggaagctgaatcgacctcgcaagcggggaatgtatccttttttgctgcaacataaaaaatgctacccaggcatagctgggtaccttttaacttctgtttgtgggatttgctagagtgatggtttcgatatatagggggacttgaatgtctggaatgctacggtataacgcacatttgggtgcaatgtctgttgcattgctgtctg

SEQ ID NO: 12110 - protein, 474 aa, Zea mays subsp. mays
  peptide (1)..(474): Ceres Seq. ID no. 12406580
  misc_feature (289)..(413): Pfam Name: DnaJ C terminal region Pfam Description: DnaJ C terminal region
  misc_feature (289)..(413): Pfam Name: DnaJ C terminal region Pfam Description: DnaJ C terminal region
  misc_feature (56)..(474): Homolog of NCBI NO: 7441932 NR Description: DnaJ protein homolog ZMDJ1 - maize
  misc_feature (56)..(474): Homolog of NCBI NO: 29367357 NR Description: DNAJ-like protein [Oryza sativa (japonica
  misc_feature (56)..(474): Homolog of NCBI NO: 7441930 NR Description: dnaJ protein homolog - potato
  misc_feature (56)..(474): Homolog of NCBI NO: 7441932 NR Description: DnaJ protein homolog ZMDJ1 - maize
  misc_feature (56)..(474): Homolog of NCBI NO: 7441930 NR Description: dnaJ protein homolog - potato
  misc_feature (56)..(474): Homolog of NCBI NO: 461944 NR Description: DnaJ protein homolog (DNAJ-1)
  misc_feature (56)..(474): Homolog of NCBI NO: 1169382 NR Description: DnaJ protein homolog 2 >gi|542196|pir||S42031
  misc_feature (56)..(474): Homolog of NCBI NO: 10945669 NR Description: J1P [Daucus carota]
  misc_feature (56)..(474): Homolog of NCBI NO: 4008159 NR Description: DnaJ homolog [Salix gilgiana]
  misc_feature (56)..(474): Homolog of NCBI NO: 29367357 NR Description: DNAJ-like protein [Oryza sativa (japonica
  misc_feature (56)..(474): Homolog of NCBI NO: 4008159 NR Description: DnaJ homolog [Salix gilgiana]
  misc_feature (56)..(474): Homolog of NCBI NO: 461944 NR Description: DnaJ protein homolog (DNAJ-1)
  misc_feature (56)..(474): Homolog of NCBI NO: 10945669 NR Description: J1P [Daucus carota]
  misc_feature (56)..(474): Homolog of NCBI NO: 1169382 NR Description: DnaJ protein homolog 2 >gi|542196|pir||S42031
LFASNSAGPPALTAASLPLRYCSSPPHSPAGAAAAAARSYPTSASGGGTAGGKGKMFGRAPKKSDNTKYYEILGVPKSASQDDLKKAYRKAAIKNHPDKGGDPEKFKELAQAYEVLSDPEKREIYDQYGEDALKEGMGGGGSHVDPFDIFSSFFGPSFGGGGGSSRGRRQRRGEDVVHPLKVSLEDLYNGTSKKLSLSRNVICSKCKGKGSKSGASMRCPGCQGSGMKVTIRQLGPSMIQQMQQPCNECKGTGESINEKDRCPGCKGEKVIQEKKVLEVHVEKGMQHNQKITFPGEADEAPDTVTGDIVFVLQQKDHSKFKRKGEDLFYEHTLSLTEALCGFQFVLTHLDNRQLLIKSDPGEVVKPDQFKAINDEGMPIYQRPFMKGKLYIHFTVEFPDSLAPEQCKALETVLPPRPSSKLTDMEIDECEETTMHDVNNIEEEMRRKQAHAAQEAYEEDDEMPGGAQRVQCAQQ

SEQ ID NO: 12111 - protein, 419 aa, Zea mays subsp. mays
  peptide (1)..(419): Ceres Seq. ID no. 12406581
  misc_feature (234)..(358): Pfam Name: DnaJ C terminal region Pfam Description: DnaJ C terminal region
  misc_feature (234)..(358): Pfam Name: DnaJ C terminal region Pfam Description: DnaJ C terminal region
  misc_feature (1)..(419): Homolog of NCBI NO: 7441932 NR Description: DnaJ protein homolog ZMDJ1 - maize
  misc_feature (1)..(419): Homolog of NCBI NO: 29367357 NR Description: DNAJ-like protein [Oryza sativa (japonica
  misc_feature (1)..(419): Homolog of NCBI NO: 7441930 NR Description: dnaJ protein homolog - potato
  misc_feature (1)..(419): Homolog of NCBI NO: 7441932 NR Description: DnaJ protein homolog ZMDJ1 - maize
  misc_feature (1)..(419): Homolog of NCBI NO: 7441930 NR Description: dnaJ protein homolog - potato
  misc_feature (1)..(419): Homolog of NCBI NO: 461944 NR Description: DnaJ protein homolog (DNAJ-1)
  misc_feature (1)..(419): Homolog of NCBI NO: 1169382 NR Description: DnaJ protein homolog 2 >gi|542196|pir||S42031
  misc_feature (1)..(419): Homolog of NCBI NO: 10945669 NR Description: J1P [Daucus carota]
  misc_feature (1)..(419): Homolog of NCBI NO: 4008159 NR Description: DnaJ homolog [Salix gilgiana]
  misc_feature (1)..(419): Homolog of NCBI NO: 29367357 NR Description: DNAJ-like protein [Oryza sativa (japonica
  misc_feature (1)..(419): Homolog of NCBI NO: 4008159 NR Description: DnaJ homolog [Salix gilgiana]
  misc_feature (1)..(419): Homolog of NCBI NO: 461944 NR Description: DnaJ protein homolog (DNAJ-1)
  misc_feature (1)..(419): Homolog of NCBI NO: 10945669 NR Description: J1P [Daucus carota]
  misc_feature (1)..(419): Homolog of NCBI NO: 1169382 NR Description: DnaJ protein homolog 2 >gi|542196|pir||S42031
MFGRAPKKSDNTKYYEILGVPKSASQDDLKKAYRKAAIKNHPDKGGDPEKFKELAQAYEVLSDPEKREIYDQYGEDALKEGMGGGGSHVDPFDIFSSFFGPSFGGGGGSSRGRRQRRGEDVVHPLKVSLEDLYNGTSKKLSLSRNVICSKCKGKGSKSGASMRCPGCQGSGMKVTIRQLGPSMIQQMQQPCNECKGTGESINEKDRCPGCKGEKVIQEKKVLEVHVEKGMQHNQKITFPGEADEAPDTVTGDIVFVLQQKDHSKFKRKGEDLFYEHTLSLTEALCGFQFVLTHLDNRQLLIKSDPGEVVKPDQFKAINDEGMPIYQRPFMKGKLYIHFTVEFPDSLAPEQCKALETVLPPRPSSKLTDMEIDECEETTMHDVNNIEEEMRRKQAHAAQEAYEEDDEMPGGAQRVQCAQQ

SEQ ID NO: 12112 - protein, 338 aa, Zea mays subsp. mays
  peptide (1)..(338): Ceres Seq. ID no. 12406582
  misc_feature (153)..(277): Pfam Name: DnaJ C terminal region Pfam Description: DnaJ C terminal region
  misc_feature (153)..(277): Pfam Name: DnaJ C terminal region Pfam Description: DnaJ C terminal region
  misc_feature (1)..(338): Homolog of NCBI NO: 7441932 NR Description: DnaJ protein homolog ZMDJ1 - maize
  misc_feature (1)..(338): Homolog of NCBI NO: 29367357 NR Description: DNAJ-like protein [Oryza sativa (japonica
  misc_feature (1)..(338): Homolog of NCBI NO: 7441930 NR Description: dnaJ protein homolog - potato
  misc_feature (1)..(338): Homolog of NCBI NO: 7441932 NR Description: DnaJ protein homolog ZMDJ1 - maize
  misc_feature (1)..(338): Homolog of NCBI NO: 7441930 NR Description: dnaJ protein homolog - potato
  misc_feature (1)..(338): Homolog of NCBI NO: 461944 NR Description: DnaJ protein homolog (DNAJ-1)
  misc_feature (1)..(338): Homolog of NCBI NO: 1169382 NR Description: DnaJ protein homolog 2 >gi|542196|pir||S42031
  misc_feature (1)..(338): Homolog of NCBI NO: 10945669 NR Description: J1P [Daucus carota]
  misc_feature (1)..(338): Homolog of NCBI NO: 4008159 NR Description: DnaJ homolog [Salix gilgiana]
  misc_feature (1)..(338): Homolog of NCBI NO: 29367357 NR Description: DNAJ-like protein [Oryza sativa (japonica
  misc_feature (1)..(338): Homolog of NCBI NO: 4008159 NR Description: DnaJ homolog [Salix gilgiana]
  misc_feature (1)..(338): Homolog of NCBI NO: 461944 NR Description: DnaJ protein homolog (DNAJ-1)
  misc_feature (1)..(338): Homolog of NCBI NO: 10945669 NR Description: J1P [Daucus carota]
  misc_feature (1)..(338): Homolog of NCBI NO: 1169382 NR Description: DnaJ protein homolog 2 >gi|542196|pir||S42031
MGGGGSHVDPFDIFSSFFGPSFGGGGGSSRGRRQRRGEDVVHPLKVSLEDLYNGTSKKLSLSRNVICSKCKGKGSKSGASMRCPGCQGSGMKVTIRQLGPSMIQQMQQPCNECKGTGESINEKDRCPGCKGEKVIQEKKVLEVHVEKGMQHNQKITFPGEADEAPDTVTGDIVFVLQQKDHSKFKRKGEDLFYEHTLSLTEALCGFQFVLTHLDNRQLLIKSDPGEVVKPDQFKAINDEGMPIYQRPFMKGKLYIHFTVEFPDSLAPEQCKALETVLPPRPSSKLTDMEIDECEETTMHDVNNIEEEMRRKQAHAAQEAYEEDDEMPGGAQRVQCAQQ

SEQ ID NO: 12113 - DNA, 1152 bp, Zea mays subsp. mays
  misc_feature (1)..(1152): Ceres Seq. ID no. 12341292
  misc_feature: MA Experiment ID: 108687 Result: Down-regulated in Transcription
  misc_feature: MA Experiment 108687 PARAMETER Experiment Name: Zm_Embryos-Flowers__P Parameter: Tissue Value: Embryo vs. Aerial+
aacccaatcgtctctccaccacccaactcctcctgcctgtgctctcctcctttttctccactccgcttttgcttggttccatcgggccggagagggagaagctagctagctagcagcagctctgttggtgtgtgtgtgtgtgtgtgtgtggagggtagctgcagctggggctagctggaaaggtcgggagccatggggaggggccgggtggagctgaagcggatcgagaacaagatcaaccgccaggtcaccttcgccaagcgccgcaacggcctgctcaagaaggcgtacgagctctccgtgctctgcgacgccgaagtcgcgctcatcatcttctccaaccgcggcaagctctacgagttctgcagcggacagagcattaccaaaacacttgagaggtatgaaaaaaacagttatggaggaccagatactgctgtacagaacaaggagaacgagttagtccagagcagtcgtaatgagtacctcaagctgaaagcgagggtggataatttacagaggactcagaggaatttgcttggtgaagatctgggttcacttggtgtcaaagagcttgatcagcttgagaagcaaattgattcatccttaagtcacataagatccacaaggacacagcatatgcttgatcagctcactgatcttcagaggagggagcaaatgatgtgtgaagcaaataagtgccttagaagaaagctggaggagaccagcaaccaggtgcatggccaagtgtgggagcacggtgccaacttattactcggctacgagcggcactcctcgccacagcaagccccatcacatgttggcaatggattattctttcatcccctggaagctgcagcagagccaaccctgcagatcgggttcgctcccgagcatatgaataacttcatgccggcatggctaccctgaagatggatctttgaggcaaagggaataaataaagatgcgatggcagaatcatattgtactgcaagagtgacaattgtgtgttccactcacatatatgacctagttttgtgtgtctatatgtcgaaacccatatgtctgtgattttattatatgttatgtaagcacaaatgaaacatgccggactagttgcttttgcttgtctatgtatttgtatctgttctgtgt

SEQ ID NO: 12114 - protein, 244 aa, Zea mays subsp. mays
  peptide (1)..(244): Ceres Seq. ID no. 12341293
  misc_feature (75)..(176): Pfam Name: K-box region Pfam Description: K-box region
  misc_feature (1)..(244): Homolog of NCBI NO: 29372772 NR Description: putative MADS-domain transcription factor [Zea
  misc_feature (14)..(244): Homolog of NCBI NO: 3851333 NR Description: putative MADS-domain transcription factor [Zea
  misc_feature (1)..(244): Homolog of NCBI NO: 7446544 NR Description: MADS box protein - rice
  misc_feature (1)..(244): Homolog of NCBI NO: 33333045 NR Description: MADS box protein [Triticum aestivum]
  misc_feature (12)..(244): Homolog of NCBI NO: 2055376 NR Description: MADS box protein
  misc_feature (1)..(244): Homolog of NCBI NO: 33304376 NR Description: MADS box protein [Oryza sativa]
  misc_feature (1)..(244): Homolog of NCBI NO: 7446519 NR Description: MADS box protein - rice
  misc_feature (1)..(244): Homolog of NCBI NO: 9367315 NR Description: MADS-box protein 9 [Hordeum vulgare subsp.
  misc_feature (1)..(244): Homolog of NCBI NO: 7446543 NR Description: MADS box protein - rice
  misc_feature (1)..(244): Homolog of NCBI NO: 7446518 NR Description: M79 protein - rice >gi|2463333|emb|CAA75241.1|
MGRGRVELKRIENKINRQVTFAKRRNGLLKKAYELSVLCDAEVALIIFSNRGKLYEFCSGQSITKTLERYEKNSYGGPDTAVQNKENELVQSSRNEYLKLKARVDNLQRTQRNLLGEDLGSLGVKELDQLEKQIDSSLSHIRSTRTQHMLDQLTDLQRREQMMCEANKCLRRKLEETSNQVHGQVWEHGANLLLGYERHSSPQQAPSHVGNGLFFHPLEAAAEPTLQIGFAPEHMNNFMPAWLP

SEQ ID NO: 12115 - DNA, 1240 bp, Zea mays subsp. mays
  misc_feature (1)..(1240): Ceres Seq. ID no. 12350926
  misc_feature: MA Experiment ID: 108543 Result: Up-regulated in Transcription
  misc_feature: MA Experiment ID: 20000477 Result: Up-regulated in Transcription
  misc_feature: MA Experiment 20000477 PARAMETER Experiment Name: Zm_5mM_SA_P Parameter: Age (day) Value: 10
  misc_feature: MA Experiment 20000477 PARAMETER Experiment Name: Zm_5mM_SA_P Parameter: Organism Value: Zea mays
  misc_feature: MA Experiment 20000477 PARAMETER Experiment Name: Zm_5mM_SA_P Parameter: Plant Line Value: 35A19
  misc_feature: MA Experiment 20000477 PARAMETER Experiment Name: Zm_5mM_SA_P Parameter: Timepoint (hr) Value: 48
  misc_feature: MA Experiment 20000477 PARAMETER Experiment Name: Zm_5mM_SA_P Parameter: Tissue Value: Aerial
  misc_feature: MA Experiment 20000477 PARAMETER Experiment Name: Zm_5mM_SA_P Parameter: Treatment Value: 5mM SA vs. No Treatment
  misc_feature: MA Experiment ID: 20000492 Result: Down-regulated in Transcription
  misc_feature: MA Experiment 20000492 PARAMETER Experiment Name: Zm_Hybrid_Seed_Dev_P Parameter: DAP Value: 12
  misc_feature: MA Experiment 20000492 PARAMETER Experiment Name: Zm_Hybrid_Seed_Dev_P Parameter: Organism Value: Zea mays
  misc_feature: MA Experiment 20000492 PARAMETER Experiment Name: Zm_Hybrid_Seed_Dev_P Parameter: Plant Line Value: 35A19
  misc_feature: MA Experiment 20000492 PARAMETER Experiment Name: Zm_Hybrid_Seed_Dev_P Parameter: Tissue Value: Fert Kernel vs. Unfert Floret
aactagtgcattttaaatcccaagacgtctctcactcttcagccgctttacaactccccaccccatcccatccacacacacttcacccagcgcggcggccgccggccgccggcaatggaggccgtggcgcacagcggcgactacctttggcggttcgtggcggagacagagtggtacaacgaggttgtcctcagcgccgtggcgccaggcgactggtggcgcggcctgccgcacccggtgcagtcatggatgcgcaactgcgtcggcggttacctcctctatttcatctctggtttcctctggtgcttcgtcatctactactggaagcgccacgcctacatccccaaagatgccatccccacaaatgacgctatgaagaagcaaatagttgtagcatcgaaggctatgcctttttactgcgctcttccaactttatctgaatatatgattgagagcggatggactcagtgctacttcaatatcagcgaaattggtttttctatgtacctctgttatatggctatgtatctcatctttgtggagtttggaatttactggatgcacagggagttgcatgacataaaaccattatacaaatatctgcatgcaacccaccatatttacaacaaggagaataccttgtctccatttgctggacttgcatttcatccactggatggtattctgcaagcaataccacatgtgttcgcgctcttcctctttccaacgcacttcaggacacatattgcactcttgttcctagaggctgtgtggacaacaaacatccacgactgcattcatggcaagatatggccagtcatgggtgctggatatcacaccattcaccatacgacttaccgtcacaactatggccactacaccatctggatggactggatgtttggtacgctcaatgagccagaagatatcctcaagaaggcttgagtttctcggagctgtggtattcctatggtgctgctgctggaactgctcgatctgttcccagtgtttctaatccgttgagcctgttcagcactgtctgtttatgtaggcatcagtgtgttaattactttgctaggttcatatggctttgtgcttattctgtaatttagcgatgtttgtctcatgacgcaacggagttcaggacgaataaaactttgctagacacattctggattccagttgcttgtacaatgttggaactcaactgtcaatataggatgtaaaacggattccttcg

SEQ ID NO: 12116 - protein, 276 aa, Zea mays subsp. mays; identical to SEQ ID NO: 6861
  peptide (1)..(276): Ceres Seq. ID no. 12350927
  misc_feature (4)..(269): Homolog of NCBI NO: 15232935 NR Description: sterol-C5-desaturase; protein id: At3g02580.1,
  misc_feature (4)..(269): Homolog of NCBI NO: 21594971 NR Description: sterol-C5-desaturase [Arabidopsis thaliana]
  misc_feature (4)..(269): Homolog of NCBI NO: 2129741 NR Description: C-5 sterol desaturase (EC 1.-.-.-) - Arabidopsis
  misc_feature (5)..(269): Homolog of NCBI NO: 15232937 NR Description: putative sterol-C5-desaturase; protein id:
  misc_feature (50)..(269): Homolog of NCBI NO: 25742651 NR Description: sterol-C5-desaturase (fungal ERG3,
  misc_feature (8)..(180): Homolog of NCBI NO: 34895618 NR Description: putative sterol-C5(6)-desaturase [Oryza sativa
  misc_feature (215)..(275): Homolog of NCBI NO: 34895618 NR Description: putative sterol-C5(6)-desaturase [Oryza sativa
  misc_feature (9)..(275): Homolog of NCBI NO: 4426627 NR Description: sterol-C5(6)-desaturase homolog [Nicotiana
  misc_feature (9)..(275): Homolog of NCBI NO: 33301670 NR Description: Delta-7-sterol-C5(6)-desaturase (Delta-7-C-5
  misc_feature (4)..(269): Homolog of NCBI NO: 5031219 NR Description: delta7 sterol C-5 desaturase [Arabidopsis

SEQ ID NO: 12117 - protein, 231 aa, Zea mays subsp. mays; identical to SEQ ID NO: 6862
  peptide (1)..(231): Ceres Seq. ID no. 12350928
  misc_feature (1)..(135): Homolog of NCBI NO: 34895618 NR Description: putative sterol-C5(6)-desaturase [Oryza sativa
  misc_feature (170)..(230): Homolog of NCBI NO: 34895618 NR Description: putative sterol-C5(6)-desaturase [Oryza sativa
  misc_feature (1)..(230): Homolog of NCBI NO: 4426627 NR Description: sterol-C5(6)-desaturase homolog [Nicotiana
  misc_feature (1)..(230): Homolog of NCBI NO: 33301670 NR Description: Delta-7-sterol-C5(6)-desaturase (Delta-7-C-5
  misc_feature (1)..(224): Homolog of NCBI NO: 5031219 NR Description: delta7 sterol C-5 desaturase [Arabidopsis
  misc_feature (1)..(224): Homolog of NCBI NO: 15232935 NR Description: sterol-C5-desaturase; protein id: At3g02580.1,
  misc_feature (1)..(224): Homolog of NCBI NO: 21594971 NR Description: sterol-C5-desaturase [Arabidopsis thaliana]
  misc_feature (1)..(224): Homolog of NCBI NO: 2129741 NR Description: C-5 sterol desaturase (EC 1.-.-.-) - Arabidopsis
  misc_feature (1)..(224): Homolog of NCBI NO: 15232937 NR Description: putative sterol-C5-desaturase; protein id:
  misc_feature (5)..(224): Homolog of NCBI NO: 25742651 NR Description: sterol-C5-desaturase (fungal ERG3,

SEQ ID NO: 12118 - protein, 190 aa, Zea mays subsp. mays
  peptide (1)..(190): Ceres Seq. ID no. 12350929
  misc_feature (1)..(94): Homolog of NCBI NO: 34895618 NR Description: putative sterol-C5(6)-desaturase [Oryza sativa
  misc_feature (129)..(189): Homolog of NCBI NO: 34895618 NR Description: putative sterol-C5(6)-desaturase [Oryza sativa
  misc_feature (1)..(189): Homolog of NCBI NO: 4426627 NR Description: sterol-C5(6)-desaturase homolog [Nicotiana
  misc_feature (1)..(189): Homolog of NCBI NO: 33301670 NR Description: Delta-7-sterol-C5(6)-desaturase (Delta-7-C-5
  misc_feature (1)..(183): Homolog of NCBI NO: 5031219 NR Description: delta7 sterol C-5 desaturase [Arabidopsis
  misc_feature (1)..(183): Homolog of NCBI NO: 15232935 NR Description: sterol-C5-desaturase; protein id: At3g02580.1,
  misc_feature (1)..(183): Homolog of NCBI NO: 21594971 NR Description: sterol-C5-desaturase [Arabidopsis thaliana]
  misc_feature (1)..(183): Homolog of NCBI NO: 2129741 NR Description: C-5 sterol desaturase (EC 1.-.-.-) - Arabidopsis
  misc_feature (1)..(183): Homolog of NCBI NO: 15232937 NR Description: putative sterol-C5-desaturase; protein id:
  misc_feature (1)..(183): Homolog of NCBI NO: 25742651 NR Description: sterol-C5-desaturase (fungal ERG3,
MKKQIVVASKAMPFYCALPTLSEYMIESGWTQCYFNISEIGFSMYLCYMAMYLIFVEFGIYWMHRELHDIKPLYKYLHATHHIYNKENTLSPFAGLAFHPLDGILQAIPHVFALFLFPTHFRTHIALLFLEAVWTTNIHDCIHGKIWPVMGAGYHTIHHTTYRHNYGHYTIWMDWMFGTLNEPEDILKKA

SEQ ID NO: 12119 - DNA, 1231 bp, Zea mays subsp. mays
  misc_feature (1)..(1231): Ceres Seq. ID no. 13494457
  misc_feature: MA Experiment ID: 20000492 Result: Up-regulated in Transcription
  misc_feature: MA Experiment 20000492 PARAMETER Experiment Name: Zm_Hybrid_Seed_Dev_P Parameter: DAP Value: 12
  misc_feature: MA Experiment 20000492 PARAMETER Experiment Name: Zm_Hybrid_Seed_Dev_P Parameter: Organism Value: Zea mays
  misc_feature: MA Experiment 20000492 PARAMETER Experiment Name: Zm_Hybrid_Seed_Dev_P Parameter: Plant Line Value: 35A19
  misc_feature: MA Experiment 20000492 PARAMETER Experiment Name: Zm_Hybrid_Seed_Dev_P Parameter: Tissue Value: Fert Kernel vs. Unfert Floret
  misc_feature: Phenotype: ROSETTE LEAVES Curled-Curled 3
  misc_feature: Phenotype: ROSETTE LEAVES Curled-Curled 5
  misc_feature: Phenotype: ROSETTE LEAVES Curled-Curled 3
  misc_feature: Phenotype: ROSETTE LEAVES Curled-Curled 4
  misc_feature: Phenotype: ROSETTE LEAVES Curled-Curled 3
  misc_feature: Phenotype: ROSETTE LEAVES Curled-Curled 5
ctcacatcctctttcagttccctctctggatctcttcctgaagagaggcactactgccacaccaccacgccacccatgctcaacatgatgaccgatctgagctgcgggccgtcgtccaaggcggcgaaaggagggcagccggcagcgacgacgggctccggcggcgacaggcaggggaggggcaagatcgagatcaagcgcatcgagaacacgacgaaccggcaggtcaccttctgcaagcgccgcaacggcctgctcaagaaggcgtacgagctctcggtgctctgcgacgccgaggtcgcgctcgtcgtcttctccagccgcggccgcctctacgagtacgccaacaacagtgtgaagtccaccattgagaggtacaagaaggccaacagtgacacctccaactctggcacagttgcagaagtcaatgctcagcactaccagcaggagtcctccaagctgcgccaggcgatcgatagcttgcaaaacgcaaacaggaccatagtgggagattcaatccacaccatgggcctcagggagcttaagcagatggagggcaagctggagaaggccataaacaagattagagctagaaagaatgagctcttgtatgctgaagttgaatatatgcaaaaaagggagatggatctgcagactgacaacatgtacctgaggagcaagatcgccgagaataatgaaacggggcagccaccgatgaacatgattggattgccgtcgacgagcgagtacgatcacatggccccgtttgttgactcgagaaactttcttcaggtgaacatgcagcagcagcctcagcactactcccatctatcagctgcaaccaacgaccctccaactcggatgatgaaattaagaatcttcggccaacaatccatgcacgcaagcacgcagtaaatcatgtgtccaattcagataaaaaaatctactctagcgtttgtataattattaataatcgtgactagtaaactgttatatatatagccatgtgtgtgtggcgcctacatatatgtcatgtggctgtacggcgagtttttctttttcacaagcgtttgcagcagcatttggtgttgctcatcgatcaattaatcgcaagaaattaaacttgtcaccactgtgtgtgcattatttgtacgtgttaatgcagttgttgtatctgttaattgtaccctccatcagataaacgcgggtgcgcgtatgcatatttatgtgt

SEQ ID NO: 12120 - protein, 304 aa, Zea mays subsp. mays
  peptide (1)..(304): Ceres Seq. ID no. 13494458
  misc_feature (131)..(230): Pfam Name: K-box region Pfam Description: K-box region
  misc_feature (1)..(304): Homolog of NCBI NO: 29372756 NR Description: m23 [Zea mays]
  misc_feature (25)..(276): Homolog of NCBI NO: 29372746 NR Description: putative MADS-domain transcription factor [Zea
  misc_feature (26)..(276): Homolog of NCBI NO: 7446524 NR Description: hypothetical protein - maize
  misc_feature (59)..(276): Homolog of NCBI NO: 2130078 NR Description: MADS-box protein 3 - rice
  misc_feature (59)..(276): Homolog of NCBI NO: 34903684 NR Description: putative MADS-box protein [Oryza sativa (japonica
  misc_feature (71)..(276): Homolog of NCBI NO: 1006768 NR Description: ZMM2 [Zea mays]
  misc_feature (59)..(275): Homolog of NCBI NO: 19698536 NR Description: AGAMOUS-like protein 1 HvAG1 [Hordeum vulgare
  misc_feature (40)..(275): Homolog of NCBI NO: 24636577 NR Description: MADS box transcription factor [Triticum aestivum]
  misc_feature (59)..(275): Homolog of NCBI NO: 19698538 NR Description: AGAMOUS-like protein 2 HvAG2 [Hordeum vulgare
  misc_feature (56)..(276): Homolog of NCBI NO: 18650789 NR Description: MADS-box transcription factor [Phalaenopsis
LTSSFSSLSGSLPEERHYCHTTTPPMLNMMTDLSCGPSSKAAKGGQPAATTGSGGDRQGRGKIEIKRIENTTNRQVTFCKRRNGLLKKAYELSVLCDAEVALVVFSSRGRLYEYANNSVKSTIERYKKANSDTSNSGTVAEVNAQHYQQESSKLRQAIDSLQNANRTIVGDSIHTMGLRELKQMEGKLEKAINKIRARKNELLYAEVEYMQKREMDLQTDNMYLRSKIAENNETGQPPMNMIGLPSTSEYDHMAPFVDSRNFLQVNMQQQPQHYSHLSAATNDPPTRMMKLRIFGQQSMHASTQ

SEQ ID NO: 12121 - protein, 279 aa, Zea mays subsp. mays
  peptide (1)..(279): Ceres Seq. ID no. 13494459
  misc_feature (106)..(205): Pfam Name: K-box region Pfam Description: K-box region
  misc_feature (1)..(279): Homolog of NCBI NO: 29372756 NR Description: m23 [Zea mays]
  misc_feature (1)..(251): Homolog of NCBI NO: 29372746 NR Description: putative MADS-domain transcription factor [Zea
  misc_feature (1)..(251): Homolog of NCBI NO: 7446524 NR Description: hypothetical protein - maize
  misc_feature (34)..(251): Homolog of NCBI NO: 2130078 NR Description: MADS-box protein 3 - rice
  misc_feature (34)..(251): Homolog of NCBI NO: 34903684 NR Description: putative MADS-box protein [Oryza sativa (japonica
  misc_feature (46)..(251): Homolog of NCBI NO: 1006768 NR Description: ZMM2 [Zea mays]
  misc_feature (34)..(250): Homolog of NCBI NO: 19698536 NR Description: AGAMOUS-like protein 1 HvAG1 [Hordeum vulgare
  misc_feature (15)..(250): Homolog of NCBI NO: 24636577 NR Description: MADS box transcription factor [Triticum aestivum]
  misc_feature (34)..(250): Homolog of NCBI NO: 19698538 NR Description: AGAMOUS-like protein 2 HvAG2 [Hordeum vulgare
  misc_feature (31)..(251): Homolog of NCBI NO: 18650789 NR Description: MADS-box transcription factor [Phalaenopsis
MLNMMTDLSCGPSSKAAKGGQPAATTGSGGDRQGRGKIEIKRIENTTNRQVTFCKRRNGLLKKAYELSVLCDAEVALVVFSSRGRLYEYANNSVKSTIERYKKANSDTSNSGTVAEVNAQHYQQESSKLRQAIDSLQNANRTIVGDSIHTMGLRELKQMEGKLEKAINKIRARKNELLYAEVEYMQKREMDLQTDNMYLRSKIAENNETGQPPMNMIGLPSTSEYDHMAPFVDSRNFLQVNMQQQPQHYSHLSAATNDPPTRMMKLRIFGQQSMHASTQ

SEQ ID NO: 12122 - protein, 276 aa, Zea mays subsp. mays
  peptide (1)..(276): Ceres Seq. ID no. 13494460
  misc_feature (103)..(202): Pfam Name: K-box region Pfam Description: K-box region
  misc_feature (1)..(276): Homolog of NCBI NO: 29372756 NR Description: m23 [Zea mays]
  misc_feature (1)..(248): Homolog of NCBI NO: 29372746 NR Description: putative MADS-domain transcription factor [Zea
  misc_feature (1)..(248): Homolog of NCBI NO: 7446524 NR Description: hypothetical protein - maize
  misc_feature (31)..(248): Homolog of NCBI NO: 2130078 NR Description: MADS-box protein 3 - rice
  misc_feature (31)..(248): Homolog of NCBI NO: 34903684 NR Description: putative MADS-box protein [Oryza sativa (japonica
  misc_feature (43)..(248): Homolog of NCBI NO: 1006768 NR Description: ZMM2 [Zea mays]
  misc_feature (31)..(247): Homolog of NCBI NO: 19698536 NR Description: AGAMOUS-like protein 1 HvAG1 [Hordeum vulgare
  misc_feature (12)..(247): Homolog of NCBI NO: 24636577 NR Description: MADS box transcription factor [Triticum aestivum]
  misc_feature (31)..(247): Homolog of NCBI NO: 19698538 NR Description: AGAMOUS-like protein 2 HvAG2 [Hordeum vulgare
  misc_feature (28)..(248): Homolog of NCBI NO: 18650789 NR Description: MADS-box transcription factor [Phalaenopsis
MMTDLSCGPSSKAAKGGQPAATTGSGGDRQGRGKIEIKRIENTTNRQVTFCKRRNGLLKKAYELSVLCDAEVALVVFSSRGRLYEYANNSVKSTIERYKKANSDTSNSGTVAEVNAQHYQQESSKLRQAIDSLQNANRTIVGDSIHTMGLRELKQMEGKLEKAINKIRARKNELLYAEVEYMQKREMDLQTDNMYLRSKIAENNETGQPPMNMIGLPSTSEYDHMAPFVDSRNFLQVNMQQQPQHYSHLSAATNDPPTRMMKLRIFGQQSMHASTQ

SEQ ID NO: 12123 - DNA, 1316 bp, Zea mays subsp. mays; identical to SEQ ID NO: 4106
  misc_feature (1)..(1316): Ceres Seq. ID no. 12358113
  misc_feature: MA Experiment ID: 108523 Result: Up-regulated in Transcription
  misc_feature: MA Experiment 108523 PARAMETER Experiment Name: Zm_42deg_Heat_P Parameter: Age (day) Value: 8
  misc_feature: MA Experiment 108523 PARAMETER Experiment Name: Zm_42deg_Heat_P Parameter: Organism Value: Zea mays
  misc_feature: MA Experiment 108523 PARAMETER Experiment Name: Zm_42deg_Heat_P Parameter: Plant Line Value: 35A19
  misc_feature: MA Experiment 108523 PARAMETER Experiment Name: Zm_42deg_Heat_P Parameter: Temperature (deg C) Value: 42 vs. 22
  misc_feature: MA Experiment 108523 PARAMETER Experiment Name: Zm_42deg_Heat_P Parameter: Timepoint (hr) Value: 6
  misc_feature: MA Experiment 108523 PARAMETER Experiment Name: Zm_42deg_Heat_P Parameter: Tissue Value: Aerial
  misc_feature: MA Experiment ID: 108527 Result: Up-regulated in Transcription
  misc_feature: MA Experiment 108527 PARAMETER Experiment Name: Zm_5mM_NO_P Parameter: Age (day) Value: 8
  misc_feature: MA Experiment 108527 PARAMETER Experiment Name: Zm_5mM_NO_P Parameter: Organism Value: Zea mays
  misc_feature: MA Experiment 108527 PARAMETER Experiment Name: Zm_5mM_NO_P Parameter: Plant Line Value: 35A19
  misc_feature: MA Experiment 108527 PARAMETER Experiment Name: Zm_5mM_NO_P Parameter: Timepoint (hr) Value: 6
  misc_feature: MA Experiment 108527 PARAMETER Experiment Name: Zm_5mM_NO_P Parameter: Tissue Value: Aerial
  misc_feature: MA Experiment 108527 PARAMETER Experiment Name: Zm_5mM_NO_P Parameter: Treatment Value: 5mM NO vs. No Treatment
  misc_feature: MA Experiment ID: 108530 Result: Up-regulated in Transcription
  misc_feature: MA Experiment 108530 PARAMETER Experiment Name: Zm_Imbibed_Seeds_P Parameter: Age (day) Value: 6 vs. 2
  misc_feature: MA Experiment 108530 PARAMETER Experiment Name: Zm_Imbibed_Seeds_P Parameter: Organism Value: Zea mays
  misc_feature: MA Experiment 108530 PARAMETER Experiment Name: Zm_Imbibed_Seeds_P Parameter: Plant Line Value: 35A19
  misc_feature: MA Experiment 108530 PARAMETER Experiment Name: Zm_Imbibed_Seeds_P Parameter: Tissue Value: Aerial vs. Embryo
  misc_feature: MA Experiment ID: 108534 Result: Down-regulated in Transcription
  misc_feature: MA Experiment 108534 PARAMETER Experiment Name: Zm_4deg_Cold_P Parameter: Age (hr) Value: 8
  misc_feature: MA Experiment 108534 PARAMETER Experiment Name: Zm_4deg_Cold_P Parameter: Organism Value: Zea mays
  misc_feature: MA Experiment 108534 PARAMETER Experiment Name: Zm_4deg_Cold_P Parameter: Plant Line Value: 35A19
  misc_feature: MA Experiment 108534 PARAMETER Experiment Name: Zm_4deg_Cold_P Parameter: Temperature (deg C) Value: 4 vs. 22
  misc_feature: MA Experiment 108534 PARAMETER Experiment Name: Zm_4deg_Cold_P Parameter: Timepoint (hr) Value: 6
  misc_feature: MA Experiment 108534 PARAMETER Experiment Name: Zm_4deg_Cold_P Parameter: Tissue Value: Aerial
  misc_feature: MA Experiment ID: 108535 Result: Down-regulated in Transcription
  misc_feature: MA Experiment 108535 PARAMETER Experiment Name: Zm_Meristem_P Parameter: Age (day) Value: 8
  misc_feature: MA Experiment 108535 PARAMETER Experiment Name: Zm_Meristem_P Parameter: Organism Value: Zea mays
  misc_feature: MA Experiment 108535 PARAMETER Experiment Name: Zm_Meristem_P Parameter: Plant Line Value: 35A19
  misc_feature: MA Experiment 108535 PARAMETER Experiment Name: Zm_Meristem_P Parameter: Tissue Value: Root Meristem vs. Above Root Meristem
  misc_feature: MA Experiment ID: 108536 Result: Up-regulated in Transcription
  misc_feature: MA Experiment 108536 PARAMETER Experiment Name: Zm_Meristem_P Parameter: Age (day) Value: 8
  misc_feature: MA Experiment 108536 PARAMETER Experiment Name: Zm_Meristem_P Parameter: Organism Value: Zea mays
  misc_feature: MA Experiment 108536 PARAMETER Experiment Name: Zm_Meristem_P Parameter: Plant Line Value: 35A19
  misc_feature: MA Experiment 108536 PARAMETER Experiment Name: Zm_Meristem_P Parameter: Tissue Value: Shoot Meristem vs. Above Shoot Meristem
  misc_feature: MA Experiment ID: 20000108 Result: Down-regulated in Transcription
  misc_feature: MA Experiment 20000108 PARAMETER Experiment Name: Zm_Root-Tips_P Parameter: Age (day) Value: 12
  misc_feature: MA Experiment 20000108 PARAMETER Experiment Name: Zm_Root-Tips_P Parameter: Organism Value: Zea mays
  misc_feature: MA Experiment 20000108 PARAMETER Experiment Name: Zm_Root-Tips_P Parameter: Tissue Value: Root tips vs. Root mid region    35
  misc_feature: MA Experiment 20000108 PARAMETER Experiment Name: Zm_Root-Tips_P Parameter: Tissue Value: Root tips vs. Root mid region   Sequence Listing-Misc Features (4)
  misc_feature: MA Experiment ID: 20000477 Result: Up-regulated in Transcription
  misc_feature: MA Experiment 20000477 PARAMETER Experiment Name: Zm_5mM_SA_P Parameter: Age (day) Value: 10
  misc_feature: MA Experiment 20000477 PARAMETER Experiment Name: Zm_5mM_SA_P Parameter: Organism Value: Zea mays
  misc_feature: MA Experiment 20000477 PARAMETER Experiment Name: Zm_5mM_SA_P Parameter: Plant Line Value: 35A19
  misc_feature: MA Experiment 20000477 PARAMETER Experiment Name: Zm_5mM_SA_P Parameter: Timepoint (hr) Value: 48
  misc_feature: MA Experiment 20000477 PARAMETER Experiment Name: Zm_5mM_SA_P Parameter: Tissue Value: Aerial
  misc_feature: MA Experiment 20000477 PARAMETER Experiment Name: Zm_5mM_SA_P Parameter: Treatment Value: 5mM SA vs. No Treatment
  misc_feature: MA Experiment ID: 20000478 Result: Up-regulated in Transcription
  misc_feature: MA Experiment 20000478 PARAMETER Experiment Name: Zm_5mM_SA_P Parameter: Age (day) Value: 11
  misc_feature: MA Experiment 20000478 PARAMETER Experiment Name: Zm_5mM_SA_P Parameter: Organism Value: Zea mays
  misc_feature: MA Experiment 20000478 PARAMETER Experiment Name: Zm_5mM_SA_P Parameter: Plant Line Value: 35A19
  misc_feature: MA Experiment 20000478 PARAMETER Experiment Name: Zm_5mM_SA_P Parameter: Timepoint (hr) Value: 72
  misc_feature: MA Experiment 20000478 PARAMETER Experiment Name: Zm_5mM_SA_P Parameter: Tissue Value: Aerial
  misc_feature: MA Experiment 20000478 PARAMETER Experiment Name: Zm_5mM_SA_P Parameter: Treatment Value: 5mM SA vs. No Treatment
  misc_feature: MA Experiment ID: 20000479 Result: Up-regulated in Transcription
  misc_feature: MA Experiment 20000479 PARAMETER Experiment Name: Zm_Drought_P Parameter: Age (day) Value: 10
  misc_feature: MA Experiment 20000479 PARAMETER Experiment Name: Zm_Drought_P Parameter: Organism Value: Zea mays
  misc_feature: MA Experiment 20000479 PARAMETER Experiment Name: Zm_Drought_P Parameter: Plant Line Value: 35A19
  misc_feature: MA Experiment 20000479 PARAMETER Experiment Name: Zm_Drought_P Parameter: Timepoint (hr) Value: 48
  misc_feature: MA Experiment 20000479 PARAMETER Experiment Name: Zm_Drought_P Parameter: Tissue Value: Aerial
  misc_feature: MA Experiment 20000479 PARAMETER Experiment Name: Zm_Drought_P Parameter: Treatment Value: Drought vs. No Drought
  misc_feature: MA Experiment ID: 20000480 Result: Up-regulated in Transcription
  misc_feature: MA Experiment 20000480 PARAMETER Experiment Name: Zm_Drought_P Parameter: Age (day) Value: 11
  misc_feature: MA Experiment 20000480 PARAMETER Experiment Name: Zm_Drought_P Parameter: Organism Value: Zea mays
  misc_feature: MA Experiment 20000480 PARAMETER Experiment Name: Zm_Drought_P Parameter: Plant Line Value: 35A19
  misc_feature: MA Experiment 20000480 PARAMETER Experiment Name: Zm_Drought_P Parameter: Timepoint (hr) Value: 72
  misc_feature: MA Experiment 20000480 PARAMETER Experiment Name: Zm_Drought_P Parameter: Tissue Value: Aerial
  misc_feature: MA Experiment 20000480 PARAMETER Experiment Name: Zm_Drought_P Parameter: Treatment Value: Drought vs. No Drought
  misc_feature: MA Experiment ID: 20000535 Result: Down-regulated in Transcription
  misc_feature: MA Experiment 20000535 PARAMETER Experiment Name: Zm_Hybrid_Seed_Dev_P Parameter: DAP Value: 30 vs. 12
  misc_feature: MA Experiment 20000535 PARAMETER Experiment Name: Zm_Hybrid_Seed_Dev_P Parameter: Organism Value: Zea mays
  misc_feature: MA Experiment 20000535 PARAMETER Experiment Name: Zm_Hybrid_Seed_Dev_P Parameter: Plant Line Value: 35A19
  misc_feature: MA Experiment 20000535 PARAMETER Experiment Name: Zm_Hybrid_Seed_Dev_P Parameter: Tissue Value: Embryo vs. Unfert Floret

SEQ ID NO: 12124 - protein, 371 aa, Zea mays subsp. mays; identical to SEQ ID NO: 4107
  peptide (1)..(371): Ceres Seq. ID no. 12358114
  misc_feature (70)..(317): Pfam Name: Peroxidase Pfam Description: Peroxidase
  misc_feature (35)..(354): Homolog of NCBI NO: 19698448 NR Description: gaiacol peroxidase [Gossypium hirsutum]
  misc_feature (34)..(354): Homolog of NCBI NO: 15227200 NR Description: putative peroxidase; protein id: At2g22420.1, by cDNA: 113695. [Arabidopsis thaliana] Peroxidase 17 precursor (Atperox P17) (ATP25a)
  misc_feature (34)..(352): Homolog of NCBI NO: 15234394 NR Description: peroxidase, putative; protein id: At4g36430.1, by cDNA: gi_17530561, supported by cDNA: gi_18377685 [Arabidopsis
  misc_feature (57)..(353): Homolog of NCBI NO: 15224116 NR Description: peroxidase, putative; protein id: At2g18150.1, by cDNA: 126030., supported by cDNA: gi_19698902 [Arabidopsis >gi|25453215|sp|Q9SI16|PE15_ARATH Peroxidase 15 precursor
  misc_feature (57)..(353): Homolog of NCBI NO: 21537275 NR Description: putative peroxidase [Arabidopsis thaliana]
  misc_feature (36)..(352): Homolog of NCBI NO: 1403134 NR Description: peroxidase [Arabidopsis thaliana]
  misc_feature (36)..(352): Homolog of NCBI NO: 21593604 NR Description: peroxidase ATP N [Arabidopsis thaliana]
  misc_feature (36)..(352): Homolog of NCBI NO: 18420061 NR Description: peroxidase, putative; protein id: At5g19890.1, by cDNA: 40493. [Arabidopsis thaliana] Peroxidase 59 precursor (Atperox P59) (Peroxidase N) (ATPN)
  misc_feature (52)..(353): Homolog of NCBI NO: 15224114 NR Description: peroxidase, putative; protein id: At2g18140.1 thaliana] >gi|25453216|sp|Q9SI17|PE14_ARATH Peroxidase 14 (Atperox P14) >gi|25285614|pir||G84560 probable peroxidase
  misc_feature (53)..(352): Homolog of NCBI NO: 7245406 NR Description: Chain A, Arabidopsis Thaliana Peroxidase N

SEQ ID NO: 12125 - protein, 347 aa, Zea mays subsp. mays; identical to SEQ ID NO: 4108
  peptide (1)..(347): Ceres Seq. ID no. 12358115
  misc_feature (46)..(293): Pfam Name: Peroxidase Pfam Description: Peroxidase
  misc_feature (11)..(330): Homolog of NCBI NO: 19698448 NR Description: gaiacol peroxidase [Gossypium hirsutum]
  misc_feature (10)..(330): Homolog of NCBI NO: 15227200 NR Description: putative peroxidase; protein id: At2g22420.1, by cDNA: 113695. [Arabidopsis thaliana] Peroxidase 17 precursor (Atperox P17) (ATP25a)
  misc_feature (10)..(328): Homolog of NCBI NO: 15234394 NR Description: peroxidase, putative; protein id: At4g36430.1, by cDNA: gi_17530561, supported by cDNA: gi_18377685 [Arabidopsis
  misc_feature (33)..(329): Homolog of NCBI NO: 15224116 NR Description: peroxidase, putative; protein id: At2g18150.1, by cDNA: 126030., supported by cDNA: gi_19698902 [Arabidopsis >gi|25453215|sp|Q9SI16|PE15_ARATH Peroxidase 15 precursor
  misc_feature (33)..(329): Homolog of NCBI NO: 21537275 NR Description: putative peroxidase [Arabidopsis thaliana]
  misc_feature (12)..(328): Homolog of NCBI NO: 1403134 NR Description: peroxidase [Arabidopsis thaliana]
  misc_feature (12)..(328): Homolog of NCBI NO: 21593604 NR Description: peroxidase ATP N [Arabidopsis thaliana]
  misc_feature (12)..(328): Homolog of NCBI NO: 18420061 NR Description: peroxidase, putative; protein id: At5g19890.1, by cDNA: 40493. [Arabidopsis thaliana] Peroxidase 59 precursor (Atperox P59) (Peroxidase N) (ATPN)
  misc_feature (28)..(329): Homolog of NCBI NO: 15224114 NR Description: peroxidase, putative; protein id: At2g18140.1 thaliana] >gi|25453216|sp|Q9SI17|PE14_ARATH Peroxidase 14 (Atperox P14) >gi|25285614|pir||G84560 probable peroxidase
  misc_feature (29)..(328): Homolog of NCBI NO: 7245406 NR Description: Chain A, Arabidopsis Thaliana Peroxidase N

SEQ ID NO: 12126 - protein, 298 aa, Zea mays subsp. mays; identical to SEQ ID NO: 4109
  peptide (1)..(298): Ceres Seq. ID no. 12358116
  misc_feature (1)..(244): Pfam Name: Peroxidase Pfam Description: Peroxidase
  misc_feature (1)..(281): Homolog of NCBI NO: 19698448 NR Description: gaiacol peroxidase [Gossypium hirsutum]
  misc_feature (1)..(281): Homolog of NCBI NO: 15227200 NR Description: putative peroxidase; protein id: At2g22420.1, by cDNA: 113695. [Arabidopsis thaliana] Peroxidase 17 precursor (Atperox P17) (ATP25a)
  misc_feature (1)..(279): Homolog of NCBI NO: 15234394 NR Description: peroxidase, putative; protein id: At4g36430.1, by cDNA: gi_17530561, supported by cDNA: gi_18377685 [Arabidopsis
  misc_feature (1)..(280): Homolog of NCBI NO: 15224116 NR Description: peroxidase, putative; protein id: At2g18150.1, by cDNA: 126030., supported by cDNA: gi_19698902 [Arabidopsis >gi|25453215|sp|Q9SI16|PE15_ARATH Peroxidase 15 precursor
  misc_feature (1)..(280): Homolog of NCBI NO: 21537275 NR Description: putative peroxidase [Arabidopsis thaliana]
  misc_feature (1)..(279): Homolog of NCBI NO: 1403134 NR Description: peroxidase [Arabidopsis thaliana]
  misc_feature (1)..(279): Homolog of NCBI NO: 21593604 NR Description: peroxidase ATP N [Arabidopsis thaliana]
  misc_feature (1)..(279): Homolog of NCBI NO: 18420061 NR Description: peroxidase, putative; protein id: At5g19890.1, by cDNA: 40493. [Arabidopsis thaliana] Peroxidase 59 precursor (Atperox P59) (Peroxidase N) (ATPN)
  misc_feature (1)..(280): Homolog of NCBI NO: 15224114 NR Description: peroxidase, putative; protein id: At2g18140.1 thaliana] >gi|25453216|sp|Q9SI17|PE14_ARATH Peroxidase 14 (Atperox P14) >gi|25285614|pir||G84560 probable peroxidase
  misc_feature (1)..(279): Homolog of NCBI NO: 7245406 NR Description: Chain A, Arabidopsis Thaliana Peroxidase N

SEQ ID NO: 12127 - DNA, 1655 bp, Zea mays subsp. mays
  misc_feature (1)..(1655): Ceres Seq. ID no. 12343676
  misc_feature: MA Experiment ID: 108535 Result: Up-regulated in Transcription
  misc_feature: MA Experiment 108535 PARAMETER Experiment Name: Zm_Meristem_P Parameter: Age (day) Value: 8
  misc_feature: MA Experiment 108535 PARAMETER Experiment Name: Zm_Meristem_P Parameter: Organism Value: Zea mays
  misc_feature: MA Experiment 108535 PARAMETER Experiment Name: Zm_Meristem_P Parameter: Plant Line Value: 35A19
  misc_feature: MA Experiment 108535 PARAMETER Experiment Name: Zm_Meristem_P Parameter: Tissue Value: Root Meristem vs. Above Root Meristem
aaataaaactgaaatagcgaggaagggacgggttcggcctctctgcccgaattcccgattgcgcctcctccgactccgagattccgtcagccatggacgggctcctgtcgaagctccgcagcctggacgcgtaccccaaggtgaacgaggacttctacagccgcaccctctccggcggcatcatcacgctcgtctcctctgctgtcatgctcctcctcttcgtctccgagctccgattatatctccatgcagttactgagacaacactaagggttgatacttcaaggggagaaacacttcgcataaattttgatgtcacctttccagcccttcaatgttctataattagcctggatgcaatggacatcagtggacaggagcacctagatgtgaaacatgatgtattcaagcagcgaattgatgcccatggcaatgttattgcgactaggcaagatgtagttggtgggatgaagatggaggcacctctacaacatcatggtggaaggcttgaacacaatgaaacctattgtggctcttgttatggtgcacaagaatctgatgatcaatgttgtaacacatgtgaagatgttcgtgaagcctataggaaaaaaggttggggtgtatcgaatccagatttgcttgaccagtgcaaaagggagggctttcttcaaagtataaaggacgaagaaggcgaaggatgcaatatttatggttttattgaagttaataaggttgctgggaatttccattttgctccagggaaaagtttccagcagtcaaatgtgcacgttcatgacttgctcccgttccagaaggacagcttcaatgtcagtcataagataaacagactaagttttggagaatactttccaggtgttgttaatccacttgatggggcaaattgggtgcagcattcatcatatggaatgtatcaatacttcatcaaggttgttcctacagtctacacggacataaatgaacacattattctctctaatcagttctctgtaacggaacattttagaagtggtgagagtggtcggatgcaggctcttcctggtgtgttcttcttttatgacctttctccaatcaaggtcacattcacggaacaacatgtgtcatttttacactttttaactaatgtttgcgctattgttggaggtgtgttcaccgtttctggaatcatagattcgtttgtataccatagtcaaagagcaatcaagaagaagatggaaatcggcaaattcaactgatgttgccttactattgctgcaattaagtagctcctgttgcagctccaagatccagaaatgcaatgtggcttttcctcgaactcttggcacagttgcgtagttgacaaacaattgctcatcagataactcttgatgtgcttgccaacttgcttccggcaaagataccagcgagcaagatggtcatcttgtatacttcgatgttacatttttgtacgcttagtctgacaagaaaacattttacttcctccagctgcaggtgttcgtgtactgttgtaaatttgtggtagagggagcctatctgtagttttttttacaattatgtgtttgtaccagtttttctgagacatttgtagcttagacaggtaaaggttgtttgaaatacatataaaccatttttgaagc

SEQ ID NO: 12128 - protein, 386 aa, Zea mays subsp. mays
  peptide (1)..(386): Ceres Seq. ID no. 12343677
  misc_feature (1)..(386): Homolog of NCBI NO: 38347102 NR Description: OSJNBa0006M15.17 [Oryza sativa (japonica
  misc_feature (1)..(386): Homolog of NCBI NO: 30693281 NR Description: expressed protein [Arabidopsis thaliana]
  misc_feature (1)..(386): Homolog of NCBI NO: 18395087 NR Description: expressed protein; protein id: At1g22200.1, by cDNA: 16380., supported by cDNA: gi_13878150, supported by gi_21281041 [Arabidopsis thaliana] >gi|25350066|pir||F86354
  misc_feature (149)..(386): Homolog of NCBI NO: 6598578 NR Description: F5J5.4 [Arabidopsis thaliana]
  misc_feature (1)..(153): Homolog of NCBI NO: 6598578 NR Description: F5J5.4 [Arabidopsis thaliana]
  misc_feature (1)..(384): Homolog of NCBI NO: 28278376 NR Description: Similar to serologically defined breast cancer
  misc_feature (5)..(384): Homolog of NCBI NO: 7706278 NR Description: serologically defined breast cancer antigen 84;
  misc_feature (1)..(384): Homolog of NCBI NO: 34860248 NR Description: similar to serologically defined breast cancer
  misc_feature (5)..(384): Homolog of NCBI NO: 13384938 NR Description: serologically defined breast cancer antigen 84; segment, Chr 2, University of California at Los Angeles 1 [Mus >gi|12844094|dbj|BAB26233.1| unnamed protein product [Mus
  misc_feature (5)..(384): Homolog of NCBI NO: 22760064 NR Description: unnamed protein product [Homo sapiens]
MDGLLSKLRSLDAYPKVNEDFYSRTLSGGIITLVSSAVMLLLFVSELRLYLHAVTETTLRVDTSRGETLRINFDVTFPALQCSIISLDAMDISGQEHLDVKHDVFKQRIDAHGNVIATRQDVVGGMKMEAPLQHHGGRLEHNETYCGSCYGAQESDDQCCNTCEDVREAYRKKGWGVSNPDLLDQCKREGFLQSIKDEEGEGCNIYGFIEVNKVAGNFHFAPGKSFQQSNVHVHDLLPFQKDSFNVSHKINRLSFGEYFPGVVNPLDGANWVQHSSYGMYQYFIKVVPTVYTDINEHIILSNQFSVTEHFRSGESGRMQALPGVFFFYDLSPIKVTFTEQHVSFLHFLTNVCAIVGGVFTVSGIIDSFVYHSQRAIKKKMEIGKFN

SEQ ID NO: 12129 - protein, 348 aa, Zea mays subsp. mays
  peptide (1)..(348): Ceres Seq. ID no. 12343678
  misc_feature (1)..(348): Homolog of NCBI NO: 38347102 NR Description: OSJNBa0006M15.17 [Oryza sativa (japonica
  misc_feature (1)..(348): Homolog of NCBI NO: 30693281 NR Description: expressed protein [Arabidopsis thaliana]
  misc_feature (1)..(348): Homolog of NCBI NO: 18395087 NR Description: expressed protein; protein id: At1g22200.1, by cDNA: 16380., supported by cDNA: gi_13878150, supported by gi_21281041 [Arabidopsis thaliana] >gi|25350066|pir||F86354
  misc_feature (111)..(348): Homolog of NCBI NO: 6598578 NR Description: F5J5.4 [Arabidopsis thaliana]
  misc_feature (1)..(115): Homolog of NCBI NO: 6598578 NR Description: F5J5.4 [Arabidopsis thaliana]
  misc_feature (1)..(346): Homolog of NCBI NO: 28278376 NR Description: Similar to serologically defined breast cancer
  misc_feature (1)..(346): Homolog of NCBI NO: 7706278 NR Description: serologically defined breast cancer antigen 84;
  misc_feature (1)..(346): Homolog of NCBI NO: 34860248 NR Description: similar to serologically defined breast cancer
  misc_feature (1)..(346): Homolog of NCBI NO: 13384938 NR Description: serologically defined breast cancer antigen 84; segment, Chr 2, University of California at Los Angeles 1 [Mus >gi|12844094|dbj|BAB26233.1| unnamed protein product [Mus
  misc_feature (1)..(346): Homolog of NCBI NO: 22760064 NR Description: unnamed protein product [Homo sapiens]
MLLLFVSELRLYLHAVTETTLRVDTSRGETLRINFDVTFPALQCSIISLDAMDISGQEHLDVKHDVFKQRIDAHGNVIATRQDVVGGMKMEAPLQHHGGRLEHNETYCGSCYGAQESDDQCCNTCEDVREAYRKKGWGVSNPDLLDQCKREGFLQSIKDEEGEGCNIYGFIEVNKVAGNFHFAPGKSFQQSNVHVHDLLPFQKDSFNVSHKINRLSFGEYFPGVVNPLDGANWVQHSSYGMYQYFIKVVPTVYTDINEHIILSNQFSVTEHFRSGESGRMQALPGVFFFYDLSPIKVTFTEQHVSFLHFLTNVCAIVGGVFTVSGIIDSFVYHSQRAIKKKMEIGKFN

SEQ ID NO: 12130 - protein, 297 aa, Zea mays subsp. mays
  peptide (1)..(297): Ceres Seq. ID no. 12343679
  misc_feature (1)..(297): Homolog of NCBI NO: 38347102 NR Description: OSJNBa0006M15.17 [Oryza sativa (japonica
  misc_feature (1)..(297): Homolog of NCBI NO: 30693281 NR Description: expressed protein [Arabidopsis thaliana]
  misc_feature (1)..(297): Homolog of NCBI NO: 18395087 NR Description: expressed protein; protein id: At1g22200.1, by cDNA: 16380., supported by cDNA: gi_13878150, supported by gi_21281041 [Arabidopsis thaliana] >gi|25350066|pir||F86354
  misc_feature (60)..(297): Homolog of NCBI NO: 6598578 NR Description: F5J5.4 [Arabidopsis thaliana]
  misc_feature (1)..(64): Homolog of NCBI NO: 6598578 NR Description: F5J5.4 [Arabidopsis thaliana]
  misc_feature (1)..(295): Homolog of NCBI NO: 28278376 NR Description: Similar to serologically defined breast cancer
  misc_feature (1)..(295): Homolog of NCBI NO: 7706278 NR Description: serologically defined breast cancer antigen 84;
  misc_feature (1)..(295): Homolog of NCBI NO: 34860248 NR Description: similar to serologically defined breast cancer
  misc_feature (1)..(295): Homolog of NCBI NO: 13384938 NR Description: serologically defined breast cancer antigen 84; segment, Chr 2, University of California at Los Angeles 1 [Mus >gi|12844094|dbj|BAB26233.1| unnamed protein product [Mus
  misc_feature (1)..(295): Homolog of NCBI NO: 22760064 NR Description: unnamed protein product [Homo sapiens]
MDISGQEHLDVKHDVFKQRIDAHGNVIATRQDVVGGMKMEAPLQHHGGRLEHNETYCGSCYGAQESDDQCCNTCEDVREAYRKKGWGVSNPDLLDQCKREGFLQSIKDEEGEGCNIYGFIEVNKVAGNFHFAPGKSFQQSNVHVHDLLPFQKDSFNVSHKINRLSFGEYFPGVVNPLDGANWVQHSSYGMYQYFIKVVPTVYTDINEHIILSNQFSVTEHFRSGESGRMQALPGVFFFYDLSPIKVTFTEQHVSFLHFLTNVCAIVGGVFTVSGIIDSFVYHSQRAIKKKMEIGKFN

SEQ ID NO: 12131 - DNA, 1639 bp, Zea mays subsp. mays
  misc_feature (1)..(1639): Ceres Seq. ID no. 12367070
  misc_feature: MA Experiment ID: 108529 Result: Down-regulated in Transcription
  misc_feature: MA Experiment 108529 PARAMETER Experiment Name: Zm_Imbibed_Seeds_P Parameter: Age (day) Value: 5 vs. 2
  misc_feature: MA Experiment 108529 PARAMETER Experiment Name: Zm_Imbibed_Seeds_P Parameter: Organism Value: Zea mays
  misc_feature: MA Experiment 108529 PARAMETER Experiment Name: Zm_Imbibed_Seeds_P Parameter: Plant Line Value: 35A19
  misc_feature: MA Experiment 108529 PARAMETER Experiment Name: Zm_Imbibed_Seeds_P Parameter: Tissue Value: Roots vs. Embryo
  misc_feature: MA Experiment ID: 108543 Result: Up-regulated in Transcription
  misc_feature: MA Experiment ID: 108544 Result: Down-regulated in Transcription
  misc_feature: MA Experiment ID: 108546 Result: Down-regulated in Transcription
  misc_feature: MA Experiment 108546 PARAMETER Experiment Name: Zm_Imbibed_Seeds_P Parameter: Age (day) Value: 3 vs. 2
  misc_feature: MA Experiment 108546 PARAMETER Experiment Name: Zm_Imbibed_Seeds_P Parameter: Organism Value: Zea mays
  misc_feature: MA Experiment 108546 PARAMETER Experiment Name: Zm_Imbibed_Seeds_P Parameter: Plant Line Value: 35A19
  misc_feature: MA Experiment 108546 PARAMETER Experiment Name: Zm_Imbibed_Seeds_P Parameter: Tissue Value: Roots vs. Embryo
  misc_feature: MA Experiment ID: 108547 Result: Down-regulated in Transcription
  misc_feature: MA Experiment 108547 PARAMETER Experiment Name: Zm_Imbibed_Seeds_P Parameter: Age (day) Value: 4 vs. 2
  misc_feature: MA Experiment 108547 PARAMETER Experiment Name: Zm_Imbibed_Seeds_P Parameter: Organism Value: Zea mays
  misc_feature: MA Experiment 108547 PARAMETER Experiment Name: Zm_Imbibed_Seeds_P Parameter: Plant Line Value: 35A19
  misc_feature: MA Experiment 108547 PARAMETER Experiment Name: Zm_Imbibed_Seeds_P Parameter: Tissue Value: Aerial vs. Embryo
  misc_feature: MA Experiment ID: 108597 Result: Down-regulated in Transcription
  misc_feature: MA Experiment 108597 PARAMETER Experiment Name: Zm_100uM_ABA_P Parameter: Age (day) Value: 9
  misc_feature: MA Experiment 108597 PARAMETER Experiment Name: Zm_100uM_ABA_P Parameter: Organism Value: Zea mays
  misc_feature: MA Experiment 108597 PARAMETER Experiment Name: Zm_100uM_ABA_P Parameter: Plant Line Value: 35A19
  misc_feature: MA Experiment 108597 PARAMETER Experiment Name: Zm_100uM_ABA_P Parameter: Timepoint (hr) Value: 24
  misc_feature: MA Experiment 108597 PARAMETER Experiment Name: Zm_100uM_ABA_P Parameter: Tissue Value: Aerial
  misc_feature: MA Experiment 108597 PARAMETER Experiment Name: Zm_100uM_ABA_P Parameter: Treatment Value: 100uM ABA vs. No Treatment
  misc_feature: MA Experiment ID: 20000487 Result: Down-regulated in Transcription
  misc_feature: MA Experiment 20000487 PARAMETER Experiment Name: Zm_50mM_NH4NO3_L_to_H_P Parameter: Organism Value: Zea mays
  misc_feature: MA Experiment 20000487 PARAMETER Experiment Name: Zm_50mM_NH4NO3_L_to_H_P Parameter: Timepoint (hr) Value: 4
  misc_feature: MA Experiment 20000487 PARAMETER Experiment Name: Zm_50mM_NH4NO3_L_to_H_P Parameter: Tissue Value: Leaves
  misc_feature: MA Experiment 20000487 PARAMETER Experiment Name: Zm_50mM_NH4NO3_L_to_H_P Parameter: Treatment Value: 50mM NH4NO3 vs. 100mM Mannitol
gcacgagaccattacctagaacatcctaatcgaaaaaaagccactcgctgactcatctccatccacaacatcacatactcgctccaacagtcccacccacgctacctagacagtagacacgtgtaccatggtgttcttcaaggcgcgtcgcatggatcctgagttggtgttgccggcgcggccgacgccggccgagacgaaagcgctctccgacctcgacgaccagcggacgctgaggtactacgagacggtgatcgccttcttccgcagccggcgtggctacagcagccacagacgacggccagacgatccagccaaggccatcaaggcggccctcgcggaggcgctcgtgtactactaccccatcgccgggcggctcagggaggccgccggtgggaagctggtggtggattgcaccgcgcagggggtggtgtttgtggaggccgatgcggatgtncggctggaggagctgggcaggcctctgttgccgccgtacccgtgtgtggaggaactgctgtgcgatgcgggtgaaacaagagcggtgattggcaagccattagtcctcatgcaggtgacgaggctcaaatgtggcggatttgtcattggattccacatgtgccatagcattgcagatggattcggcatggttcaattcttcagatgtgtcgccgaactagctcgcggtgaaaaagtgcccacacttttgcccgtgtggagaagagagctcctaacacgacacaggtcaaatactactgcatataatcacacagccacggttaggtccgagtccgactccgacgactacaaatctgacgacgtcatgctgtcaactccaatggacgacatggtagtccagtacttcctcttcgggccaagggagatcgcaaccctacgaagccacctgaggggagacgaccagctgctgctcgccacctccgctacatccttcgagctgctagcggccgtcatgtggcggtgccgcaccttggcgctgggctacgagtcccatcggcgcgttcgcctcatggttaccatgaacgcgcgcgggaagtggaaccagcacacgcccatcccgcggggttactacggcaacgcgcacgtgtcccccatggcggaggccaccgccggcgagctctgcagccagccgctcgcccgcacggtcgatctcgtgcgcaggaccaagctcagcgtcaccaaggaacgcatggagtcgatggtggacacgatcgcttcgacgcgccagtggccgcctccgacgatggacaggatctacgaggtttctgacaccaagtggattgccaccaatgcgacgcagtttgggtgggccgagctggtgggtggtgggataccactggctggcgaccttgcctccaagctgggaagcgaccacatgagctgcaggaaccaggatggcgaccactcgaccatcgtgtcgatgcttctgcccaagccggcgatggacaagtttagcagtgagctgtctgtttggttgaacaacaagcatgatcacaagaacttggttatactcagttctctctagtctaccaacagatttaaacaatattaatgtacctacaatttgttgtacgaaagagaaatgattggctcaatgagaatgaaataatttcggtgttcttct

SEQ ID NO: 12132 - protein, 470 aa, Zea mays subsp. mays
  peptide (1)..(470): Ceres Seq. ID no. 12367071
  misc_feature (1)..(453): Pfam Name: Transferase family Pfam Description: Transferase family
  misc_feature (1)..(470): Homolog of NCBI NO: 37532050 NR Description: putative acetyl transferase [Oryza sativa
  misc_feature (4)..(457): Homolog of NCBI NO: 29027875 NR Description: putative acetyl transferase [Oryza sativa
  misc_feature (30)..(456): Homolog of NCBI NO: 37530404 NR Description: putative hsr201 hypersensitivity-related protein
  misc_feature (6)..(463): Homolog of NCBI NO: 37530414 NR Description: putative hsr201 hypersensitivity-related protein
  misc_feature (149)..(452): Homolog of NCBI NO: 37530408 NR Description: putative hsr201 hypersensitivity-related protein
  misc_feature (1)..(152): Homolog of NCBI NO: 37530408 NR Description: putative hsr201 hypersensitivity-related protein
  misc_feature (4)..(451): Homolog of NCBI NO: 7489142 NR Description: hsr201 protein, hypersensitivity-related - common
  misc_feature (4)..(467): Homolog of NCBI NO: 22854880 NR Description: benzoyl coenzyme A: benzyl alcohol benzoyl
  misc_feature (1)..(451): Homolog of NCBI NO: 37535814 NR Description: putative hypersensitivity-related (hsr)protein
  misc_feature (1)..(457): Homolog of NCBI NO: 34898614 NR Description: putative hypersensitivity-related (hsr) protein
  misc_feature (110)..(110): Xaa is any aa, unknown or other
MVFFKARRMDPELVLPARPTPAETKALSDLDDQRTLRYYETVIAFFRSRRGYSSHRRRPDDPAKAIKAALAEALVYYYPIAGRLREAAGGKLVVDCTAQGVVFVEADADXRLEELGRPLLPPYPCVEELLCDAGETRAVIGKPLVLMQVTRLKCGGFVIGFHMCHSIADGFGMVQFFRCVAELARGEKVPTLLPVWRRELLTRHRSNTTAYNHTATVRSESDSDDYKSDDVMLSTPMDDMVVQYFLFGPREIATLRSHLRGDDQLLLATSATSFELLAAVMWRCRTLALGYESHRRVRLMVTMNARGKWNQHTPIPRGYYGNAHVSPMAEATAGELCSQPLARTVDLVRRTKLSVTKERMESMVDTIASTRQWPPPTMDRIYEVSDTKWIATNATQFGWAELVGGGIPLAGDLASKLGSDHMSCRNQDGDHSTIVSMLLPKPAMDKFSSELSVWLNNKHDHKNLVILSSL

SEQ ID NO: 12133 - protein, 462 aa, Zea mays subsp. mays
  peptide (1)..(462): Ceres Seq. ID no. 12367072
  misc_feature (1)..(445): Pfam Name: Transferase family Pfam Description: Transferase family
  misc_feature (1)..(462): Homolog of NCBI NO: 37532050 NR Description: putative acetyl transferase [Oryza sativa
  misc_feature (1)..(449): Homolog of NCBI NO: 29027875 NR Description: putative acetyl transferase [Oryza sativa
  misc_feature (22)..(448): Homolog of NCBI NO: 37530404 NR Description: putative hsr201 hypersensitivity-related protein
  misc_feature (1)..(455): Homolog of NCBI NO: 37530414 NR Description: putative hsr201 hypersensitivity-related protein
  misc_feature (141)..(444): Homolog of NCBI NO: 37530408 NR Description: putative hsr201 hypersensitivity-related protein
  misc_feature (1)..(144): Homolog of NCBI NO: 37530408 NR Description: putative hsr201 hypersensitivity-related protein
  misc_feature (1)..(443): Homolog of NCBI NO: 7489142 NR Description: hsr201 protein, hypersensitivity-related - common
  misc_feature (1)..(459): Homolog of NCBI NO: 22854880 NR Description: benzoyl coenzyme A: benzyl alcohol benzoyl
  misc_feature (1)..(443): Homolog of NCBI NO: 37535814 NR Description: putative hypersensitivity-related (hsr)protein
  misc_feature (1)..(449): Homolog of NCBI NO: 34898614 NR Description: putative hypersensitivity-related (hsr) protein
  misc_feature (102)..(102): Xaa is any aa, unknown or other
MDPELVLPARPTPAETKALSDLDDQRTLRYYETVIAFFRSRRGYSSHRRRPDDPAKAIKAALAEALVYYYPIAGRLREAAGGKLVVDCTAQGVVFVEADADXRLEELGRPLLPPYPCVEELLCDAGETRAVIGKPLVLMQVTRLKCGGFVIGFHMCHSIADGFGMVQFFRCVAELARGEKVPTLLPVWRRELLTRHRSNTTAYNHTATVRSESDSDDYKSDDVMLSTPMDDMVVQYFLFGPREIATLRSHLRGDDQLLLATSATSFELLAAVMWRCRTLALGYESHRRVRLMVTMNARGKWNQHTPIPRGYYGNAHVSPMAEATAGELCSQPLARTVDLVRRTKLSVTKERMESMVDTIASTRQWPPPTMDRIYEVSDTKWIATNATQFGWAELVGGGIPLAGDLASKLGSDHMSCRNQDGDHSTIVSMLLPKPAMDKFSSELSVWLNNKHDHKNLVILSSL

SEQ ID NO: 12134 - protein, 324 aa, Zea mays subsp. mays
  peptide (1)..(324): Ceres Seq. ID no. 12367073
  misc_feature (1)..(307): Pfam Name: Transferase family Pfam Description: Transferase family
  misc_feature (1)..(324): Homolog of NCBI NO: 37532050 NR Description: putative acetyl transferase [Oryza sativa
  misc_feature (1)..(311): Homolog of NCBI NO: 29027875 NR Description: putative acetyl transferase [Oryza sativa
  misc_feature (1)..(310): Homolog of NCBI NO: 37530404 NR Description: putative hsr201 hypersensitivity-related protein
  misc_feature (1)..(317): Homolog of NCBI NO: 37530414 NR Description: putative hsr201 hypersensitivity-related protein
  misc_feature (3)..(306): Homolog of NCBI NO: 37530408 NR Description: putative hsr201 hypersensitivity-related protein
  misc_feature (1)..(305): Homolog of NCBI NO: 7489142 NR Description: hsr201 protein, hypersensitivity-related - common
  misc_feature (1)..(321): Homolog of NCBI NO: 22854880 NR Description: benzoyl coenzyme A: benzyl alcohol benzoyl
  misc_feature (1)..(305): Homolog of NCBI NO: 37535814 NR Description: putative hypersensitivity-related (hsr)protein
  misc_feature (1)..(311): Homolog of NCBI NO: 34898614 NR Description: putative hypersensitivity-related (hsr) protein
  misc_feature (1)..(224): Homolog of NCBI NO: 22854876 NR Description: benzoyl coenzyme A: benzyl alcohol benzoyl
MQVTRLKCGGFVIGFHMCHSIADGFGMVQFFRCVAELARGEKVPTLLPVWRRELLTRHRSNTTAYNHTATVRSESDSDDYKSDDVMLSTPMDDMVVQYFLFGPREIATLRSHLRGDDQLLLATSATSFELLAAVMWRCRTLALGYESHRRVRLMVTMNARGKWNQHTPIPRGYYGNAHVSPMAEATAGELCSQPLARTVDLVRRTKLSVTKERMESMVDTIASTRQWPPPTMDRIYEVSDTKWIATNATQFGWAELVGGGIPLAGDLASKLGSDHMSCRNQDGDHSTIVSMLLPKPAMDKFSSELSVWLNNKHDHKNLVILSSL

SEQ ID NO: 12135 - DNA, 1642 bp, Zea mays subsp. mays
  misc_feature (1)..(1642): Ceres Seq. ID no. 13498894
  misc_feature: MA Experiment ID: 20000488 Result: Up-regulated in Transcription
  misc_feature: MA Experiment 20000488 PARAMETER Experiment Name: Zm_50mM_NH4NO3_L_to_H_P Parameter: Organism Value: Zea mays
  misc_feature: MA Experiment 20000488 PARAMETER Experiment Name: Zm_50mM_NH4NO3_L_to_H_P Parameter: Timepoint (hr) Value: 8
  misc_feature: MA Experiment 20000488 PARAMETER Experiment Name: Zm_50mM_NH4NO3_L_to_H_P Parameter: Tissue Value: Leaves
  misc_feature: MA Experiment 20000488 PARAMETER Experiment Name: Zm_50mM_NH4NO3_L_to_H_P Parameter: Treatment Value: 50mM NH4NO3 vs. 100mM Mannitol
agacaccagacgcagtcggctgccgcagggctggtagtagccggcgcgccgtcaccgtatcctcagatcagcggcgagcagaaaccacaccactctactgacgcccgacgagccatgggtaaggagaagactcacatcaacattgtggtcattggccatgtcgactctggcaagtcgaccaccactggccacctgatctacaagcttggaggtattgacaagcgagtgattgagaggttcgagaaagaggctgccgagatgaacaagcggtcattcaagtatgcgtgggtgcttgacaagctcaaggctgagcgtgagagaggtattacaattgatattgccctgtggaagttcgagaccaccaagtactactgcactgttattgatgccccgggacaccgtgacttcatcaagaatatgatcactggcacttcccaagctgactgtgctgttcttatcattgactcaaccactggtggttttgaggctggtatctccaaggatggccagacccgtgagcatgctctccttgctttcacacttggtgtgaagcagatgatttgctgctgcaacaagatggatgctactacacccaagtattcaaaggcccgttatgatgagattgtgaaggaagtctcttcctacctgaagaaggttggatacaaccctgataagatccacttcgttccaatctctggttttgaaggtgacaacatgattgagaggtccaccaaccttgactggtacaagggcccaaccctacttgaggctctggacttgatcaatgagccaaagaggccttcagacaagcccctgcgtctcccccttcaggatgtgtacaagattggtggtattggaactgtccctgttggacgtgttgagactggtgtcattaagcctggtatggttgttacttttgggcctactggtcttactactgaggttaagtccgttgagatgcaccatgaggctctccaggaggcccttcccggtgacaatgttggcttcaacgtgaagaatgttgctgtgaaggatctgaagcgtgggtatgtggcctccaactccaaggatgaccctgccaaggaggctgctagcttcacctcccaggtcatcatcatgaaccaccctggccagattggcaatggctatgccccagttctggactgccacacctcacacattgctgtcaagtttgctgagctcgttaccaagattgataggcgatccggcaaggagctggagaaggagcccaaatttctcaagaacggtgatgctggtatggtgaagatggttcccactaagcccatggtggtggagaccttttctcagtatcctcctcttggtcgatttgctgtccgtgacatgaggcaaacggtggctgtcggagtcatcaagagtgtggagaagaaggacccaactggagccaaggtgacgaaggctgctgccaagaagaaatgatctatctggctggtgctgtgcttgcttgttggttacctcgtggaagcttaaaatatctcgtcttgttgacatccttgcagttgtcgcgtgaacaagtaatctatgatggcaatgtttgcctggtcatgaagtattattactttcgttgaaaccgtgatgctattaagacttaatttttttatgg

SEQ ID NO: 12136 - protein, 485 aa, Zea mays subsp. mays
  peptide (1)..(485): Ceres Seq. ID no. 13498895
  misc_feature (43)..(265): Pfam Name: Elongation factor Tu GTP binding domain Pfam Description: Elongation factor Tu GTP binding domain
  misc_feature (39)..(485): Homolog of NCBI NO: 2282584 NR Description: elongation factor 1-alpha [Zea mays]
  misc_feature (39)..(485): Homolog of NCBI NO: 3122071 NR Description: ELONGATION FACTOR 1-ALPHA (EF-1-ALPHA)
  misc_feature (39)..(485): Homolog of NCBI NO: 18873725 NR Description: elongation factor 1 alpha [Saccharum hybrid
  misc_feature (39)..(485): Homolog of NCBI NO: 2662341 NR Description: EF-1 alpha [Oryza sativa]
  misc_feature (39)..(485): Homolog of NCBI NO: 2662343 NR Description: EF-1 alpha [Oryza sativa]
  misc_feature (39)..(485): Homolog of NCBI NO: 6015059 NR Description: ELONGATION FACTOR 1-ALPHA (EF-1-ALPHA)
  misc_feature (45)..(485): Homolog of NCBI NO: 18873727 NR Description: elongation factor 1 alpha [Saccharum hybrid
  misc_feature (39)..(485): Homolog of NCBI NO: 7230387 NR Description: elongation factor 1 alpha [Zea mays]
  misc_feature (39)..(485): Homolog of NCBI NO: 7230385 NR Description: elongation factor 1 alpha [Zea mays]
  misc_feature (39)..(485): Homolog of NCBI NO: 1864017 NR Description: elongation factor-1 alpha [Nicotiana tabacum]
RHQTQSAAAGLVVAGAPSPYPQISGEQKPHHSTDARRAMGKEKTHINIVVIGHVDSGKSTTTGHLIYKLGGIDKRVIERFEKEAAEMNKRSFKYAWVLDKLKAERERGITIDIALWKFETTKYYCTVIDAPGHRDFIKNMITGTSQADCAVLIIDSTTGGFEAGISKDGQTREHALLAFTLGVKQMICCCNKMDATTPKYSKARYDEIVKEVSSYLKKVGYNPDKIHFVPISGFEGDNMIERSTNLDWYKGPTLLEALDLINEPKRPSDKPLRLPLQDVYKIGGIGTVPVGRVETGVIKPGMVVTFGPTGLTTEVKSVEMHHEALQEALPGDNVGFNVKNVAVKDLKRGYVASNSKDDPAKEAASFTSQVIIMNHPGQIGNGYAPVLDCHTSHIAVKFAELVTKIDRRSGKELEKEPKFLKNGDAGMVKMVPTKPMVVETFSQYPPLGRFAVRDMRQTVAVGVIKSVEKKDPTGAKVTKAAAKKK

SEQ ID NO: 12137 - protein, 447 aa, Zea mays subsp. mays
  peptide (1)..(447): Ceres Seq. ID no. 13498896
  misc_feature (5)..(227): Pfam Name: Elongation factor Tu GTP binding domain Pfam Description: Elongation factor Tu GTP binding domain
  misc_feature (1)..(447): Homolog of NCBI NO: 2282584 NR Description: elongation factor 1-alpha [Zea mays]
  misc_feature (1)..(447): Homolog of NCBI NO: 3122071 NR Description: ELONGATION FACTOR 1-ALPHA (EF-1-ALPHA)
  misc_feature (1)..(447): Homolog of NCBI NO: 18873725 NR Description: elongation factor 1 alpha [Saccharum hybrid
  misc_feature (1)..(447): Homolog of NCBI NO: 2662341 NR Description: EF-1 alpha [Oryza sativa]
  misc_feature (1)..(447): Homolog of NCBI NO: 2662343 NR Description: EF-1 alpha [Oryza sativa]
  misc_feature (1)..(447): Homolog of NCBI NO: 6015059 NR Description: ELONGATION FACTOR 1-ALPHA (EF-1-ALPHA)
  misc_feature (7)..(447): Homolog of NCBI NO: 18873727 NR Description: elongation factor 1 alpha [Saccharum hybrid
  misc_feature (1)..(447): Homolog of NCBI NO: 7230387 NR Description: elongation factor 1 alpha [Zea mays]
  misc_feature (1)..(447): Homolog of NCBI NO: 7230385 NR Description: elongation factor 1 alpha [Zea mays]
  misc_feature (1)..(447): Homolog of NCBI NO: 1864017 NR Description: elongation factor-1 alpha [Nicotiana tabacum]
MGKEKTHINIVVIGHVDSGKSTTTGHLIYKLGGIDKRVIERFEKEAAEMNKRSFKYAWVLDKLKAERERGITIDIALWKFETTKYYCTVIDAPGHRDFIKNMITGTSQADCAVLIIDSTTGGFEAGISKDGQTREHALLAFTLGVKQMICCCNKMDATTPKYSKARYDEIVKEVSSYLKKVGYNPDKIHFVPISGFEGDNMIERSTNLDWYKGPTLLEALDLINEPKRPSDKPLRLPLQDVYKIGGIGTVPVGRVETGVIKPGMVVTFGPTGLTTEVKSVEMHHEALQEALPGDNVGFNVKNVAVKDLKRGYVASNSKDDPAKEAASFTSQVIIMNHPGQIGNGYAPVLDCHTSHIAVKFAELVTKIDRRSGKELEKEPKFLKNGDAGMVKMVPTKPMVVETFSQYPPLGRFAVRDMRQTVAVGVIKSVEKKDPTGAKVTKAAAKKK

SEQ ID NO: 12138 - protein, 399 aa, Zea mays subsp. mays
  peptide (1)..(399): Ceres Seq. ID no. 13498897
  misc_feature (1)..(179): Pfam Name: Elongation factor Tu GTP binding domain Pfam Description: Elongation factor Tu GTP binding domain
  misc_feature (1)..(399): Homolog of NCBI NO: 2282584 NR Description: elongation factor 1-alpha [Zea mays]
  misc_feature (1)..(399): Homolog of NCBI NO: 3122071 NR Description: ELONGATION FACTOR 1-ALPHA (EF-1-ALPHA)
  misc_feature (1)..(399): Homolog of NCBI NO: 18873725 NR Description: elongation factor 1 alpha [Saccharum hybrid
  misc_feature (1)..(399): Homolog of NCBI NO: 2662341 NR Description: EF-1 alpha [Oryza sativa]
  misc_feature (1)..(399): Homolog of NCBI NO: 2662343 NR Description: EF-1 alpha [Oryza sativa]
  misc_feature (1)..(399): Homolog of NCBI NO: 6015059 NR Description: ELONGATION FACTOR 1-ALPHA (EF-1-ALPHA)
  misc_feature (1)..(399): Homolog of NCBI NO: 18873727 NR Description: elongation factor 1 alpha [Saccharum hybrid
  misc_feature (1)..(399): Homolog of NCBI NO: 7230387 NR Description: elongation factor 1 alpha [Zea mays]
  misc_feature (1)..(399): Homolog of NCBI NO: 7230385 NR Description: elongation factor 1 alpha [Zea mays]
  misc_feature (1)..(399): Homolog of NCBI NO: 1864017 NR Description: elongation factor-1 alpha [Nicotiana tabacum]
MNKRSFKYAWVLDKLKAERERGITIDIALWKFETTKYYCTVIDAPGHRDFIKNMITGTSQADCAVLIIDSTTGGFEAGISKDGQTREHALLAFTLGVKQMICCCNKMDATTPKYSKARYDEIVKEVSSYLKKVGYNPDKIHFVPISGFEGDNMIERSTNLDWYKGPTLLEALDLINEPKRPSDKPLRLPLQDVYKIGGIGTVPVGRVETGVIKPGMVVTFGPTGLTTEVKSVEMHHEALQEALPGDNVGFNVKNVAVKDLKRGYVASNSKDDPAKEAASFTSQVIIMNHPGQIGNGYAPVLDCHTSHIAVKFAELVTKIDRRSGKELEKEPKFLKNGDAGMVKMVPTKPMVVETFSQYPPLGRFAVRDMRQTVAVGVIKSVEKKDPTGAKVTKAAAKKK

SEQ ID NO: 12139 - DNA, 883 bp, Zea mays subsp. mays
  misc_feature (1)..(883): Ceres Seq. ID no. 12348783
  misc_feature: MA Experiment ID: 108530 Result: Down-regulated in Transcription
  misc_feature: MA Experiment 108530 PARAMETER Experiment Name: Zm_Imbibed_Seeds_P Parameter: Age (day) Value: 6 vs. 2
  misc_feature: MA Experiment 108530 PARAMETER Experiment Name: Zm_Imbibed_Seeds_P Parameter: Organism Value: Zea mays
  misc_feature: MA Experiment 108530 PARAMETER Experiment Name: Zm_Imbibed_Seeds_P Parameter: Plant Line Value: 35A19
  misc_feature: MA Experiment 108530 PARAMETER Experiment Name: Zm_Imbibed_Seeds_P Parameter: Tissue Value: Aerial vs. Embryo
  misc_feature: MA Experiment ID: 108544 Result: Down-regulated in Transcription
  misc_feature: MA Experiment ID: 108556 Result: Down-regulated in Transcription
  misc_feature: MA Experiment 108556 PARAMETER Experiment Name: Zm_Drought_P Parameter: Age (day) Value: 9
  misc_feature: MA Experiment 108556 PARAMETER Experiment Name: Zm_Drought_P Parameter: Organism Value: Zea mays
  misc_feature: MA Experiment 108556 PARAMETER Experiment Name: Zm_Drought_P Parameter: Plant Line Value: 35A19
  misc_feature: MA Experiment 108556 PARAMETER Experiment Name: Zm_Drought_P Parameter: Timepoint (hr) Value: 24
  misc_feature: MA Experiment 108556 PARAMETER Experiment Name: Zm_Drought_P Parameter: Tissue Value: Aerial
  misc_feature: MA Experiment 108556 PARAMETER Experiment Name: Zm_Drought_P Parameter: Treatment Value: Drought vs. No Drought
  misc_feature: MA Experiment ID: 108597 Result: Down-regulated in Transcription
  misc_feature: MA Experiment 108597 PARAMETER Experiment Name: Zm_100uM_ABA_P Parameter: Age (day) Value: 9
  misc_feature: MA Experiment 108597 PARAMETER Experiment Name: Zm_100uM_ABA_P Parameter: Organism Value: Zea mays
  misc_feature: MA Experiment 108597 PARAMETER Experiment Name: Zm_100uM_ABA_P Parameter: Plant Line Value: 35A19
  misc_feature: MA Experiment 108597 PARAMETER Experiment Name: Zm_100uM_ABA_P Parameter: Timepoint (hr) Value: 24
  misc_feature: MA Experiment 108597 PARAMETER Experiment Name: Zm_100uM_ABA_P Parameter: Tissue Value: Aerial
  misc_feature: MA Experiment 108597 PARAMETER Experiment Name: Zm_100uM_ABA_P Parameter: Treatment Value: 100uM ABA vs. No Treatment
  misc_feature: MA Experiment ID: 20000478 Result: Down-regulated in Transcription
  misc_feature: MA Experiment 20000478 PARAMETER Experiment Name: Zm_5mM_SA_P Parameter: Age (day) Value: 11
  misc_feature: MA Experiment 20000478 PARAMETER Experiment Name: Zm_5mM_SA_P Parameter: Organism Value: Zea mays
  misc_feature: MA Experiment 20000478 PARAMETER Experiment Name: Zm_5mM_SA_P Parameter: Plant Line Value: 35A19
  misc_feature: MA Experiment 20000478 PARAMETER Experiment Name: Zm_5mM_SA_P Parameter: Timepoint (hr) Value: 72
  misc_feature: MA Experiment 20000478 PARAMETER Experiment Name: Zm_5mM_SA_P Parameter: Tissue Value: Aerial
  misc_feature: MA Experiment 20000478 PARAMETER Experiment Name: Zm_5mM_SA_P Parameter: Treatment Value: 5mM SA vs. No Treatment
  misc_feature: MA Experiment ID: 20000480 Result: Down-regulated in Transcription
  misc_feature: MA Experiment 20000480 PARAMETER Experiment Name: Zm_Drought_P Parameter: Age (day) Value: 11
  misc_feature: MA Experiment 20000480 PARAMETER Experiment Name: Zm_Drought_P Parameter: Organism Value: Zea mays
  misc_feature: MA Experiment 20000480 PARAMETER Experiment Name: Zm_Drought_P Parameter: Plant Line Value: 35A19
  misc_feature: MA Experiment 20000480 PARAMETER Experiment Name: Zm_Drought_P Parameter: Timepoint (hr) Value: 72
  misc_feature: MA Experiment 20000480 PARAMETER Experiment Name: Zm_Drought_P Parameter: Tissue Value: Aerial
  misc_feature: MA Experiment 20000480 PARAMETER Experiment Name: Zm_Drought_P Parameter: Treatment Value: Drought vs. No Drought
ctctcgcccgtctcgatcccacaggatccgagagacctcacaagccgccacgccaggtccccatcccatcgcggcgcctgccccacccccgccctgctcccgcccggtagtagtagcagagcctcgccgccgctgccgagaatagatggggttcgtgtccttcgtcgggcgggtgctcttcgtcgccgctttcctcctctccgcctaccaggagtttaatgaatttggcgctgatggtgggccagcagctaaggcccttcagcccaagttcaatgtgtttgtaaaaaatatctctgcacatctgggagtagctgtcccgcacattgagttgaagcatgtgattgctgctacaattgctcttaagggacttggaagtctcctttttattttgaccagctccctcggtgcttatctcctgctgctgtacctcgctctgatcagtcctatcgttcacgacttctacaactacgacacggggaaggaagaattcgcgcggctgtttgcgaagttcacccaggacgtggcgctagttggagctctcctcgtcttcctgggcatgaagaactccaccccgaagcggcagggcaagaagaaggctcacaaggcgaagacgaactagtaagaggttgctcgctcggcctcaggcgggtgtcaggagacgaatagtggcccagtgcgaagcagtcgatgcgcatcgagctgtcggctgcgcttttacatgtatcggatattcagattccattttgcggggcgcggcccgaacgaaggtgtgactagtgggcggcgggttaggcgacacgacacggtcatgtatgtgattgcgattggttggttggtttcttgaactgggctgacggtggttaatcttttcgatttgattagc

SEQ ID NO: 12140 - protein, 157 aa, Zea mays subsp. mays
  peptide (1)..(157): Ceres Seq. ID no. 12348784
  misc_feature (1)..(138): Pfam Name: HR-like lesion-inducing Pfam Description: HR-like lesion-inducing
  misc_feature (1)..(157): Homolog of NCBI NO: 27261473 NR Description: Unknown protein [Oryza sativa (japonica
  misc_feature (1)..(157): Homolog of NCBI NO: 7489144 NR Description: hypothetical protein (clone NF22) - common tobacco
  misc_feature (24)..(156): Homolog of NCBI NO: 37534824 NR Description: putative RNA-binding protein [Oryza sativa
  misc_feature (1)..(24): Homolog of NCBI NO: 37534824 NR Description: putative RNA-binding protein [Oryza sativa
  misc_feature (1)..(157): Homolog of NCBI NO: 38346190 NR Description: OSJNBa0027O01.6 [Oryza sativa (japonica
  misc_feature (1)..(157): Homolog of NCBI NO: 15236497 NR Description: elicitor like protein; protein id: At4g14420.1, by cDNA: 1718., supported by cDNA: gi_15010599, supported by
  misc_feature (1)..(128): Homolog of NCBI NO: 7489143 NR Description: hypothetical protein (clone ND1) - common tobacco
  misc_feature (1)..(155): Homolog of NCBI NO: 15219714 NR Description: unknown protein; protein id: At1g04340.1, by cDNA: gi_17979508, supported by cDNA: gi_20147296 [Arabidopsis
  misc_feature (1)..(156): Homolog of NCBI NO: 40287494 NR Description: putative lesion-inducing protein [Capsicum annuum]
  misc_feature (1)..(155): Homolog of NCBI NO: 21592798 NR Description: Nicotiana lesion-inducing like [Arabidopsis
MGFVSFVGRVLFVAAFLLSAYQEFNEFGADGGPAAKALQPKFNVFVKNISAHLGVAVPHIELKHVIAATIALKGLGSLLFILTSSLGAYLLLLYLALISPIVHDFYNYDTGKEEFARLFAKFTQDVALVGALLVFLGMKNSTPKRQGKKKAHKAKTN

SEQ ID NO: 12141 - DNA, 1334 bp, Zea mays subsp. mays
  misc_feature (1)..(1334): Ceres Seq. ID no. 12374355
  misc_feature: MA Experiment ID: 108522 Result: Down-regulated in Transcription
  misc_feature: MA Experiment 108522 PARAMETER Experiment Name: Zm_42deg_Heat_P Parameter: Age (day) Value: 8
  misc_feature: MA Experiment 108522 PARAMETER Experiment Name: Zm_42deg_Heat_P Parameter: Organism Value: Zea mays
  misc_feature: MA Experiment 108522 PARAMETER Experiment Name: Zm_42deg_Heat_P Parameter: Plant Line Value: 35A19
  misc_feature: MA Experiment 108522 PARAMETER Experiment Name: Zm_42deg_Heat_P Parameter: Temperature (deg C) Value: 42 vs. 22
  misc_feature: MA Experiment 108522 PARAMETER Experiment Name: Zm_42deg_Heat_P Parameter: Timepoint (hr) Value: 1
  misc_feature: MA Experiment 108522 PARAMETER Experiment Name: Zm_42deg_Heat_P Parameter: Tissue Value: Aerial
  misc_feature: MA Experiment ID: 108544 Result: Down-regulated in Transcription
  misc_feature: MA Experiment ID: 108556 Result: Down-regulated in Transcription
  misc_feature: MA Experiment 108556 PARAMETER Experiment Name: Zm_Drought_P Parameter: Age (day) Value: 9
  misc_feature: MA Experiment 108556 PARAMETER Experiment Name: Zm_Drought_P Parameter: Organism Value: Zea mays
  misc_feature: MA Experiment 108556 PARAMETER Experiment Name: Zm_Drought_P Parameter: Plant Line Value: 35A19
  misc_feature: MA Experiment 108556 PARAMETER Experiment Name: Zm_Drought_P Parameter: Timepoint (hr) Value: 24
  misc_feature: MA Experiment 108556 PARAMETER Experiment Name: Zm_Drought_P Parameter: Tissue Value: Aerial
  misc_feature: MA Experiment 108556 PARAMETER Experiment Name: Zm_Drought_P Parameter: Treatment Value: Drought vs. No Drought
  misc_feature: MA Experiment ID: 20000487 Result: Up-regulated in Transcription
  misc_feature: MA Experiment 20000487 PARAMETER Experiment Name: Zm_50mM_NH4NO3_L_to_H_P Parameter: Organism Value: Zea mays
  misc_feature: MA Experiment 20000487 PARAMETER Experiment Name: Zm_50mM_NH4NO3_L_to_H_P Parameter: Timepoint (hr) Value: 4
  misc_feature: MA Experiment 20000487 PARAMETER Experiment Name: Zm_50mM_NH4NO3_L_to_H_P Parameter: Tissue Value: Leaves
  misc_feature: MA Experiment 20000487 PARAMETER Experiment Name: Zm_50mM_NH4NO3_L_to_H_P Parameter: Treatment Value: 50mM NH4NO3 vs. 100mM Mannitol
  misc_feature: MA Experiment ID: 20000488 Result: Up-regulated in Transcription
  misc_feature: MA Experiment 20000488 PARAMETER Experiment Name: Zm_50mM_NH4NO3_L_to_H_P Parameter: Organism Value: Zea mays
  misc_feature: MA Experiment 20000488 PARAMETER Experiment Name: Zm_50mM_NH4NO3_L_to_H_P Parameter: Timepoint (hr) Value: 8
  misc_feature: MA Experiment 20000488 PARAMETER Experiment Name: Zm_50mM_NH4NO3_L_to_H_P Parameter: Tissue Value: Leaves
  misc_feature: MA Experiment 20000488 PARAMETER Experiment Name: Zm_50mM_NH4NO3_L_to_H_P Parameter: Treatment Value: 50mM NH4NO3 vs. 100mM Mannitol
  misc_feature: MA Experiment ID: 20000492 Result: Up-regulated in Transcription
  misc_feature: MA Experiment 20000492 PARAMETER Experiment Name: Zm_Hybrid_Seed_Dev_P Parameter: DAP Value: 12
  misc_feature: MA Experiment 20000492 PARAMETER Experiment Name: Zm_Hybrid_Seed_Dev_P Parameter: Organism Value: Zea mays
  misc_feature: MA Experiment 20000492 PARAMETER Experiment Name: Zm_Hybrid_Seed_Dev_P Parameter: Plant Line Value: 35A19
  misc_feature: MA Experiment 20000492 PARAMETER Experiment Name: Zm_Hybrid_Seed_Dev_P Parameter: Tissue Value: Fert Kernel vs. Unfert Floret
  misc_feature: MA Experiment ID: 20000632 Result: Down-regulated in Transcription
  misc_feature: MA Experiment 20000632 PARAMETER Experiment Name: Zm_Herbicide-Treatments_P Parameter: Timepoint (hr) Value: 4
  misc_feature: MA Experiment 20000632 PARAMETER Experiment Name: Zm_Herbicide-Treatments_P Parameter: Tissue Value: Aerial
  misc_feature: MA Experiment 20000632 PARAMETER Experiment Name: Zm_Herbicide-Treatments_P Parameter: Treatment Value: Glean vs. No Treatment
acgactctcttctctgagaaaacccaacaaaaaccctcgctcgcctcacttgttcgctcacctcggtgcggcgcgtcgttcggacacggagatacagcggcgattccggcgatggagtacgtgaaccccctcaccggcttccgcgtcgacggccgccgccccaacgagatgcggcaactcaagggcgaggtcggcgtcgttgtgcgcgcagacgggtcggcgctgtttgagatgggcaacaccagagtcatcgccgccgtctacggcccgcgagaggttcagaacaaaggtcagcaagtaaacagcaaggaggctttggttcgttgtgagtacaggatggcagagtttagtacaggagatcggaggagaaaaccgaagggtgacaggcgatcaacagaaatttctcttgttattcgacagacaatggaggcaagcatattaacacatttaatgccacactcacagattgatatatatgtccaagttcttcaagctgatggtggaacaaggtcagcttgcataaatgctgcaacactagctcttgcagatgctgggattccaatgcgagacattgccacatcatgtagtgctggttatctgtgttctactcctttgctcgatctgaattacctcgaagacagtgctgggggttccgatgtcactgttggcattcttgcaaagatggacaaagtgactttgcttcagatggatgcaaaattaccaattgatacatttgaaaatgtaatgggacttgcaatagaagggtgcaaagcaattgcaacttacatccgagaggtgctattggagaatacaaagaagcttgagtgtcagcgtggttaaccttaggagtgcaggcaggttgatgacctgaacctacccaacaccggacatcacacagccattaagggcttgttcggttagctcttaatccatgtggattgagtgggattggatgagtttgaatcccaaacaattcaaacttcttaagaattttttccaatcccatccaatccatgtgtattgggaataaccaaacaaggcctaaaaggtttactggttgtggttgtgggtggctggctctggtgcagttcacaggaacttccaacggagttgtgggtggctggcttctgttcaaggcatcttgtcatcatcaccagggatacaagacatgcttcctcagtaaggtgttatcggaatttttcagttcctgtaaactgatataaatcgatggtggcactgtactgataatcttccgtatggtgttattggaatttgtgtgacagttcctgtaaactaatgcaaagagagagatccagcggggctcctgcctcctg

SEQ ID NO: 12142 - protein, 279 aa, Zea mays subsp. mays
  peptide (1)..(279): Ceres Seq. ID no. 12374356
  misc_feature (56)..(187): Pfam Name: 3' exoribonuclease family, domain 1 Pfam Description: 3' exoribonuclease family, domain 1
  misc_feature (38)..(278): Homolog of NCBI NO: 15233167 NR Description: exonuclease RRP41; protein id: At3g61620.1, by cDNA: gi_6164937 [Arabidopsis thaliana]
  misc_feature (46)..(273): Homolog of NCBI NO: 9506689 NR Description: exosome component Rrp41; hypothetical protein sapiens] >gi|14285756|sp|Q9NPD3|RR41_HUMAN Exosome complex RRP41 (Ribosomal RNA processing protein 41) (p12A)
  misc_feature (46)..(279): Homolog of NCBI NO: 29611663 NR Description: exosome complex exonuclease RRP41 [Mus musculus] Exosome complex exonuclease RRP41 (Ribosomal RNA processing
  misc_feature (46)..(273): Homolog of NCBI NO: 33411774 NR Description: putative exosome complex exonuclease RRP41 [Bos
  misc_feature (46)..(273): Homolog of NCBI NO: 34866849 NR Description: similar to putative exosome complex exonuclease
  misc_feature (46)..(274): Homolog of NCBI NO: 14520826 NR Description: ribonuclease PH [Pyrococcus abyssi]
  misc_feature (46)..(273): Homolog of NCBI NO: 40217446 NR Description: ribonuclease PH [uncultured archaeon]
  misc_feature (46)..(274): Homolog of NCBI NO: 18977940 NR Description: ribonuclease ph (rph) [Pyrococcus furiosus DSM >gi|29336822|sp|Q8U0L9|ECX1_PYRFU Probable exosome complex
  misc_feature (46)..(274): Homolog of NCBI NO: 14591333 NR Description: hypothetical protein [Pyrococcus horikoshii]
  misc_feature (46)..(269): Homolog of NCBI NO: 20093819 NR Description: Predicted exosome subunit, RNase PH [Methanopyrus AV19] >gi|29336819|sp|Q8TYC1|ECX1_METKA Probable exosome complex
TTLFSEKTQQKPSLASLVRSPRCGASFGHGDTAAIPAMEYVNPLTGFRVDGRRPNEMRQLKGEVGVVVRADGSALFEMGNTRVIAAVYGPREVQNKGQQVNSKEALVRCEYRMAEFSTGDRRRKPKGDRRSTEISLVIRQTMEASILTHLMPHSQIDIYVQVLQADGGTRSACINAATLALADAGIPMRDIATSCSAGYLCSTPLLDLNYLEDSAGGSDVTVGILAKMDKVTLLQMDAKLPIDTFENVMGLAIEGCKAIATYIREVLLENTKKLECQRG

SEQ ID NO: 12143 - protein, 242 aa, Zea mays subsp. mays
  peptide (1)..(242): Ceres Seq. ID no. 12374357
  misc_feature (19)..(150): Pfam Name: 3' exoribonuclease family, domain 1 Pfam Description: 3' exoribonuclease family, domain 1
  misc_feature (1)..(241): Homolog of NCBI NO: 15233167 NR Description: exonuclease RRP41; protein id: At3g61620.1, by cDNA: gi_6164937 [Arabidopsis thaliana]
  misc_feature (9)..(236): Homolog of NCBI NO: 9506689 NR Description: exosome component Rrp41; hypothetical protein sapiens] >gi|14285756|sp|Q9NPD3|RR41_HUMAN Exosome complex RRP41 (Ribosomal RNA processing protein 41) (p12A)
  misc_feature (9)..(242): Homolog of NCBI NO: 29611663 NR Description: exosome complex exonuclease RRP41 [Mus musculus] Exosome complex exonuclease RRP41 (Ribosomal RNA processing
  misc_feature (9)..(236): Homolog of NCBI NO: 33411774 NR Description: putative exosome complex exonuclease RRP41 [Bos
  misc_feature (9)..(236): Homolog of NCBI NO: 34866849 NR Description: similar to putative exosome complex exonuclease
  misc_feature (9)..(237): Homolog of NCBI NO: 14520826 NR Description: ribonuclease PH [Pyrococcus abyssi]
  misc_feature (9)..(236): Homolog of NCBI NO: 40217446 NR Description: ribonuclease PH [uncultured archaeon]
  misc_feature (9)..(237): Homolog of NCBI NO: 18977940 NR Description: ribonuclease ph (rph) [Pyrococcus furiosus DSM >gi|29336822|sp|Q8U0L9|ECX1_PYRFU Probable exosome complex
  misc_feature (9)..(237): Homolog of NCBI NO: 14591333 NR Description: hypothetical protein [Pyrococcus horikoshii]
  misc_feature (9)..(232): Homolog of NCBI NO: 20093819 NR Description: Predicted exosome subunit, RNase PH [Methanopyrus AV19] >gi|29336819|sp|Q8TYC1|ECX1_METKA Probable exosome complex
MEYVNPLTGFRVDGRRPNEMRQLKGEVGVVVRADGSALFEMGNTRVIAAVYGPREVQNKGQQVNSKEALVRCEYRMAEFSTGDRRRKPKGDRRSTEISLVIRQTMEASILTHLMPHSQIDIYVQVLQADGGTRSACINAATLALADAGIPMRDIATSCSAGYLCSTPLLDLNYLEDSAGGSDVTVGILAKMDKVTLLQMDAKLPIDTFENVMGLAIEGCKAIATYIREVLLENTKKLECQRG

SEQ ID NO: 12144 - protein, 223 aa, Zea mays subsp. mays
  peptide (1)..(223): Ceres Seq. ID no. 12374358
  misc_feature (1)..(131): Pfam Name: 3' exoribonuclease family, domain 1 Pfam Description: 3' exoribonuclease family, domain 1
  misc_feature (1)..(222): Homolog of NCBI NO: 15233167 NR Description: exonuclease RRP41; protein id: At3g61620.1, by cDNA: gi_6164937 [Arabidopsis thaliana]
  misc_feature (1)..(217): Homolog of NCBI NO: 9506689 NR Description: exosome component Rrp41; hypothetical protein sapiens] >gi|14285756|sp|Q9NPD3|RR41_HUMAN Exosome complex RRP41 (Ribosomal RNA processing protein 41) (p12A)
  misc_feature (1)..(223): Homolog of NCBI NO: 29611663 NR Description: exosome complex exonuclease RRP41 [Mus musculus] Exosome complex exonuclease RRP41 (Ribosomal RNA processing
  misc_feature (1)..(217): Homolog of NCBI NO: 33411774 NR Description: putative exosome complex exonuclease RRP41 [Bos
  misc_feature (1)..(217): Homolog of NCBI NO: 34866849 NR Description: similar to putative exosome complex exonuclease
  misc_feature (1)..(218): Homolog of NCBI NO: 14520826 NR Description: ribonuclease PH [Pyrococcus abyssi]
  misc_feature (1)..(217): Homolog of NCBI NO: 40217446 NR Description: ribonuclease PH [uncultured archaeon]
  misc_feature (1)..(218): Homolog of NCBI NO: 18977940 NR Description: ribonuclease ph (rph) [Pyrococcus furiosus DSM >gi|29336822|sp|Q8U0L9|ECX1_PYRFU Probable exosome complex
  misc_feature (1)..(218): Homolog of NCBI NO: 14591333 NR Description: hypothetical protein [Pyrococcus horikoshii]
  misc_feature (1)..(213): Homolog of NCBI NO: 20093819 NR Description: Predicted exosome subunit, RNase PH [Methanopyrus AV19] >gi|29336819|sp|Q8TYC1|ECX1_METKA Probable exosome complex
MRQLKGEVGVVVRADGSALFEMGNTRVIAAVYGPREVQNKGQQVNSKEALVRCEYRMAEFSTGDRRRKPKGDRRSTEISLVIRQTMEASILTHLMPHSQIDIYVQVLQADGGTRSACINAATLALADAGIPMRDIATSCSAGYLCSTPLLDLNYLEDSAGGSDVTVGILAKMDKVTLLQMDAKLPIDTFENVMGLAIEGCKAIATYIREVLLENTKKLECQRG

SEQ ID NO: 12145 - DNA, 1758 bp, Zea mays subsp. mays
  misc_feature (1)..(1758): Ceres Seq. ID no. 12406812
  misc_feature: MA Experiment ID: 108543 Result: Up-regulated in Transcription
  misc_feature: MA Experiment ID: 108544 Result: Up-regulated in Transcription
  misc_feature: MA Experiment ID: 108687 Result: Down-regulated in Transcription
  misc_feature: MA Experiment 108687 PARAMETER Experiment Name: Zm_Embryos-Flowers__P Parameter: Tissue Value: Embryo vs. Aerial+
  misc_feature: MA Experiment ID: 20000492 Result: Down-regulated in Transcription
  misc_feature: MA Experiment 20000492 PARAMETER Experiment Name: Zm_Hybrid_Seed_Dev_P Parameter: DAP Value: 12
  misc_feature: MA Experiment 20000492 PARAMETER Experiment Name: Zm_Hybrid_Seed_Dev_P Parameter: Organism Value: Zea mays
  misc_feature: MA Experiment 20000492 PARAMETER Experiment Name: Zm_Hybrid_Seed_Dev_P Parameter: Plant Line Value: 35A19
  misc_feature: MA Experiment 20000492 PARAMETER Experiment Name: Zm_Hybrid_Seed_Dev_P Parameter: Tissue Value: Fert Kernel vs. Unfert Floret
  misc_feature: MA Experiment ID: 20000534 Result: Up-regulated in Transcription
  misc_feature: MA Experiment 20000534 PARAMETER Experiment Name: Zm_Hybrid_Pollen_P Parameter: Age (day) Value: 8
  misc_feature: MA Experiment 20000534 PARAMETER Experiment Name: Zm_Hybrid_Pollen_P Parameter: Organism Value: Zea mays
  misc_feature: MA Experiment 20000534 PARAMETER Experiment Name: Zm_Hybrid_Pollen_P Parameter: Plant Line Value: 35A19
  misc_feature: MA Experiment 20000534 PARAMETER Experiment Name: Zm_Hybrid_Pollen_P Parameter: Tissue Value: Pollen vs. Aerial
  misc_feature: MA Experiment ID: 20000535 Result: Down-regulated in Transcription
  misc_feature: MA Experiment 20000535 PARAMETER Experiment Name: Zm_Hybrid_Seed_Dev_P Parameter: DAP Value: 30 vs. 12
  misc_feature: MA Experiment 20000535 PARAMETER Experiment Name: Zm_Hybrid_Seed_Dev_P Parameter: Organism Value: Zea mays
  misc_feature: MA Experiment 20000535 PARAMETER Experiment Name: Zm_Hybrid_Seed_Dev_P Parameter: Plant Line Value: 35A19
  misc_feature: MA Experiment 20000535 PARAMETER Experiment Name: Zm_Hybrid_Seed_Dev_P Parameter: Tissue Value: Embryo vs. Unfert Floret
aagtagtacgagtaaccaacaatccaatggacgcggcgaaatattggcacccggcagcacacccccaccaatcccgtgtccccacgatccagatcagaaacgcaaaggacaatcgacacggacgcgacgcgaaggcgacgcaccagcaccacctaaaattctaaaaaggcaggggccgtttctccgaccaccgcccgacgaatcagcgcgtccgctacaactccggcgacccccgccggcggcgaccccccagggcagcgatccacgcaggcgaacaacgatgggcggccgcaagatcgcgctgctggtgggcatcaactacccgggcaccaaggccgagctcaagggctgctacaacgacgtcgaccgcatgcgccgctgcctcgtcgaccgcttcggcttccgacgaggccgacatccgagtcctcagcgacgccgaccgatccgcgccgcagcccacgggggctaacatccgccgcgccctcgcccgcctcgtcggggatgcccgccccggggacttcctcttcttccactacagcggccacggcacgcgcctgccagccgagacggggcagcacgacgacaccggctacgacgagtgcatcgtgccctgcgacatgaacctcatcacagatcaggatttcagggaactcgtgcagaaggtccctgaaggttgcctattcaccatcgtctctgactcatgccatagtggtggcctgctggacagtgctaaggagcagataggtaatagcaccaagcagaataagacccagtcccgtgaacctgatgagcctcgtcattctggttctggcagcggcttccggtcatttctcaaagagactgtccgcgatgtgttcgagtctgaggggattcacatccctcatagtcgtcgccatggggatgatgaccaggacgacggttacgcacagccaactggaaatggccgcaccaaaaaccgctccctgccactctcgaccctgatagagatgctcaaggaacaaactggaaaggatgacattgatgtgggttctatccggatgacgctgttcaacatctttggtgatgatgccagcccaaagattaagaagttcatgaaggtcatgctcggaaagttccaccagggccagtcaggtgagcaaggcagtggtggtggtggtgtctttggcatggttggtgcccttgctcaggagttcttgaaggctaagcttgaagggaaggaggaagaggctttcaaacctgcattagagcaagaggttcacagtgttgacgaggtgtacgccgggagtaaggcctgggcaccaaacaatggcattctgatcagtgggtgccagactaaccaaacatcagcggatgcaactacaccgcagggtgtctcctttggtgctctgagcaatgctatccaaaccattcttgcagacaagcacgggaaggtgacgaataaggatctcgtgatgaaagcacgtgagctgctgtctaagcaagggtacactcaacagcctggactatactgcagcgatgagcatgttcatgtcgctttcatatgctaaaacttggattgttacagcgattgctttcctccatccttttgtgttgatcggtgcaccagaggttgaagtttttcttcccatgtatgttacagttatattgtatcagtgtttgttgcttgaggatatgtttcaatggactatgtcaatattgaaataactttgagaaatgtttctatatatgaataatatacacacttgtatcgtgatctgt

SEQ ID NO: 12146 - protein, 309 aa, Zea mays subsp. mays
  peptide (1)..(309): Ceres Seq. ID no. 12406813
  misc_feature (1)..(309): Pfam Name: Caspase domain Pfam Description: Caspase domain
  misc_feature (1)..(309): Homolog of NCBI NO: 34908928 NR Description: putative latex-abundant protein [Oryza sativa
  misc_feature (1)..(309): Homolog of NCBI NO: 29367583 NR Description: latex-abundant protein-like protein [Oryza sativa
  misc_feature (1)..(309): Homolog of NCBI NO: 4235430 NR Description: latex-abundant protein [Hevea brasiliensis]
  misc_feature (1)..(309): Homolog of NCBI NO: 23343885 NR Description: metacaspase 1 [Lycopersicon esculentum]
  misc_feature (1)..(309): Homolog of NCBI NO: 40644374 NR Description: metacaspase type II [Picea abies]
  misc_feature (1)..(309): Homolog of NCBI NO: 15219345 NR Description: hypothetical protein common family; protein id: supported by cDNA: gi_19347868 [Arabidopsis thaliana]
  misc_feature (1)..(309): Homolog of NCBI NO: 15219342 NR Description: hypothetical protein common family; protein id:
  misc_feature (1)..(309): Homolog of NCBI NO: 33304380 NR Description: metacaspase 7 [Arabidopsis thaliana]
  misc_feature (113)..(309): Homolog of NCBI NO: 15219340 NR Description: hypothetical protein common family; protein id:
  misc_feature (1)..(83): Homolog of NCBI NO: 15219340 NR Description: hypothetical protein common family; protein id:
MNLITDQDFRELVQKVPEGCLFTIVSDSCHSGGLLDSAKEQIGNSTKQNKTQSREPDEPRHSGSGSGFRSFLKETVRDVFESEGIHIPHSRRHGDDDQDDGYAQPTGNGRTKNRSLPLSTLIEMLKEQTGKDDIDVGSIRMTLFNIFGDDASPKIKKFMKVMLGKFHQGQSGEQGSGGGGVFGMVGALAQEFLKAKLEGKEEEAFKPALEQEVHSVDEVYAGSKAWAPNNGILISGCQTNQTSADATTPQGVSFGALSNAIQTILADKHGKVTNKDLVMKARELLSKQGYTQQPGLYCSDEHVHVAFIC

SEQ ID NO: 12147 - protein, 186 aa, Zea mays subsp. mays
  peptide (1)..(186): Ceres Seq. ID no. 12406814
  misc_feature (1)..(186): Pfam Name: Caspase domain Pfam Description: Caspase domain
  misc_feature (1)..(186): Homolog of NCBI NO: 37788557 NR Description: metacaspase 7 [Arabidopsis thaliana]
  misc_feature (1)..(186): Homolog of NCBI NO: 34908928 NR Description: putative latex-abundant protein [Oryza sativa
  misc_feature (1)..(186): Homolog of NCBI NO: 29367583 NR Description: latex-abundant protein-like protein [Oryza sativa
  misc_feature (1)..(186): Homolog of NCBI NO: 4235430 NR Description: latex-abundant protein [Hevea brasiliensis]
  misc_feature (1)..(186): Homolog of NCBI NO: 23343885 NR Description: metacaspase 1 [Lycopersicon esculentum]
  misc_feature (1)..(186): Homolog of NCBI NO: 40644374 NR Description: metacaspase type II [Picea abies]
  misc_feature (1)..(186): Homolog of NCBI NO: 15219345 NR Description: hypothetical protein common family; protein id: supported by cDNA: gi_19347868 [Arabidopsis thaliana]
  misc_feature (1)..(186): Homolog of NCBI NO: 15219342 NR Description: hypothetical protein common family; protein id:
  misc_feature (1)..(186): Homolog of NCBI NO: 33304380 NR Description: metacaspase 7 [Arabidopsis thaliana]
  misc_feature (1)..(186): Homolog of NCBI NO: 15219340 NR Description: hypothetical protein common family; protein id:
MLKEQTGKDDIDVGSIRMTLFNIFGDDASPKIKKFMKVMLGKFHQGQSGEQGSGGGGVFGMVGALAQEFLKAKLEGKEEEAFKPALEQEVHSVDEVYAGSKAWAPNNGILISGCQTNQTSADATTPQGVSFGALSNAIQTILADKHGKVTNKDLVMKARELLSKQGYTQQPGLYCSDEHVHVAFIC

SEQ ID NO: 12148 - protein, 169 aa, Zea mays subsp. mays
  peptide (1)..(169): Ceres Seq. ID no. 12406815
  misc_feature (1)..(169): Pfam Name: Caspase domain Pfam Description: Caspase domain
  misc_feature (1)..(169): Homolog of NCBI NO: 34908928 NR Description: putative latex-abundant protein [Oryza sativa
  misc_feature (1)..(169): Homolog of NCBI NO: 29367583 NR Description: latex-abundant protein-like protein [Oryza sativa
  misc_feature (1)..(169): Homolog of NCBI NO: 4235430 NR Description: latex-abundant protein [Hevea brasiliensis]
  misc_feature (1)..(169): Homolog of NCBI NO: 23343885 NR Description: metacaspase 1 [Lycopersicon esculentum]
  misc_feature (1)..(169): Homolog of NCBI NO: 40644374 NR Description: metacaspase type II [Picea abies]
  misc_feature (1)..(169): Homolog of NCBI NO: 15219345 NR Description: hypothetical protein common family; protein id: supported by cDNA: gi_19347868 [Arabidopsis thaliana]
  misc_feature (1)..(169): Homolog of NCBI NO: 15219342 NR Description: hypothetical protein common family; protein id:
  misc_feature (1)..(169): Homolog of NCBI NO: 33304380 NR Description: metacaspase 7 [Arabidopsis thaliana]
  misc_feature (1)..(169): Homolog of NCBI NO: 15219340 NR Description: hypothetical protein common family; protein id:
  misc_feature (1)..(169): Homolog of NCBI NO: 37788557 NR Description: metacaspase 7 [Arabidopsis thaliana]
MTLFNIFGDDASPKIKKFMKVMLGKFHQGQSGEQGSGGGGVFGMVGALAQEFLKAKLEGKEEEAFKPALEQEVHSVDEVYAGSKAWAPNNGILISGCQTNQTSADATTPQGVSFGALSNAIQTILADKHGKVTNKDLVMKARELLSKQGYTQQPGLYCSDEHVHVAFIC

SEQ ID NO: 12149 - DNA, 1093 bp, Zea mays subsp. mays
  misc_feature (1)..(1093): Ceres Seq. ID no. 12381286
  misc_feature: MA Experiment ID: 108530 Result: Down-regulated in Transcription
  misc_feature: MA Experiment 108530 PARAMETER Experiment Name: Zm_Imbibed_Seeds_P Parameter: Age (day) Value: 6 vs. 2
  misc_feature: MA Experiment 108530 PARAMETER Experiment Name: Zm_Imbibed_Seeds_P Parameter: Organism Value: Zea mays
  misc_feature: MA Experiment 108530 PARAMETER Experiment Name: Zm_Imbibed_Seeds_P Parameter: Plant Line Value: 35A19
  misc_feature: MA Experiment 108530 PARAMETER Experiment Name: Zm_Imbibed_Seeds_P Parameter: Tissue Value: Aerial vs. Embryo
  misc_feature: MA Experiment ID: 108535 Result: Up-regulated in Transcription
  misc_feature: MA Experiment 108535 PARAMETER Experiment Name: Zm_Meristem_P Parameter: Age (day) Value: 8
  misc_feature: MA Experiment 108535 PARAMETER Experiment Name: Zm_Meristem_P Parameter: Organism Value: Zea mays
  misc_feature: MA Experiment 108535 PARAMETER Experiment Name: Zm_Meristem_P Parameter: Plant Line Value: 35A19
  misc_feature: MA Experiment 108535 PARAMETER Experiment Name: Zm_Meristem_P Parameter: Tissue Value: Root Meristem vs. Above Root Meristem
  misc_feature: MA Experiment ID: 20000535 Result: Up-regulated in Transcription
  misc_feature: MA Experiment 20000535 PARAMETER Experiment Name: Zm_Hybrid_Seed_Dev_P Parameter: DAP Value: 30 vs. 12
  misc_feature: MA Experiment 20000535 PARAMETER Experiment Name: Zm_Hybrid_Seed_Dev_P Parameter: Organism Value: Zea mays
  misc_feature: MA Experiment 20000535 PARAMETER Experiment Name: Zm_Hybrid_Seed_Dev_P Parameter: Plant Line Value: 35A19
  misc_feature: MA Experiment 20000535 PARAMETER Experiment Name: Zm_Hybrid_Seed_Dev_P Parameter: Tissue Value: Embryo vs. Unfert Floret
gccgcctcctccccactgcctcgtgtggccgtcgtctcccgttcggaacgcccccccccctccggcgaaatggcccccaagcgaggtggcagggcgccggtgccggccaagaagaagacggataaagtgacgaaccctctattcgagaagaggccgaagcagttcggcatcggcggcgcgttgccgcccaagaaggacctgcaccggttcgtcaagtggcccaaggtcgtgcgtatccagcggcagcgccgcatcctcaagcagcgcctcaaggtaccaccggcgctcaaccagttcacccgcaccctcgacaagaacctcgctacgaacctgtttaagatgcttctcaagtaccggcctgaagacaaggctgccaagaaggagaggcttctgaagagggcccaagctgagaatgaaggaaaaactgttgagtcgaagaaaccaattgttgtgaagtatggccttaaccatgtgacttacctcattgagcagaacaaggctcagcttgttgtcatcgctcacgacgtggatccgatcgaacttgttgtgtggcttccagccctgtgcaggaagatggaggtcccttactgcattgttaaaggaaaggctcgccttggatcgattgttcacaagaagaatgcatcagtcttgtgtctgaccactgtcaagaacgaggataagcttgagttcagcaagatcttggaggctattaaggcaaacttcaacgacaagttcgatgaggtcaggaagaagtggggaggtggcatcatgggatccaagtcgcaggccaagaccaaggcccgggaaaagttgctcgccaaggaggctgcgcagcggatgacctagattgtctattgtctactgctgtgtctgccctgtagtttgacggggaagaactgatgaactcgtattgtggtttttctgaatctagtttcatatgtttctgtccaccagaccatgtttagaagctttgcaagacagagttaccatgtttagaagctttgcaagacagagttacagtgtttatgtgatacctcagatccatgcagctttgcttctatttgcctaagagcaaccccaaaagtatttcatg

SEQ ID NO: 12150 - protein, 281 aa, Zea mays subsp. mays
  peptide (1)..(281): Ceres Seq. ID no. 12381287
  misc_feature (136)..(231): Pfam Name: Ribosomal protein L7Ae/L30e/S12e/Gadd45 family Pfam Description: Ribosomal protein L7Ae/L30e/S12e/Gadd45 family
  misc_feature (24)..(281): Homolog of NCBI NO: 548774 NR Description: 60S RIBOSOMAL PROTEIN L7A >gi|542158|pir||S38360
  misc_feature (24)..(280): Homolog of NCBI NO: 15229338 NR Description: 60S RIBOSOMAL PROTEIN L7A protein; protein id: supported by cDNA: 24272., supported by cDNA: gi_15529279, by cDNA: gi_16974412, supported by cDNA: gi_17065363 [Arabidopsis
  misc_feature (24)..(280): Homolog of NCBI NO: 15226635 NR Description: 60S ribosomal protein L7A; protein id: supported by cDNA: 6394., supported by cDNA: gi_14326530, by cDNA: gi_15450612 [Arabidopsis thaliana]
  misc_feature (17)..(281): Homolog of NCBI NO: 20161741 NR Description: putative 60S ribosomal protein [Oryza sativa
  misc_feature (16)..(279): Homolog of NCBI NO: 17530825 NR Description: Ribosomal protein L7A CG3314-PD
  misc_feature (16)..(279): Homolog of NCBI NO: 1173062 NR Description: 60S RIBOSOMAL PROTEIN L7A
  misc_feature (12)..(280): Homolog of NCBI NO: 34853132 NR Description: similar to 60S ribosomal protein L7a (Surfeit
  misc_feature (20)..(280): Homolog of NCBI NO: 4506661 NR Description: ribosomal protein L7a; 60S ribosomal protein L7a;
  misc_feature (20)..(280): Homolog of NCBI NO: 7305443 NR Description: ribosomal protein L7a; surfeit 3 [Mus musculus]
  misc_feature (20)..(280): Homolog of NCBI NO: 6094094 NR Description: 60S RIBOSOMAL PROTEIN L7A (SURFEIT LOCUS PROTEIN
AASSPLPRVAVVSRSERPPPSGEMAPKRGGRAPVPAKKKTDKVTNPLFEKRPKQFGIGGALPPKKDLHRFVKWPKVVRIQRQRRILKQRLKVPPALNQFTRTLDKNLATNLFKMLLKYRPEDKAAKKERLLKRAQAENEGKTVESKKPIVVKYGLNHVTYLIEQNKAQLVVIAHDVDPIELVVWLPALCRKMEVPYCIVKGKARLGSIVHKKNASVLCLTTVKNEDKLEFSKILEAIKANFNDKFDEVRKKWGGGIMGSKSQAKTKAREKLLAKEAAQRMT

SEQ ID NO: 12151 - protein, 258 aa, Zea mays subsp. mays
  peptide (1)..(258): Ceres Seq. ID no. 12381288
  misc_feature (113)..(208): Pfam Name: Ribosomal protein L7Ae/L30e/S12e/Gadd45 family Pfam Description: Ribosomal protein L7Ae/L30e/S12e/Gadd45 family
  misc_feature (1)..(258): Homolog of NCBI NO: 548774 NR Description: 60S RIBOSOMAL PROTEIN L7A >gi|542158|pir||S38360
  misc_feature (1)..(257): Homolog of NCBI NO: 15229338 NR Description: 60S RIBOSOMAL PROTEIN L7A protein; protein id: supported by cDNA: 24272., supported by cDNA: gi_15529279, by cDNA: gi_16974412, supported by cDNA: gi_17065363 [Arabidopsis
  misc_feature (1)..(257): Homolog of NCBI NO: 15226635 NR Description: 60S ribosomal protein L7A; protein id: supported by cDNA: 6394., supported by cDNA: gi_14326530, by cDNA: gi_15450612 [Arabidopsis thaliana]
  misc_feature (1)..(258): Homolog of NCBI NO: 20161741 NR Description: putative 60S ribosomal protein [Oryza sativa
  misc_feature (1)..(256): Homolog of NCBI NO: 17530825 NR Description: Ribosomal protein L7A CG3314-PD
  misc_feature (1)..(256): Homolog of NCBI NO: 1173062 NR Description: 60S RIBOSOMAL PROTEIN L7A
  misc_feature (1)..(257): Homolog of NCBI NO: 34853132 NR Description: similar to 60S ribosomal protein L7a (Surfeit
  misc_feature (1)..(257): Homolog of NCBI NO: 4506661 NR Description: ribosomal protein L7a; 60S ribosomal protein L7a;
  misc_feature (1)..(257): Homolog of NCBI NO: 7305443 NR Description: ribosomal protein L7a; surfeit 3 [Mus musculus]
  misc_feature (1)..(257): Homolog of NCBI NO: 6094094 NR Description: 60S RIBOSOMAL PROTEIN L7A (SURFEIT LOCUS PROTEIN
MAPKRGGRAPVPAKKKTDKVTNPLFEKRPKQFGIGGALPPKKDLHRFVKWPKVVRIQRQRRILKQRLKVPPALNQFTRTLDKNLATNLFKMLLKYRPEDKAAKKERLLKRAQAENEGKTVESKKPIVVKYGLNHVTYLIEQNKAQLVVIAHDVDPIELVVWLPALCRKMEVPYCIVKGKARLGSIVHKKNASVLCLTTVKNEDKLEFSKILEAIKANFNDKFDEVRKKWGGGIMGSKSQAKTKAREKLLAKEAAQRMT

SEQ ID NO: 12152 - protein, 168 aa, Zea mays subsp. mays
  peptide (1)..(168): Ceres Seq. ID no. 12381289
  misc_feature (23)..(118): Pfam Name: Ribosomal protein L7Ae/L30e/S12e/Gadd45 family Pfam Description: Ribosomal protein L7Ae/L30e/S12e/Gadd45 family
  misc_feature (1)..(168): Homolog of NCBI NO: 548774 NR Description: 60S RIBOSOMAL PROTEIN L7A >gi|542158|pir||S38360
  misc_feature (1)..(167): Homolog of NCBI NO: 15229338 NR Description: 60S RIBOSOMAL PROTEIN L7A protein; protein id: supported by cDNA: 24272., supported by cDNA: gi_15529279, by cDNA: gi_16974412, supported by cDNA: gi_17065363 [Arabidopsis
  misc_feature (1)..(167): Homolog of NCBI NO: 15226635 NR Description: 60S ribosomal protein L7A; protein id: supported by cDNA: 6394., supported by cDNA: gi_14326530, by cDNA: gi_15450612 [Arabidopsis thaliana]
  misc_feature (1)..(168): Homolog of NCBI NO: 20161741 NR Description: putative 60S ribosomal protein [Oryza sativa
  misc_feature (1)..(166): Homolog of NCBI NO: 17530825 NR Description: Ribosomal protein L7A CG3314-PD
  misc_feature (1)..(166): Homolog of NCBI NO: 1173062 NR Description: 60S RIBOSOMAL PROTEIN L7A
  misc_feature (1)..(167): Homolog of NCBI NO: 34853132 NR Description: similar to 60S ribosomal protein L7a (Surfeit
  misc_feature (1)..(167): Homolog of NCBI NO: 4506661 NR Description: ribosomal protein L7a; 60S ribosomal protein L7a;
  misc_feature (1)..(167): Homolog of NCBI NO: 7305443 NR Description: ribosomal protein L7a; surfeit 3 [Mus musculus]
  misc_feature (1)..(167): Homolog of NCBI NO: 6094094 NR Description: 60S RIBOSOMAL PROTEIN L7A (SURFEIT LOCUS PROTEIN
MLLKYRPEDKAAKKERLLKRAQAENEGKTVESKKPIVVKYGLNHVTYLIEQNKAQLVVIAHDVDPIELVVWLPALCRKMEVPYCIVKGKARLGSIVHKKNASVLCLTTVKNEDKLEFSKILEAIKANFNDKFDEVRKKWGGGIMGSKSQAKTKAREKLLAKEAAQRMT

SEQ ID NO: 12153 - DNA, 842 bp, Zea mays subsp. mays
  misc_feature (1)..(842): Ceres Seq. ID no. 12413106
  misc_feature: MA Experiment ID: 108504 Result: Up-regulated in Transcription
  misc_feature: MA Experiment 108504 PARAMETER Experiment Name: Zm_Drought_P Parameter: Age (day) Value: 8
  misc_feature: MA Experiment 108504 PARAMETER Experiment Name: Zm_Drought_P Parameter: Organism Value: Zea mays
  misc_feature: MA Experiment 108504 PARAMETER Experiment Name: Zm_Drought_P Parameter: Plant Line Value: 35A19
  misc_feature: MA Experiment 108504 PARAMETER Experiment Name: Zm_Drought_P Parameter: Timepoint (hr) Value: 12
  misc_feature: MA Experiment 108504 PARAMETER Experiment Name: Zm_Drought_P Parameter: Tissue Value: Aerial
  misc_feature: MA Experiment 108504 PARAMETER Experiment Name: Zm_Drought_P Parameter: Treatment Value: Drought vs. No Drought
  misc_feature: MA Experiment ID: 108528 Result: Up-regulated in Transcription
  misc_feature: MA Experiment 108528 PARAMETER Experiment Name: Zm_Imbibed_Seeds_P Parameter: Age (day) Value: 5 vs. 2
  misc_feature: MA Experiment 108528 PARAMETER Experiment Name: Zm_Imbibed_Seeds_P Parameter: Organism Value: Zea mays
  misc_feature: MA Experiment 108528 PARAMETER Experiment Name: Zm_Imbibed_Seeds_P Parameter: Plant Line Value: 35A19
  misc_feature: MA Experiment 108528 PARAMETER Experiment Name: Zm_Imbibed_Seeds_P Parameter: Tissue Value: Aerial vs. Embryo
  misc_feature: MA Experiment ID: 108529 Result: Up-regulated in Transcription
  misc_feature: MA Experiment 108529 PARAMETER Experiment Name: Zm_Imbibed_Seeds_P Parameter: Age (day) Value: 5 vs. 2
  misc_feature: MA Experiment 108529 PARAMETER Experiment Name: Zm_Imbibed_Seeds_P Parameter: Organism Value: Zea mays
  misc_feature: MA Experiment 108529 PARAMETER Experiment Name: Zm_Imbibed_Seeds_P Parameter: Plant Line Value: 35A19
  misc_feature: MA Experiment 108529 PARAMETER Experiment Name: Zm_Imbibed_Seeds_P Parameter: Tissue Value: Roots vs. Embryo
  misc_feature: MA Experiment ID: 108530 Result: Up-regulated in Transcription
  misc_feature: MA Experiment 108530 PARAMETER Experiment Name: Zm_Imbibed_Seeds_P Parameter: Age (day) Value: 6 vs. 2
  misc_feature: MA Experiment 108530 PARAMETER Experiment Name: Zm_Imbibed_Seeds_P Parameter: Organism Value: Zea mays
  misc_feature: MA Experiment 108530 PARAMETER Experiment Name: Zm_Imbibed_Seeds_P Parameter: Plant Line Value: 35A19
  misc_feature: MA Experiment 108530 PARAMETER Experiment Name: Zm_Imbibed_Seeds_P Parameter: Tissue Value: Aerial vs. Embryo
  misc_feature: MA Experiment ID: 108534 Result: Down-regulated in Transcription
  misc_feature: MA Experiment 108534 PARAMETER Experiment Name: Zm_4deg_Cold_P Parameter: Age (hr) Value: 8
  misc_feature: MA Experiment 108534 PARAMETER Experiment Name: Zm_4deg_Cold_P Parameter: Organism Value: Zea mays
  misc_feature: MA Experiment 108534 PARAMETER Experiment Name: Zm_4deg_Cold_P Parameter: Plant Line Value: 35A19
  misc_feature: MA Experiment 108534 PARAMETER Experiment Name: Zm_4deg_Cold_P Parameter: Temperature (deg C) Value: 4 vs. 22
  misc_feature: MA Experiment 108534 PARAMETER Experiment Name: Zm_4deg_Cold_P Parameter: Timepoint (hr) Value: 6
  misc_feature: MA Experiment 108534 PARAMETER Experiment Name: Zm_4deg_Cold_P Parameter: Tissue Value: Aerial
  misc_feature: MA Experiment ID: 108535 Result: Down-regulated in Transcription
  misc_feature: MA Experiment 108535 PARAMETER Experiment Name: Zm_Meristem_P Parameter: Age (day) Value: 8
  misc_feature: MA Experiment 108535 PARAMETER Experiment Name: Zm_Meristem_P Parameter: Organism Value: Zea mays
  misc_feature: MA Experiment 108535 PARAMETER Experiment Name: Zm_Meristem_P Parameter: Plant Line Value: 35A19
  misc_feature: MA Experiment 108535 PARAMETER Experiment Name: Zm_Meristem_P Parameter: Tissue Value: Root Meristem vs. Above Root Meristem
  misc_feature: MA Experiment ID: 108544 Result: Up-regulated in Transcription
  misc_feature: MA Experiment ID: 108545 Result: Up-regulated in Transcription
  misc_feature: MA Experiment 108545 PARAMETER Experiment Name: Zm_Imbibed_Seeds_P Parameter: Age (day) Value: 3 vs. 2
  misc_feature: MA Experiment 108545 PARAMETER Experiment Name: Zm_Imbibed_Seeds_P Parameter: Organism Value: Zea mays
  misc_feature: MA Experiment 108545 PARAMETER Experiment Name: Zm_Imbibed_Seeds_P Parameter: Plant Line Value: 35A19
  misc_feature: MA Experiment 108545 PARAMETER Experiment Name: Zm_Imbibed_Seeds_P Parameter: Tissue Value: Aerial vs. Embryo
  misc_feature: MA Experiment ID: 108546 Result: Up-regulated in Transcription
  misc_feature: MA Experiment 108546 PARAMETER Experiment Name: Zm_Imbibed_Seeds_P Parameter: Age (day) Value: 3 vs. 2
  misc_feature: MA Experiment 108546 PARAMETER Experiment Name: Zm_Imbibed_Seeds_P Parameter: Organism Value: Zea mays
  misc_feature: MA Experiment 108546 PARAMETER Experiment Name: Zm_Imbibed_Seeds_P Parameter: Plant Line Value: 35A19
  misc_feature: MA Experiment 108546 PARAMETER Experiment Name: Zm_Imbibed_Seeds_P Parameter: Tissue Value: Roots vs. Embryo
  misc_feature: MA Experiment ID: 108547 Result: Up-regulated in Transcription
  misc_feature: MA Experiment 108547 PARAMETER Experiment Name: Zm_Imbibed_Seeds_P Parameter: Age (day) Value: 4 vs. 2
  misc_feature: MA Experiment 108547 PARAMETER Experiment Name: Zm_Imbibed_Seeds_P Parameter: Organism Value: Zea mays
  misc_feature: MA Experiment 108547 PARAMETER Experiment Name: Zm_Imbibed_Seeds_P Parameter: Plant Line Value: 35A19
  misc_feature: MA Experiment 108547 PARAMETER Experiment Name: Zm_Imbibed_Seeds_P Parameter: Tissue Value: Aerial vs. Embryo
  misc_feature: MA Experiment ID: 108556 Result: Up-regulated in Transcription
  misc_feature: MA Experiment 108556 PARAMETER Experiment Name: Zm_Drought_P Parameter: Age (day) Value: 9
  misc_feature: MA Experiment 108556 PARAMETER Experiment Name: Zm_Drought_P Parameter: Organism Value: Zea mays
  misc_feature: MA Experiment 108556 PARAMETER Experiment Name: Zm_Drought_P Parameter: Plant Line Value: 35A19
  misc_feature: MA Experiment 108556 PARAMETER Experiment Name: Zm_Drought_P Parameter: Timepoint (hr) Value: 24
  misc_feature: MA Experiment 108556 PARAMETER Experiment Name: Zm_Drought_P Parameter: Tissue Value: Aerial
  misc_feature: MA Experiment 108556 PARAMETER Experiment Name: Zm_Drought_P Parameter: Treatment Value: Drought vs. No Drought
  misc_feature: MA Experiment ID: 108687 Result: Down-regulated in Transcription
  misc_feature: MA Experiment 108687 PARAMETER Experiment Name: Zm_Embryos-Flowers__P Parameter: Tissue Value: Embryo vs. Aerial+
  misc_feature: MA Experiment ID: 108688 Result: Down-regulated in Transcription
  misc_feature: MA Experiment 108688 PARAMETER Experiment Name: Zm_Embryos-Flowers__P Parameter: Tissue Value: Immature Flowers vs. Aerial+
  misc_feature: MA Experiment ID: 108689 Result: Up-regulated in Transcription
  misc_feature: MA Experiment 108689 PARAMETER Experiment Name: Zm_Drought_Roots_P Parameter: Age (day) Value: 9
  misc_feature: MA Experiment 108689 PARAMETER Experiment Name: Zm_Drought_Roots_P Parameter: Organism Value: Zea mays
  misc_feature: MA Experiment 108689 PARAMETER Experiment Name: Zm_Drought_Roots_P Parameter: Plant Line Value: 35A19
  misc_feature: MA Experiment 108689 PARAMETER Experiment Name: Zm_Drought_Roots_P Parameter: Timepoint (hr) Value: 24
  misc_feature: MA Experiment 108689 PARAMETER Experiment Name: Zm_Drought_Roots_P Parameter: Tissue Value: Roots
  misc_feature: MA Experiment 108689 PARAMETER Experiment Name: Zm_Drought_Roots_P Parameter: Treatment Value: Drought vs. No Drought
  misc_feature: MA Experiment ID: 20000479 Result: Up-regulated in Transcription
  misc_feature: MA Experiment 20000479 PARAMETER Experiment Name: Zm_Drought_P Parameter: Age (day) Value: 10
  misc_feature: MA Experiment 20000479 PARAMETER Experiment Name: Zm_Drought_P Parameter: Organism Value: Zea mays
  misc_feature: MA Experiment 20000479 PARAMETER Experiment Name: Zm_Drought_P Parameter: Plant Line Value: 35A19
  misc_feature: MA Experiment 20000479 PARAMETER Experiment Name: Zm_Drought_P Parameter: Timepoint (hr) Value: 48
  misc_feature: MA Experiment 20000479 PARAMETER Experiment Name: Zm_Drought_P Parameter: Tissue Value: Aerial
  misc_feature: MA Experiment 20000479 PARAMETER Experiment Name: Zm_Drought_P Parameter: Treatment Value: Drought vs. No Drought
  misc_feature: MA Experiment ID: 20000492 Result: Down-regulated in Transcription
  misc_feature: MA Experiment 20000492 PARAMETER Experiment Name: Zm_Hybrid_Seed_Dev_P Parameter: DAP Value: 12
  misc_feature: MA Experiment 20000492 PARAMETER Experiment Name: Zm_Hybrid_Seed_Dev_P Parameter: Organism Value: Zea mays
  misc_feature: MA Experiment 20000492 PARAMETER Experiment Name: Zm_Hybrid_Seed_Dev_P Parameter: Plant Line Value: 35A19
  misc_feature: MA Experiment 20000492 PARAMETER Experiment Name: Zm_Hybrid_Seed_Dev_P Parameter: Tissue Value: Fert Kernel vs. Unfert Floret
aaaacccaatccatccaaacccatttccctcgctcccatcccgtcccgccccttgtctcttccgcttccccccgaccccgcgcgccgcggaccagcagccatgtcgtgctcccacctctccaccgcctggtcctcctcggcgctcgccagcagcgcctccaccacccgacggcgctcccccccgcgctcgggtctcctggtgcggtgttccctccgtgagctccgcacccgcatcgactccgtcaggaacacgcagaagatcacggaggccatgaagctggtggccgccgccaaggtccggcgcgcgcaggaggccgtcgtctcctctcgccctttctcggaggcgctggtggaggtgctctacaacatgaaccaggagatccagacggaggacatcgacctgcccctcacccgcacccgccccgtcaagaaggtggccctcgtggtcctgaccggcgagcgcggcctctgcgggagcttcaacaacaacgtgctcaagaaggcggaaacccgcatcgatgagctcaagcagctgggcctccagtacaccgtcgtcagcgtggggaagaagggcaacgcctacttccagcgccgcccctacatcccgttggagcgcgatctagaggactgccactggctcaacatcgctgcccggcctgatggcctcatgtgtggcaagcacgcctagttatagtatctgtgggagaaacgggactcacgtatatatgtgtgctgtgtatatagtgcggtgatgccatcttgtttgcttgcatatgcatactactgaacatatgatgatgaataaggtcatgccaactttagggcaaaaaataaacatactt

SEQ ID NO: 12154 - protein, 228 aa, Zea mays subsp. mays
  peptide (1)..(228): Ceres Seq. ID no. 12413107
  misc_feature (70)..(208): Pfam Name: ATP synthase Pfam Description: ATP synthase
  misc_feature (70)..(208): Pfam Name: ATP synthase Pfam Description: ATP synthase
  misc_feature (34)..(208): Homolog of NCBI NO: 27818005 NR Description: OSJNBb0041J06.11 [Oryza sativa (japonica
  misc_feature (34)..(208): Homolog of NCBI NO: 18412632 NR Description: coded for by A. thaliana cDNA AA041141; protein At4g04640.1, supported by cDNA: 6687., supported by cDNA: supported by cDNA: gi_17473928, supported by cDNA: gi_20148352
  misc_feature (31)..(208): Homolog of NCBI NO: 114640 NR Description: ATP synthase gamma chain, chloroplast precursor
  misc_feature (31)..(208): Homolog of NCBI NO: 231610 NR Description: ATP synthase gamma chain, chloroplast precursor
  misc_feature (34)..(205): Homolog of NCBI NO: 114643 NR Description: ATP synthase gamma chain, chloroplast precursor
  misc_feature (34)..(208): Homolog of NCBI NO: 18412632 NR Description: coded for by A. thaliana cDNA AA041141; protein At4g04640.1, supported by cDNA: 6687., supported by cDNA: supported by cDNA: gi_17473928, supported by cDNA: gi_20148352
  misc_feature (31)..(208): Homolog of NCBI NO: 231610 NR Description: ATP synthase gamma chain, chloroplast precursor
  misc_feature (62)..(198): Homolog of NCBI NO: 228698 NR Description: CF1 ATP synthase:SUBUNIT=gamma
  misc_feature (62)..(198): Homolog of NCBI NO: 114638 NR Description: ATP synthase gamma chain, chloroplast precursor
  misc_feature (91)..(208): Homolog of NCBI NO: 5708095 NR Description: ATP synthase gamma chain, chloroplast precursor
  misc_feature (58)..(208): Homolog of NCBI NO: 15218281 NR Description: ATP synthase gamma-subunit, putative; protein id: supported by cDNA: gi_17529041 [Arabidopsis thaliana]
  misc_feature (67)..(205): Homolog of NCBI NO: 755801 NR Description: ATP synthase [Spinacia oleracea]
  misc_feature (34)..(205): Homolog of NCBI NO: 114643 NR Description: ATP synthase gamma chain, chloroplast precursor
  misc_feature (31)..(208): Homolog of NCBI NO: 114640 NR Description: ATP synthase gamma chain, chloroplast precursor
  misc_feature (34)..(208): Homolog of NCBI NO: 27818005 NR Description: OSJNBb0041J06.11 [Oryza sativa (japonica
  misc_feature (67)..(205): Homolog of NCBI NO: 755801 NR Description: ATP synthase [Spinacia oleracea]
  misc_feature (58)..(208): Homolog of NCBI NO: 15218281 NR Description: ATP synthase gamma-subunit, putative; protein id: supported by cDNA: gi_17529041 [Arabidopsis thaliana]
  misc_feature (91)..(208): Homolog of NCBI NO: 5708095 NR Description: ATP synthase gamma chain, chloroplast precursor
  misc_feature (62)..(198): Homolog of NCBI NO: 114638 NR Description: ATP synthase gamma chain, chloroplast precursor
  misc_feature (62)..(198): Homolog of NCBI NO: 228698 NR Description: CF1 ATP synthase:SUBUNIT=gamma
KPNPSKPISLAPIPSRPLSLPLPPDPARRGPAAMSCSHLSTAWSSSALASSASTTRRRSPPRSGLLVRCSLRELRTRIDSVRNTQKITEAMKLVAAAKVRRAQEAVVSSRPFSEALVEVLYNMNQEIQTEDIDLPLTRTRPVKKVALVVLTGERGLCGSFNNNVLKKAETRIDELKQLGLQYTVVSVGKKGNAYFQRRPYIPLERDLEDCHWLNIAARPDGLMCGKHA

SEQ ID NO: 12155 - protein, 195 aa, Zea mays subsp. mays
  peptide (1)..(195): Ceres Seq. ID no. 12413108
  misc_feature (37)..(175): Pfam Name: ATP synthase Pfam Description: ATP synthase
  misc_feature (37)..(175): Pfam Name: ATP synthase Pfam Description: ATP synthase
  misc_feature (1)..(175): Homolog of NCBI NO: 27818005 NR Description: OSJNBb0041J06.11 [Oryza sativa (japonica
  misc_feature (1)..(175): Homolog of NCBI NO: 18412632 NR Description: coded for by A. thaliana cDNA AA041141; protein At4g04640.1, supported by cDNA: 6687., supported by cDNA: supported by cDNA: gi_17473928, supported by cDNA: gi_20148352
  misc_feature (1)..(175): Homolog of NCBI NO: 114640 NR Description: ATP synthase gamma chain, chloroplast precursor
  misc_feature (1)..(175): Homolog of NCBI NO: 231610 NR Description: ATP synthase gamma chain, chloroplast precursor
  misc_feature (1)..(172): Homolog of NCBI NO: 114643 NR Description: ATP synthase gamma chain, chloroplast precursor
  misc_feature (1)..(175): Homolog of NCBI NO: 18412632 NR Description: coded for by A. thaliana cDNA AA041141; protein At4g04640.1, supported by cDNA: 6687., supported by cDNA: supported by cDNA: gi_17473928, supported by cDNA: gi_20148352
  misc_feature (1)..(175): Homolog of NCBI NO: 231610 NR Description: ATP synthase gamma chain, chloroplast precursor
  misc_feature (29)..(165): Homolog of NCBI NO: 228698 NR Description: CF1 ATP synthase:SUBUNIT=gamma
  misc_feature (29)..(165): Homolog of NCBI NO: 114638 NR Description: ATP synthase gamma chain, chloroplast precursor
  misc_feature (58)..(175): Homolog of NCBI NO: 5708095 NR Description: ATP synthase gamma chain, chloroplast precursor
  misc_feature (25)..(175): Homolog of NCBI NO: 15218281 NR Description: ATP synthase gamma-subunit, putative; protein id: supported by cDNA: gi_17529041 [Arabidopsis thaliana]
  misc_feature (34)..(172): Homolog of NCBI NO: 755801 NR Description: ATP synthase [Spinacia oleracea]
  misc_feature (1)..(172): Homolog of NCBI NO: 114643 NR Description: ATP synthase gamma chain, chloroplast precursor
  misc_feature (1)..(175): Homolog of NCBI NO: 114640 NR Description: ATP synthase gamma chain, chloroplast precursor
  misc_feature (1)..(175): Homolog of NCBI NO: 27818005 NR Description: OSJNBb0041J06.11 [Oryza sativa (japonica
  misc_feature (34)..(172): Homolog of NCBI NO: 755801 NR Description: ATP synthase [Spinacia oleracea]
  misc_feature (25)..(175): Homolog of NCBI NO: 15218281 NR Description: ATP synthase gamma-subunit, putative; protein id: supported by cDNA: gi_17529041 [Arabidopsis thaliana]
  misc_feature (58)..(175): Homolog of NCBI NO: 5708095 NR Description: ATP synthase gamma chain, chloroplast precursor
  misc_feature (29)..(165): Homolog of NCBI NO: 114638 NR Description: ATP synthase gamma chain, chloroplast precursor
  misc_feature (29)..(165): Homolog of NCBI NO: 228698 NR Description: CF1 ATP synthase:SUBUNIT=gamma
MSCSHLSTAWSSSALASSASTTRRRSPPRSGLLVRCSLRELRTRIDSVRNTQKITEAMKLVAAAKVRRAQEAVVSSRPFSEALVEVLYNMNQEIQTEDIDLPLTRTRPVKKVALVVLTGERGLCGSFNNNVLKKAETRIDELKQLGLQYTVVSVGKKGNAYFQRRPYIPLERDLEDCHWLNIAARPDGLMCGKHA

SEQ ID NO: 12156 - protein, 138 aa, Zea mays subsp. mays
  peptide (1)..(138): Ceres Seq. ID no. 12413109
  misc_feature (1)..(118): Pfam Name: ATP synthase Pfam Description: ATP synthase
  misc_feature (1)..(118): Pfam Name: ATP synthase Pfam Description: ATP synthase
  misc_feature (1)..(118): Homolog of NCBI NO: 27818005 NR Description: OSJNBb0041J06.11 [Oryza sativa (japonica
  misc_feature (1)..(118): Homolog of NCBI NO: 18412632 NR Description: coded for by A. thaliana cDNA AA041141; protein At4g04640.1, supported by cDNA: 6687., supported by cDNA: supported by cDNA: gi_17473928, supported by cDNA: gi_20148352
  misc_feature (1)..(118): Homolog of NCBI NO: 114640 NR Description: ATP synthase gamma chain, chloroplast precursor
  misc_feature (1)..(118): Homolog of NCBI NO: 231610 NR Description: ATP synthase gamma chain, chloroplast precursor
  misc_feature (1)..(115): Homolog of NCBI NO: 114643 NR Description: ATP synthase gamma chain, chloroplast precursor
  misc_feature (1)..(118): Homolog of NCBI NO: 18412632 NR Description: coded for by A. thaliana cDNA AA041141; protein At4g04640.1, supported by cDNA: 6687., supported by cDNA: supported by cDNA: gi_17473928, supported by cDNA: gi_20148352
  misc_feature (1)..(118): Homolog of NCBI NO: 231610 NR Description: ATP synthase gamma chain, chloroplast precursor
  misc_feature (1)..(108): Homolog of NCBI NO: 228698 NR Description: CF1 ATP synthase:SUBUNIT=gamma
  misc_feature (1)..(108): Homolog of NCBI NO: 114638 NR Description: ATP synthase gamma chain, chloroplast precursor
  misc_feature (1)..(118): Homolog of NCBI NO: 5708095 NR Description: ATP synthase gamma chain, chloroplast precursor
  misc_feature (1)..(118): Homolog of NCBI NO: 15218281 NR Description: ATP synthase gamma-subunit, putative; protein id: supported by cDNA: gi_17529041 [Arabidopsis thaliana]
  misc_feature (1)..(115): Homolog of NCBI NO: 755801 NR Description: ATP synthase [Spinacia oleracea]
  misc_feature (1)..(115): Homolog of NCBI NO: 114643 NR Description: ATP synthase gamma chain, chloroplast precursor
  misc_feature (1)..(118): Homolog of NCBI NO: 114640 NR Description: ATP synthase gamma chain, chloroplast precursor
  misc_feature (1)..(118): Homolog of NCBI NO: 27818005 NR Description: OSJNBb0041J06.11 [Oryza sativa (japonica
  misc_feature (1)..(115): Homolog of NCBI NO: 755801 NR Description: ATP synthase [Spinacia oleracea]
  misc_feature (1)..(118): Homolog of NCBI NO: 15218281 NR Description: ATP synthase gamma-subunit, putative; protein id: supported by cDNA: gi_17529041 [Arabidopsis thaliana]
  misc_feature (1)..(118): Homolog of NCBI NO: 5708095 NR Description: ATP synthase gamma chain, chloroplast precursor
  misc_feature (1)..(108): Homolog of NCBI NO: 114638 NR Description: ATP synthase gamma chain, chloroplast precursor
  misc_feature (1)..(108): Homolog of NCBI NO: 228698 NR Description: CF1 ATP synthase:SUBUNIT=gamma
MKLVAAAKVRRAQEAVVSSRPFSEALVEVLYNMNQEIQTEDIDLPLTRTRPVKKVALVVLTGERGLCGSFNNNVLKKAETRIDELKQLGLQYTVVSVGKKGNAYFQRRPYIPLERDLEDCHWLNIAARPDGLMCGKHA

SEQ ID NO: 12157 - DNA, 773 bp, Zea mays subsp. mays
  misc_feature (1)..(773): Ceres Seq. ID no. 13492259
  misc_feature: MA Experiment ID: 108523 Result: Up-regulated in Transcription
  misc_feature: MA Experiment 108523 PARAMETER Experiment Name: Zm_42deg_Heat_P Parameter: Age (day) Value: 8
  misc_feature: MA Experiment 108523 PARAMETER Experiment Name: Zm_42deg_Heat_P Parameter: Organism Value: Zea mays
  misc_feature: MA Experiment 108523 PARAMETER Experiment Name: Zm_42deg_Heat_P Parameter: Plant Line Value: 35A19
  misc_feature: MA Experiment 108523 PARAMETER Experiment Name: Zm_42deg_Heat_P Parameter: Temperature (deg C) Value: 42 vs. 22
  misc_feature: MA Experiment 108523 PARAMETER Experiment Name: Zm_42deg_Heat_P Parameter: Timepoint (hr) Value: 6
  misc_feature: MA Experiment 108523 PARAMETER Experiment Name: Zm_42deg_Heat_P Parameter: Tissue Value: Aerial
  misc_feature: MA Experiment ID: 108528 Result: Down-regulated in Transcription
  misc_feature: MA Experiment 108528 PARAMETER Experiment Name: Zm_Imbibed_Seeds_P Parameter: Age (day) Value: 5 vs. 2
  misc_feature: MA Experiment 108528 PARAMETER Experiment Name: Zm_Imbibed_Seeds_P Parameter: Organism Value: Zea mays
  misc_feature: MA Experiment 108528 PARAMETER Experiment Name: Zm_Imbibed_Seeds_P Parameter: Plant Line Value: 35A19
  misc_feature: MA Experiment 108528 PARAMETER Experiment Name: Zm_Imbibed_Seeds_P Parameter: Tissue Value: Aerial vs. Embryo
  misc_feature: MA Experiment ID: 108530 Result: Down-regulated in Transcription
  misc_feature: MA Experiment 108530 PARAMETER Experiment Name: Zm_Imbibed_Seeds_P Parameter: Age (day) Value: 6 vs. 2
  misc_feature: MA Experiment 108530 PARAMETER Experiment Name: Zm_Imbibed_Seeds_P Parameter: Organism Value: Zea mays
  misc_feature: MA Experiment 108530 PARAMETER Experiment Name: Zm_Imbibed_Seeds_P Parameter: Plant Line Value: 35A19
  misc_feature: MA Experiment 108530 PARAMETER Experiment Name: Zm_Imbibed_Seeds_P Parameter: Tissue Value: Aerial vs. Embryo
  misc_feature: MA Experiment ID: 108535 Result: Up-regulated in Transcription
  misc_feature: MA Experiment 108535 PARAMETER Experiment Name: Zm_Meristem_P Parameter: Age (day) Value: 8
  misc_feature: MA Experiment 108535 PARAMETER Experiment Name: Zm_Meristem_P Parameter: Organism Value: Zea mays
  misc_feature: MA Experiment 108535 PARAMETER Experiment Name: Zm_Meristem_P Parameter: Plant Line Value: 35A19
  misc_feature: MA Experiment 108535 PARAMETER Experiment Name: Zm_Meristem_P Parameter: Tissue Value: Root Meristem vs. Above Root Meristem
  misc_feature: MA Experiment ID: 108544 Result: Down-regulated in Transcription
  misc_feature: MA Experiment ID: 108545 Result: Down-regulated in Transcription
  misc_feature: MA Experiment 108545 PARAMETER Experiment Name: Zm_Imbibed_Seeds_P Parameter: Age (day) Value: 3 vs. 2
  misc_feature: MA Experiment 108545 PARAMETER Experiment Name: Zm_Imbibed_Seeds_P Parameter: Organism Value: Zea mays
  misc_feature: MA Experiment 108545 PARAMETER Experiment Name: Zm_Imbibed_Seeds_P Parameter: Plant Line Value: 35A19
  misc_feature: MA Experiment 108545 PARAMETER Experiment Name: Zm_Imbibed_Seeds_P Parameter: Tissue Value: Aerial vs. Embryo
  misc_feature: MA Experiment ID: 108547 Result: Down-regulated in Transcription
  misc_feature: MA Experiment 108547 PARAMETER Experiment Name: Zm_Imbibed_Seeds_P Parameter: Age (day) Value: 4 vs. 2
  misc_feature: MA Experiment 108547 PARAMETER Experiment Name: Zm_Imbibed_Seeds_P Parameter: Organism Value: Zea mays
  misc_feature: MA Experiment 108547 PARAMETER Experiment Name: Zm_Imbibed_Seeds_P Parameter: Plant Line Value: 35A19
  misc_feature: MA Experiment 108547 PARAMETER Experiment Name: Zm_Imbibed_Seeds_P Parameter: Tissue Value: Aerial vs. Embryo
  misc_feature: MA Experiment ID: 108689 Result: Up-regulated in Transcription
  misc_feature: MA Experiment 108689 PARAMETER Experiment Name: Zm_Drought_Roots_P Parameter: Age (day) Value: 9
  misc_feature: MA Experiment 108689 PARAMETER Experiment Name: Zm_Drought_Roots_P Parameter: Organism Value: Zea mays
  misc_feature: MA Experiment 108689 PARAMETER Experiment Name: Zm_Drought_Roots_P Parameter: Plant Line Value: 35A19
  misc_feature: MA Experiment 108689 PARAMETER Experiment Name: Zm_Drought_Roots_P Parameter: Timepoint (hr) Value: 24
  misc_feature: MA Experiment 108689 PARAMETER Experiment Name: Zm_Drought_Roots_P Parameter: Tissue Value: Roots
  misc_feature: MA Experiment 108689 PARAMETER Experiment Name: Zm_Drought_Roots_P Parameter: Treatment Value: Drought vs. No Drought
  misc_feature: MA Experiment ID: 20000487 Result: Up-regulated in Transcription
  misc_feature: MA Experiment 20000487 PARAMETER Experiment Name: Zm_50mM_NH4NO3_L_to_H_P Parameter: Organism Value: Zea mays
  misc_feature: MA Experiment 20000487 PARAMETER Experiment Name: Zm_50mM_NH4NO3_L_to_H_P Parameter: Timepoint (hr) Value: 4
  misc_feature: MA Experiment 20000487 PARAMETER Experiment Name: Zm_50mM_NH4NO3_L_to_H_P Parameter: Tissue Value: Leaves
  misc_feature: MA Experiment 20000487 PARAMETER Experiment Name: Zm_50mM_NH4NO3_L_to_H_P Parameter: Treatment Value: 50mM NH4NO3 vs. 100mM Mannitol
  misc_feature: MA Experiment ID: 20000488 Result: Up-regulated in Transcription
  misc_feature: MA Experiment 20000488 PARAMETER Experiment Name: Zm_50mM_NH4NO3_L_to_H_P Parameter: Organism Value: Zea mays
  misc_feature: MA Experiment 20000488 PARAMETER Experiment Name: Zm_50mM_NH4NO3_L_to_H_P Parameter: Timepoint (hr) Value: 8
  misc_feature: MA Experiment 20000488 PARAMETER Experiment Name: Zm_50mM_NH4NO3_L_to_H_P Parameter: Tissue Value: Leaves
  misc_feature: MA Experiment 20000488 PARAMETER Experiment Name: Zm_50mM_NH4NO3_L_to_H_P Parameter: Treatment Value: 50mM NH4NO3 vs. 100mM Mannitol
  misc_feature: MA Experiment ID: 20000626 Result: Up-regulated in Transcription
  misc_feature: MA Experiment 20000626 PARAMETER Experiment Name: Zm_Herbicide-Treatments_P Parameter: Timepoint (hr) Value: 12
  misc_feature: MA Experiment 20000626 PARAMETER Experiment Name: Zm_Herbicide-Treatments_P Parameter: Tissue Value: Aerial
  misc_feature: MA Experiment 20000626 PARAMETER Experiment Name: Zm_Herbicide-Treatments_P Parameter: Treatment Value: Roundup vs. No Treatment
  misc_feature: MA Experiment ID: 20000632 Result: Down-regulated in Transcription
  misc_feature: MA Experiment 20000632 PARAMETER Experiment Name: Zm_Herbicide-Treatments_P Parameter: Timepoint (hr) Value: 4
  misc_feature: MA Experiment 20000632 PARAMETER Experiment Name: Zm_Herbicide-Treatments_P Parameter: Tissue Value: Aerial
  misc_feature: MA Experiment 20000632 PARAMETER Experiment Name: Zm_Herbicide-Treatments_P Parameter: Treatment Value: Glean vs. No Treatment
  misc_feature: MA Experiment ID: 20001606 Result: Up-regulated in Transcription
  misc_feature: MA Experiment 20001606 PARAMETER Experiment Name: Zm_50ppm_KNO3_L-to-H_P Parameter: Age (day) Value: 19
  misc_feature: MA Experiment 20001606 PARAMETER Experiment Name: Zm_50ppm_KNO3_L-to-H_P Parameter: Organism Value: Zea mays
  misc_feature: MA Experiment 20001606 PARAMETER Experiment Name: Zm_50ppm_KNO3_L-to-H_P Parameter: Plant Line Value: 35A19
  misc_feature: MA Experiment 20001606 PARAMETER Experiment Name: Zm_50ppm_KNO3_L-to-H_P Parameter: Timepoint (hr) Value: 8
  misc_feature: MA Experiment 20001606 PARAMETER Experiment Name: Zm_50ppm_KNO3_L-to-H_P Parameter: Tissue Value: Shoots
  misc_feature: MA Experiment 20001606 PARAMETER Experiment Name: Zm_50ppm_KNO3_L-to-H_P Parameter: Treatment Value: 50ppm KNO3 vs. 50ppm KCl
aagtcagtctcactcaagtaaagtggacgccaagtcagtcacactcacaccaccgtagcacacaccagtacaccacacactcgcctttccgatcccatccctctccagccaccttcctccgctcgccgtgcttctgcttcctccgccaccaccgccggcatggctgcgcgctgcccctacttcgccgtcgaggagtcctcccgcggcatccgctcgggggagtccccggccgcggcgctccgccggatcctcgcgacgcctggtgcgcaccaggcgccctgctgctacgacgcgctcggcgcgcgcctcgtcgagcgcgcggggtttccgatcgggttcatgggcggtttctgtgtttctgccgcgcgacttggcttgcctgatgttggcctcatttcctatggagaaatggtagatcaagggcgtctcatcaatgaagctgtttcaatcccagtgattggtgatggagacaatggttacggaaactctatgaatatcaagagaaccataaaaggatatatcaatgctggttttgctggaattatgcttgaggatcaggtggcacctaaagcatgtggacatactgaaggaaggaaagtcatatcaagggaggaagctgtcatgcacataaaagctgctgtagatgctaggaaagagagtggtagtagggggcacgagtaaggaggggtttatacaatgatctaatctagtgtgttaagtctgggtgcaatttatttggtggatttagtggagcttgagtgagatgatttggt

SEQ ID NO: 12158 - protein, 173 aa, Zea mays subsp. mays
  peptide (1)..(173): Ceres Seq. ID no. 13492260
  misc_feature (17)..(165): Pfam Name: Isocitrate lyase family Pfam Description: Isocitrate lyase family
  misc_feature (1)..(169): Homolog of NCBI NO: 38347227 NR Description: OSJNBa0044M19.9 [Oryza sativa (japonica
  misc_feature (1)..(169): Homolog of NCBI NO: 32490267 NR Description: OSJNBb0116K07.9 [Oryza sativa (japonica
  misc_feature (10)..(169): Homolog of NCBI NO: 30689278 NR Description: carboxyphosphonoenolpyruvate mutase -related thaliana] >gi|26450281|dbj|BAC42257.1| putative mutase [Arabidopsis thaliana] >gi|28827730|gb|AAO50709.1|
  misc_feature (10)..(169): Homolog of NCBI NO: 30689282 NR Description: carboxyphosphonoenolpyruvate mutase -related
  misc_feature (10)..(169): Homolog of NCBI NO: 25408843 NR Description: probable carboxyphosphonoenolpyruvate mutase - Arabidopsis thaliana >gi|3763927|gb|AAC64307.1| putative
  misc_feature (16)..(164): Homolog of NCBI NO: 33599708 NR Description: carboxyvinyl-carboxyphosphonate phosphorylmutase
  misc_feature (22)..(168): Homolog of NCBI NO: 23043034 NR Description: hypothetical protein [Trichodesmium erythraeum
  misc_feature (40)..(166): Homolog of NCBI NO: 40747280 NR Description: hypothetical protein AN9369.2 [Aspergillus
  misc_feature (12)..(166): Homolog of NCBI NO: 40739091 NR Description: hypothetical protein AN6882.2 [Aspergillus
  misc_feature (22)..(168): Homolog of NCBI NO: 17229355 NR Description: carboxyphosphonoenolpyruvate phosphonomutase sp. PCC 7120] >gi|25324632|pir||AI2038
MAARCPYFAVEESSRGIRSGESPAAALRRILATPGAHQAPCCYDALGARLVERAGFPIGFMGGFCVSAARLGLPDVGLISYGEMVDQGRLINEAVSIPVIGDGDNGYGNSMNIKRTIKGYINAGFAGIMLEDQVAPKACGHTEGRKVISREEAVMHIKAAVDARKESGSRGHE

SEQ ID NO: 12159 - protein, 126 aa, Zea mays subsp. mays
  peptide (1)..(126): Ceres Seq. ID no. 13492261
VSLTQVKWTPSQSHSHHRSTHQYTTHSPFRSHPSPATFLRSPCFCFLRHHRRHGCALPLLRRRGVLPRHPLGGVPGRGAPPDPRDAWCAPGALLLRRARRAPRRARGVSDRVHGRFLCFCRATWLA

SEQ ID NO: 12160 - protein, 113 aa, Zea mays subsp. mays
  peptide (1)..(113): Ceres Seq. ID no. 13492262
  misc_feature (1)..(105): Pfam Name: Isocitrate lyase family Pfam Description: Isocitrate lyase family
  misc_feature (1)..(109): Homolog of NCBI NO: 38347227 NR Description: OSJNBa0044M19.9 [Oryza sativa (japonica
  misc_feature (1)..(109): Homolog of NCBI NO: 32490267 NR Description: OSJNBb0116K07.9 [Oryza sativa (japonica
  misc_feature (1)..(109): Homolog of NCBI NO: 30689278 NR Description: carboxyphosphonoenolpyruvate mutase -related thaliana] >gi|26450281|dbj|BAC42257.1| putative mutase [Arabidopsis thaliana] >gi|28827730|gb|AAO50709.1|
  misc_feature (1)..(109): Homolog of NCBI NO: 30689282 NR Description: carboxyphosphonoenolpyruvate mutase -related
  misc_feature (1)..(109): Homolog of NCBI NO: 25408843 NR Description: probable carboxyphosphonoenolpyruvate mutase - Arabidopsis thaliana >gi|3763927|gb|AAC64307.1| putative
  misc_feature (1)..(104): Homolog of NCBI NO: 33599708 NR Description: carboxyvinyl-carboxyphosphonate phosphorylmutase
  misc_feature (1)..(108): Homolog of NCBI NO: 23043034 NR Description: hypothetical protein [Trichodesmium erythraeum
  misc_feature (1)..(106): Homolog of NCBI NO: 40747280 NR Description: hypothetical protein AN9369.2 [Aspergillus
  misc_feature (1)..(106): Homolog of NCBI NO: 40739091 NR Description: hypothetical protein AN6882.2 [Aspergillus
  misc_feature (1)..(108): Homolog of NCBI NO: 17229355 NR Description: carboxyphosphonoenolpyruvate phosphonomutase sp. PCC 7120] >gi|25324632|pir||AI2038
MGGFCVSAARLGLPDVGLISYGEMVDQGRLINEAVSIPVIGDGDNGYGNSMNIKRTIKGYINAGFAGIMLEDQVAPKACGHTEGRKVISREEAVMHIKAAVDARKESGSRGHE

SEQ ID NO: 12161 - DNA, 1619 bp, Zea mays subsp. mays
  misc_feature (1)..(1619): Ceres Seq. ID no. 12414375
  misc_feature: MA Experiment ID: 108535 Result: Up-regulated in Transcription
  misc_feature: MA Experiment 108535 PARAMETER Experiment Name: Zm_Meristem_P Parameter: Age (day) Value: 8
  misc_feature: MA Experiment 108535 PARAMETER Experiment Name: Zm_Meristem_P Parameter: Organism Value: Zea mays
  misc_feature: MA Experiment 108535 PARAMETER Experiment Name: Zm_Meristem_P Parameter: Plant Line Value: 35A19
  misc_feature: MA Experiment 108535 PARAMETER Experiment Name: Zm_Meristem_P Parameter: Tissue Value: Root Meristem vs. Above Root Meristem
gggtcgacaacaatttgccgggcacacccaagacccgcggaagcccacgacgacaagcctccatcgcctcttgttgtttgcgggccccatacgtcagagaccacaagcccgaggcttaactctccctgccgctaatccctcgcgccgccggagggaagcaagagatagatctgtccgcggccatggcggcggcggcggcggcggcggagcaaggcgtggacgccgcgaggaaagaggaggaggaggagcaggtagtgaatccgtgggaggtgtcggcggggaagggcggcatcgactacgacaagctcgtggaccagttcggctgccagcgcatcgacgacgcgctcgtggaccgcatcgcacgcctcaccgcccgaccaccgcactgcttcctccgccgaggcctcttcttcgcccaccgtgatttgaacgagatactggatttgtatgagaacgggcagaagttctacctctacacggggagggggccctcgtcggaggccctgcacctcggccacctcatccccttcatgttcacaaaatacttgcaggaggcttttaaggtgcccctagttatacaactgactgacgatgagaagtacttgtggaaaaacttgactattcaggaaagtaaaaggcttgcccgtgaaaatgctaaagatattatagcatgtggttttgacattgaaagaacattcattttctctgatttttcttttgttggaggtgctttttatgaaaacatgatgcaagttgccagatgtgtaactatgaataaggctattggaatatttgggttcaatcttgaggatcacataagaaaggttagctttcctccagtgcaggcagtcccatcattcccttcttcatttccccatctcttcgctggcaaggaccaactgcggtgtcttatcccatgtgcaatagatcaggatccatattttaggatgactcgtgatgttgctcctagaattggttatcagaaaccatcactgattgaatctagattttttcctgctcttcagggggagaacacaaaaatgtcagctagtgacgcaaattcggcgatatacgtgacagatagtgctaaagaaataaagacaaaggtgaataaatatgccttctcaggtggccaggactcaatagagttccatagaaaacttggcgctaaccttgatgtggatgtcccaatcaaatacctgaacttcttccttgaagatgatgacgagcttgcgcacataaaaaaggagtacaaggagggaaggatgttgactggtgaagtgaagcaacggcttattgcagttctatctgagattgttgctagacaccagagagctagagctcaagtgaccgaagagatggtcgatgcattcatggcagtgaggcctcttcccaatatgtttggctgagcatcacggcgacaacttgaacaaacatttttgttatcagggagaattttaagagtctttagaattgtcgtgccaccataagtatcccctgtgttttacttcttcgggatttaggcaaacctggccaaacatcccatgtggtggctgtggttgattttgtaaactcatacttgatatggtatcaatgattcaattcagacattttttttc

SEQ ID NO: 12162 - protein, 408 aa, Zea mays subsp. mays
  peptide (1)..(408): Ceres Seq. ID no. 12414376
  misc_feature (16)..(407): Homolog of NCBI NO: 15229319 NR Description: putative tryptophanyl-tRNA synthetase; protein At3g04600.1, supported by cDNA: gi_19310592 [Arabidopsis
  misc_feature (1)..(403): Homolog of NCBI NO: 32709 NR Description: IFP53 [Homo sapiens]
  misc_feature (1)..(403): Homolog of NCBI NO: 135191 NR Description: Tryptophanyl-tRNA synthetase (Tryptophan--tRNA
  misc_feature (1)..(403): Homolog of NCBI NO: 4759316 NR Description: tryptophanyl-tRNA synthetase; interferon-induced
  misc_feature (19)..(403): Homolog of NCBI NO: 2851538 NR Description: TRYPTOPHANYL-TRNA SYNTHETASE (TRYPTOPHAN--TRNA
  misc_feature (4)..(403): Homolog of NCBI NO: 37590880 NR Description: Unknown (protein for MGC:73274) [Danio rerio]
  misc_feature (1)..(403): Homolog of NCBI NO: 837 NR Description: tryptophan tRNA ligase (AA 1-459) [Bos taurus]
  misc_feature (1)..(403): Homolog of NCBI NO: 27806353 NR Description: tryptophanyl-tRNA synthetase [Bos taurus]
  misc_feature (19)..(403): Homolog of NCBI NO: 7428462 NR Description: tryptophan-tRNA ligase (EC 6.1.1.2) [validated] -
  misc_feature (1)..(403): Homolog of NCBI NO: 12835778 NR Description: unnamed protein product [Mus musculus]
MAAAAAAAEQGVDAARKEEEEEQVVNPWEVSAGKGGIDYDKLVDQFGCQRIDDALVDRIARLTARPPHCFLRRGLFFAHRDLNEILDLYENGQKFYLYTGRGPSSEALHLGHLIPFMFTKYLQEAFKVPLVIQLTDDEKYLWKNLTIQESKRLARENAKDIIACGFDIERTFIFSDFSFVGGAFYENMMQVARCVTMNKAIGIFGFNLEDHIRKVSFPPVQAVPSFPSSFPHLFAGKDQLRCLIPCAIDQDPYFRMTRDVAPRIGYQKPSLIESRFFPALQGENTKMSASDANSAIYVTDSAKEIKTKVNKYAFSGGQDSIEFHRKLGANLDVDVPIKYLNFFLEDDDELAHIKKEYKEGRMLTGEVKQRLIAVLSEIVARHQRARAQVTEEMVDAFMAVRPLPNMFG

SEQ ID NO: 12163 - protein, 292 aa, Zea mays subsp. mays
  peptide (1)..(292): Ceres Seq. ID no. 12414377
  misc_feature (1)..(291): Homolog of NCBI NO: 15229319 NR Description: putative tryptophanyl-tRNA synthetase; protein At3g04600.1, supported by cDNA: gi_19310592 [Arabidopsis
  misc_feature (1)..(287): Homolog of NCBI NO: 32709 NR Description: IFP53 [Homo sapiens]
  misc_feature (1)..(287): Homolog of NCBI NO: 135191 NR Description: Tryptophanyl-tRNA synthetase (Tryptophan--tRNA
  misc_feature (1)..(287): Homolog of NCBI NO: 4759316 NR Description: tryptophanyl-tRNA synthetase; interferon-induced
  misc_feature (1)..(287): Homolog of NCBI NO: 2851538 NR Description: TRYPTOPHANYL-TRNA SYNTHETASE (TRYPTOPHAN--TRNA
  misc_feature (1)..(287): Homolog of NCBI NO: 37590880 NR Description: Unknown (protein for MGC:73274) [Danio rerio]
  misc_feature (1)..(287): Homolog of NCBI NO: 837 NR Description: tryptophan tRNA ligase (AA 1-459) [Bos taurus]
  misc_feature (1)..(287): Homolog of NCBI NO: 27806353 NR Description: tryptophanyl-tRNA synthetase [Bos taurus]
  misc_feature (1)..(287): Homolog of NCBI NO: 7428462 NR Description: tryptophan-tRNA ligase (EC 6.1.1.2) [validated] -
  misc_feature (1)..(287): Homolog of NCBI NO: 12835778 NR Description: unnamed protein product [Mus musculus]
MFTKYLQEAFKVPLVIQLTDDEKYLWKNLTIQESKRLARENAKDIIACGFDIERTFIFSDFSFVGGAFYENMMQVARCVTMNKAIGIFGFNLEDHIRKVSFPPVQAVPSFPSSFPHLFAGKDQLRCLIPCAIDQDPYFRMTRDVAPRIGYQKPSLIESRFFPALQGENTKMSASDANSAIYVTDSAKEIKTKVNKYAFSGGQDSIEFHRKLGANLDVDVPIKYLNFFLEDDDELAHIKKEYKEGRMLTGEVKQRLIAVLSEIVARHQRARAQVTEEMVDAFMAVRPLPNMFG

SEQ ID NO: 12164 - protein, 221 aa, Zea mays subsp. mays
  peptide (1)..(221): Ceres Seq. ID no. 12414378
  misc_feature (1)..(216): Homolog of NCBI NO: 837 NR Description: tryptophan tRNA ligase (AA 1-459) [Bos taurus]
  misc_feature (1)..(216): Homolog of NCBI NO: 27806353 NR Description: tryptophanyl-tRNA synthetase [Bos taurus]
  misc_feature (1)..(216): Homolog of NCBI NO: 7428462 NR Description: tryptophan-tRNA ligase (EC 6.1.1.2) [validated] -
  misc_feature (1)..(216): Homolog of NCBI NO: 12835778 NR Description: unnamed protein product [Mus musculus]
  misc_feature (1)..(220): Homolog of NCBI NO: 15229319 NR Description: putative tryptophanyl-tRNA synthetase; protein At3g04600.1, supported by cDNA: gi_19310592 [Arabidopsis
  misc_feature (1)..(216): Homolog of NCBI NO: 32709 NR Description: IFP53 [Homo sapiens]
  misc_feature (1)..(216): Homolog of NCBI NO: 135191 NR Description: Tryptophanyl-tRNA synthetase (Tryptophan--tRNA
  misc_feature (1)..(216): Homolog of NCBI NO: 4759316 NR Description: tryptophanyl-tRNA synthetase; interferon-induced
  misc_feature (1)..(216): Homolog of NCBI NO: 2851538 NR Description: TRYPTOPHANYL-TRNA SYNTHETASE (TRYPTOPHAN--TRNA
  misc_feature (1)..(216): Homolog of NCBI NO: 37590880 NR Description: Unknown (protein for MGC:73274) [Danio rerio]
MMQVARCVTMNKAIGIFGFNLEDHIRKVSFPPVQAVPSFPSSFPHLFAGKDQLRCLIPCAIDQDPYFRMTRDVAPRIGYQKPSLIESRFFPALQGENTKMSASDANSAIYVTDSAKEIKTKVNKYAFSGGQDSIEFHRKLGANLDVDVPIKYLNFFLEDDDELAHIKKEYKEGRMLTGEVKQRLIAVLSEIVARHQRARAQVTEEMVDAFMAVRPLPNMFG

SEQ ID NO: 12165 - DNA, 1254 bp, Zea mays subsp. mays
  misc_feature (1)..(1254): Ceres Seq. ID no. 12411619
  misc_feature: MA Experiment ID: 108522 Result: Down-regulated in Transcription
  misc_feature: MA Experiment 108522 PARAMETER Experiment Name: Zm_42deg_Heat_P Parameter: Age (day) Value: 8
  misc_feature: MA Experiment 108522 PARAMETER Experiment Name: Zm_42deg_Heat_P Parameter: Organism Value: Zea mays
  misc_feature: MA Experiment 108522 PARAMETER Experiment Name: Zm_42deg_Heat_P Parameter: Plant Line Value: 35A19
  misc_feature: MA Experiment 108522 PARAMETER Experiment Name: Zm_42deg_Heat_P Parameter: Temperature (deg C) Value: 42 vs. 22
  misc_feature: MA Experiment 108522 PARAMETER Experiment Name: Zm_42deg_Heat_P Parameter: Timepoint (hr) Value: 1
  misc_feature: MA Experiment 108522 PARAMETER Experiment Name: Zm_42deg_Heat_P Parameter: Tissue Value: Aerial
  misc_feature: MA Experiment ID: 108523 Result: Down-regulated in Transcription
  misc_feature: MA Experiment 108523 PARAMETER Experiment Name: Zm_42deg_Heat_P Parameter: Age (day) Value: 8
  misc_feature: MA Experiment 108523 PARAMETER Experiment Name: Zm_42deg_Heat_P Parameter: Organism Value: Zea mays
  misc_feature: MA Experiment 108523 PARAMETER Experiment Name: Zm_42deg_Heat_P Parameter: Plant Line Value: 35A19
  misc_feature: MA Experiment 108523 PARAMETER Experiment Name: Zm_42deg_Heat_P Parameter: Temperature (deg C) Value: 42 vs. 22
  misc_feature: MA Experiment 108523 PARAMETER Experiment Name: Zm_42deg_Heat_P Parameter: Timepoint (hr) Value: 6
  misc_feature: MA Experiment 108523 PARAMETER Experiment Name: Zm_42deg_Heat_P Parameter: Tissue Value: Aerial
  misc_feature: MA Experiment ID: 108528 Result: Up-regulated in Transcription
  misc_feature: MA Experiment 108528 PARAMETER Experiment Name: Zm_Imbibed_Seeds_P Parameter: Age (day) Value: 5 vs. 2
  misc_feature: MA Experiment 108528 PARAMETER Experiment Name: Zm_Imbibed_Seeds_P Parameter: Organism Value: Zea mays
  misc_feature: MA Experiment 108528 PARAMETER Experiment Name: Zm_Imbibed_Seeds_P Parameter: Plant Line Value: 35A19
  misc_feature: MA Experiment 108528 PARAMETER Experiment Name: Zm_Imbibed_Seeds_P Parameter: Tissue Value: Aerial vs. Embryo
  misc_feature: MA Experiment ID: 108529 Result: Down-regulated in Transcription
  misc_feature: MA Experiment 108529 PARAMETER Experiment Name: Zm_Imbibed_Seeds_P Parameter: Age (day) Value: 5 vs. 2
  misc_feature: MA Experiment 108529 PARAMETER Experiment Name: Zm_Imbibed_Seeds_P Parameter: Organism Value: Zea mays
  misc_feature: MA Experiment 108529 PARAMETER Experiment Name: Zm_Imbibed_Seeds_P Parameter: Plant Line Value: 35A19
  misc_feature: MA Experiment 108529 PARAMETER Experiment Name: Zm_Imbibed_Seeds_P Parameter: Tissue Value: Roots vs. Embryo
  misc_feature: MA Experiment ID: 108530 Result: Up-regulated in Transcription
  misc_feature: MA Experiment 108530 PARAMETER Experiment Name: Zm_Imbibed_Seeds_P Parameter: Age (day) Value: 6 vs. 2
  misc_feature: MA Experiment 108530 PARAMETER Experiment Name: Zm_Imbibed_Seeds_P Parameter: Organism Value: Zea mays
  misc_feature: MA Experiment 108530 PARAMETER Experiment Name: Zm_Imbibed_Seeds_P Parameter: Plant Line Value: 35A19
  misc_feature: MA Experiment 108530 PARAMETER Experiment Name: Zm_Imbibed_Seeds_P Parameter: Tissue Value: Aerial vs. Embryo
  misc_feature: MA Experiment ID: 108543 Result: Up-regulated in Transcription
  misc_feature: MA Experiment ID: 108546 Result: Down-regulated in Transcription
  misc_feature: MA Experiment 108546 PARAMETER Experiment Name: Zm_Imbibed_Seeds_P Parameter: Age (day) Value: 3 vs. 2
  misc_feature: MA Experiment 108546 PARAMETER Experiment Name: Zm_Imbibed_Seeds_P Parameter: Organism Value: Zea mays
  misc_feature: MA Experiment 108546 PARAMETER Experiment Name: Zm_Imbibed_Seeds_P Parameter: Plant Line Value: 35A19
  misc_feature: MA Experiment 108546 PARAMETER Experiment Name: Zm_Imbibed_Seeds_P Parameter: Tissue Value: Roots vs. Embryo
  misc_feature: MA Experiment ID: 108547 Result: Up-regulated in Transcription
  misc_feature: MA Experiment 108547 PARAMETER Experiment Name: Zm_Imbibed_Seeds_P Parameter: Age (day) Value: 4 vs. 2
  misc_feature: MA Experiment 108547 PARAMETER Experiment Name: Zm_Imbibed_Seeds_P Parameter: Organism Value: Zea mays
  misc_feature: MA Experiment 108547 PARAMETER Experiment Name: Zm_Imbibed_Seeds_P Parameter: Plant Line Value: 35A19
  misc_feature: MA Experiment 108547 PARAMETER Experiment Name: Zm_Imbibed_Seeds_P Parameter: Tissue Value: Aerial vs. Embryo
  misc_feature: MA Experiment ID: 20000480 Result: Down-regulated in Transcription
  misc_feature: MA Experiment 20000480 PARAMETER Experiment Name: Zm_Drought_P Parameter: Age (day) Value: 11
  misc_feature: MA Experiment 20000480 PARAMETER Experiment Name: Zm_Drought_P Parameter: Organism Value: Zea mays
  misc_feature: MA Experiment 20000480 PARAMETER Experiment Name: Zm_Drought_P Parameter: Plant Line Value: 35A19
  misc_feature: MA Experiment 20000480 PARAMETER Experiment Name: Zm_Drought_P Parameter: Timepoint (hr) Value: 72
  misc_feature: MA Experiment 20000480 PARAMETER Experiment Name: Zm_Drought_P Parameter: Tissue Value: Aerial
  misc_feature: MA Experiment 20000480 PARAMETER Experiment Name: Zm_Drought_P Parameter: Treatment Value: Drought vs. No Drought
  misc_feature: MA Experiment ID: 20000626 Result: Down-regulated in Transcription
  misc_feature: MA Experiment 20000626 PARAMETER Experiment Name: Zm_Herbicide-Treatments_P Parameter: Timepoint (hr) Value: 12
  misc_feature: MA Experiment 20000626 PARAMETER Experiment Name: Zm_Herbicide-Treatments_P Parameter: Tissue Value: Aerial
  misc_feature: MA Experiment 20000626 PARAMETER Experiment Name: Zm_Herbicide-Treatments_P Parameter: Treatment Value: Roundup vs. No Treatment
atggaaccgtacctccagtggttagggatacagctcatggagctcggcggtaccgcaatgtcgctgctgctgctgctcgtgctcgccgcgtcgccattgcagcaggccagggcggttggcggcggcaggccgcgggtgccggccatcctggtgttcggcgactccatcgtggacacgggcaacaacaacgccgtcctcacgctcaccaagtccaacttcaggccatacggcaaggacctcaacggcggcgtacccaccggacgcttctccaacggccggattccgacggacttcgtagcttcacggctcggcttgaaagatctggttccggcgtatctcggcaccgacctcagcgacgacgacctctgcacgggcgtcagcttcgcgtctgggggcaccggctacgacccgctcacctccactctcgtggaggagctcaacatgttcgcggagtacaaggagaggctcgcaggggtcgtcggagacgaggccgccgccgcaggaatcgtggccgaaagcctgttccttgtctgcgccgggtcggacgacatcgccaacaactactacctcgcccccgtcagacctctgcagtacgacatctcggcgtacgtggatttccttgtggagcaggcctgcgacttcattaggcaactgtaccagcaaggggccaggaggatcgcggtcctggggatgccgccggtcgggtgcgtgccctcgcagcggaccctcgccggcggcctagccagggactgcgaccccgctcgcaaccacgcggcgcagctgtacaactccaggctgaaggaggaggtagtgctgctccagaaggagctggcgtgccagagaatcggctacgtggatatctacgacgtcctgcaggacatgatcacgaacccctgcaaatacggcttcgaggtctccacgagaggatgctgcggcaccggggacttggaggtgtcgctcctgtgcaaccagctgacggcgccgacgtgccctgacgaccggaaatacgtcttctgggacagcttccatcccaccgagaaagcatacgagatcatcgtggactacctgttcccgagatacatagagaacctgctataattacttctgctttaccgtcgcttctttaattcgatcgtttctagttgttgtcaagtttagacatgccgtctttgtttcccaatttaagcttttgctttaaaactcaagacttttcaaggaaatgaaatgacacctgctagcttgttgcaagctgtt

SEQ ID NO: 12166 - protein, 365 aa, Zea mays subsp. mays
  peptide (1)..(365): Ceres Seq. ID no. 12411620
  misc_feature (49)..(356): Pfam Name: GDSL-like Lipase/Acylhydrolase Pfam Description: GDSL-like Lipase/Acylhydrolase
  misc_feature (22)..(365): Homolog of NCBI NO: 30102970 NR Description: putative lipase/acylhydrolase [Oryza sativa
  misc_feature (19)..(360): Homolog of NCBI NO: 37534726 NR Description: putative anter-specific proline-rich protein
  misc_feature (46)..(365): Homolog of NCBI NO: 15222901 NR Description: family II extracellular lipase 3 (EXL3); protein At1g75900.1, supported by cDNA: gi_15054385 [Arabidopsis >gi|15054386|gb|AAK30018.1| family II lipase EXL3 [Arabidopsis
  misc_feature (46)..(365): Homolog of NCBI NO: 26449364 NR Description: putative family II lipase EXL3 [Arabidopsis
  misc_feature (46)..(356): Homolog of NCBI NO: 25404994 NR Description: protein T4O12.13 [imported] - Arabidopsis >gi|8778808|gb|AAF79815.1|AC007396_8 T4O12.13 [Arabidopsis
  misc_feature (142)..(361): Homolog of NCBI NO: 8778807 NR Description: T4O12.12 [Arabidopsis thaliana]
  misc_feature (142)..(361): Homolog of NCBI NO: 18410956 NR Description: family II extracellular lipase 2 (EXL2); protein At1g75890.1, supported by cDNA: gi_15054383 [Arabidopsis >gi|15054384|gb|AAK30017.1| family II lipase EXL2 [Arabidopsis
  misc_feature (47)..(142): Homolog of NCBI NO: 8778807 NR Description: T4O12.12 [Arabidopsis thaliana]
  misc_feature (47)..(142): Homolog of NCBI NO: 18410956 NR Description: family II extracellular lipase 2 (EXL2); protein At1g75890.1, supported by cDNA: gi_15054383 [Arabidopsis >gi|15054384|gb|AAK30017.1| family II lipase EXL2 [Arabidopsis
  misc_feature (22)..(361): Homolog of NCBI NO: 28393626 NR Description: putative family II extracellular lipase 1 (EXL1) thaliana] >gi|28827430|gb|AAO50559.1| putative family II
MEPYLQWLGIQLMELGGTAMSLLLLLVLAASPLQQARAVGGGRPRVPAILVFGDSIVDTGNNNAVLTLTKSNFRPYGKDLNGGVPTGRFSNGRIPTDFVASRLGLKDLVPAYLGTDLSDDDLCTGVSFASGGTGYDPLTSTLVEELNMFAEYKERLAGVVGDEAAAAGIVAESLFLVCAGSDDIANNYYLAPVRPLQYDISAYVDFLVEQACDFIRQLYQQGARRIAVLGMPPVGCVPSQRTLAGGLARDCDPARNHAAQLYNSRLKEEVVLLQKELACQRIGYVDIYDVLQDMITNPCKYGFEVSTRGCCGTGDLEVSLLCNQLTAPTCPDDRKYVFWDSFHPTEKAYEIIVDYLFPRYIENLL

SEQ ID NO: 12167 - protein, 353 aa, Zea mays subsp. mays
  peptide (1)..(353): Ceres Seq. ID no. 12411621
  misc_feature (37)..(344): Pfam Name: GDSL-like Lipase/Acylhydrolase Pfam Description: GDSL-like Lipase/Acylhydrolase
  misc_feature (10)..(353): Homolog of NCBI NO: 30102970 NR Description: putative lipase/acylhydrolase [Oryza sativa
  misc_feature (7)..(348): Homolog of NCBI NO: 37534726 NR Description: putative anter-specific proline-rich protein
  misc_feature (34)..(353): Homolog of NCBI NO: 15222901 NR Description: family II extracellular lipase 3 (EXL3); protein At1g75900.1, supported by cDNA: gi_15054385 [Arabidopsis >gi|15054386|gb|AAK30018.1| family II lipase EXL3 [Arabidopsis
  misc_feature (34)..(353): Homolog of NCBI NO: 26449364 NR Description: putative family II lipase EXL3 [Arabidopsis
  misc_feature (34)..(344): Homolog of NCBI NO: 25404994 NR Description: protein T4O12.13 [imported] - Arabidopsis >gi|8778808|gb|AAF79815.1|AC007396_8 T4O12.13 [Arabidopsis
  misc_feature (130)..(349): Homolog of NCBI NO: 8778807 NR Description: T4O12.12 [Arabidopsis thaliana]
  misc_feature (130)..(349): Homolog of NCBI NO: 18410956 NR Description: family II extracellular lipase 2 (EXL2); protein At1g75890.1, supported by cDNA: gi_15054383 [Arabidopsis >gi|15054384|gb|AAK30017.1| family II lipase EXL2 [Arabidopsis
  misc_feature (35)..(130): Homolog of NCBI NO: 8778807 NR Description: T4O12.12 [Arabidopsis thaliana]
  misc_feature (35)..(130): Homolog of NCBI NO: 18410956 NR Description: family II extracellular lipase 2 (EXL2); protein At1g75890.1, supported by cDNA: gi_15054383 [Arabidopsis >gi|15054384|gb|AAK30017.1| family II lipase EXL2 [Arabidopsis
  misc_feature (10)..(349): Homolog of NCBI NO: 28393626 NR Description: putative family II extracellular lipase 1 (EXL1) thaliana] >gi|28827430|gb|AAO50559.1| putative family II
MELGGTAMSLLLLLVLAASPLQQARAVGGGRPRVPAILVFGDSIVDTGNNNAVLTLTKSNFRPYGKDLNGGVPTGRFSNGRIPTDFVASRLGLKDLVPAYLGTDLSDDDLCTGVSFASGGTGYDPLTSTLVEELNMFAEYKERLAGVVGDEAAAAGIVAESLFLVCAGSDDIANNYYLAPVRPLQYDISAYVDFLVEQACDFIRQLYQQGARRIAVLGMPPVGCVPSQRTLAGGLARDCDPARNHAAQLYNSRLKEEVVLLQKELACQRIGYVDIYDVLQDMITNPCKYGFEVSTRGCCGTGDLEVSLLCNQLTAPTCPDDRKYVFWDSFHPTEKAYEIIVDYLFPRYIENLL

SEQ ID NO: 12168 - protein, 346 aa, Zea mays subsp. mays
  peptide (1)..(346): Ceres Seq. ID no. 12411622
  misc_feature (30)..(337): Pfam Name: GDSL-like Lipase/Acylhydrolase Pfam Description: GDSL-like Lipase/Acylhydrolase
  misc_feature (3)..(346): Homolog of NCBI NO: 30102970 NR Description: putative lipase/acylhydrolase [Oryza sativa
  misc_feature (1)..(341): Homolog of NCBI NO: 37534726 NR Description: putative anter-specific proline-rich protein
  misc_feature (27)..(346): Homolog of NCBI NO: 15222901 NR Description: family II extracellular lipase 3 (EXL3); protein At1g75900.1, supported by cDNA: gi_15054385 [Arabidopsis >gi|15054386|gb|AAK30018.1| family II lipase EXL3 [Arabidopsis
  misc_feature (27)..(346): Homolog of NCBI NO: 26449364 NR Description: putative family II lipase EXL3 [Arabidopsis
  misc_feature (27)..(337): Homolog of NCBI NO: 25404994 NR Description: protein T4O12.13 [imported] - Arabidopsis >gi|8778808|gb|AAF79815.1|AC007396_8 T4O12.13 [Arabidopsis
  misc_feature (123)..(342): Homolog of NCBI NO: 8778807 NR Description: T4O12.12 [Arabidopsis thaliana]
  misc_feature (123)..(342): Homolog of NCBI NO: 18410956 NR Description: family II extracellular lipase 2 (EXL2); protein At1g75890.1, supported by cDNA: gi_15054383 [Arabidopsis >gi|15054384|gb|AAK30017.1| family II lipase EXL2 [Arabidopsis
  misc_feature (28)..(123): Homolog of NCBI NO: 8778807 NR Description: T4O12.12 [Arabidopsis thaliana]
  misc_feature (28)..(123): Homolog of NCBI NO: 18410956 NR Description: family II extracellular lipase 2 (EXL2); protein At1g75890.1, supported by cDNA: gi_15054383 [Arabidopsis >gi|15054384|gb|AAK30017.1| family II lipase EXL2 [Arabidopsis
  misc_feature (3)..(342): Homolog of NCBI NO: 28393626 NR Description: putative family II extracellular lipase 1 (EXL1) thaliana] >gi|28827430|gb|AAO50559.1| putative family II
MSLLLLLVLAASPLQQARAVGGGRPRVPAILVFGDSIVDTGNNNAVLTLTKSNFRPYGKDLNGGVPTGRFSNGRIPTDFVASRLGLKDLVPAYLGTDLSDDDLCTGVSFASGGTGYDPLTSTLVEELNMFAEYKERLAGVVGDEAAAAGIVAESLFLVCAGSDDIANNYYLAPVRPLQYDISAYVDFLVEQACDFIRQLYQQGARRIAVLGMPPVGCVPSQRTLAGGLARDCDPARNHAAQLYNSRLKEEVVLLQKELACQRIGYVDIYDVLQDMITNPCKYGFEVSTRGCCGTGDLEVSLLCNQLTAPTCPDDRKYVFWDSFHPTEKAYEIIVDYLFPRYIENLL

SEQ ID NO: 12169 - DNA, 958 bp, Zea mays subsp. mays; identical to SEQ ID NO: 4183
  misc_feature (1)..(958): Ceres Seq. ID no. 13571162
  misc_feature: MA Experiment ID: 108529 Result: Down-regulated in Transcription
  misc_feature: MA Experiment 108529 PARAMETER Experiment Name: Zm_Imbibed_Seeds_P Parameter: Age (day) Value: 5 vs. 2
  misc_feature: MA Experiment 108529 PARAMETER Experiment Name: Zm_Imbibed_Seeds_P Parameter: Organism Value: Zea mays
  misc_feature: MA Experiment 108529 PARAMETER Experiment Name: Zm_Imbibed_Seeds_P Parameter: Plant Line Value: 35A19
  misc_feature: MA Experiment 108529 PARAMETER Experiment Name: Zm_Imbibed_Seeds_P Parameter: Tissue Value: Roots vs. Embryo
  misc_feature: MA Experiment ID: 108535 Result: Up-regulated in Transcription
  misc_feature: MA Experiment 108535 PARAMETER Experiment Name: Zm_Meristem_P Parameter: Age (day) Value: 8
  misc_feature: MA Experiment 108535 PARAMETER Experiment Name: Zm_Meristem_P Parameter: Organism Value: Zea mays
  misc_feature: MA Experiment 108535 PARAMETER Experiment Name: Zm_Meristem_P Parameter: Plant Line Value: 35A19
  misc_feature: MA Experiment 108535 PARAMETER Experiment Name: Zm_Meristem_P Parameter: Tissue Value: Root Meristem vs. Above Root Meristem
  misc_feature: MA Experiment ID: 108556 Result: Down-regulated in Transcription
  misc_feature: MA Experiment 108556 PARAMETER Experiment Name: Zm_Drought_P Parameter: Age (day) Value: 9
  misc_feature: MA Experiment 108556 PARAMETER Experiment Name: Zm_Drought_P Parameter: Organism Value: Zea mays
  misc_feature: MA Experiment 108556 PARAMETER Experiment Name: Zm_Drought_P Parameter: Plant Line Value: 35A19
  misc_feature: MA Experiment 108556 PARAMETER Experiment Name: Zm_Drought_P Parameter: Timepoint (hr) Value: 24
  misc_feature: MA Experiment 108556 PARAMETER Experiment Name: Zm_Drought_P Parameter: Tissue Value: Aerial
  misc_feature: MA Experiment 108556 PARAMETER Experiment Name: Zm_Drought_P Parameter: Treatment Value: Drought vs. No Drought
  misc_feature: MA Experiment ID: 20000478 Result: Down-regulated in Transcription
  misc_feature: MA Experiment 20000478 PARAMETER Experiment Name: Zm_5mM_SA_P Parameter: Age (day) Value: 11
  misc_feature: MA Experiment 20000478 PARAMETER Experiment Name: Zm_5mM_SA_P Parameter: Organism Value: Zea mays
  misc_feature: MA Experiment 20000478 PARAMETER Experiment Name: Zm_5mM_SA_P Parameter: Plant Line Value: 35A19
  misc_feature: MA Experiment 20000478 PARAMETER Experiment Name: Zm_5mM_SA_P Parameter: Timepoint (hr) Value: 72
  misc_feature: MA Experiment 20000478 PARAMETER Experiment Name: Zm_5mM_SA_P Parameter: Tissue Value: Aerial
  misc_feature: MA Experiment 20000478 PARAMETER Experiment Name: Zm_5mM_SA_P Parameter: Treatment Value: 5mM SA vs. No Treatment
  misc_feature: MA Experiment ID: 20000492 Result: Up-regulated in Transcription
  misc_feature: MA Experiment 20000492 PARAMETER Experiment Name: Zm_Hybrid_Seed_Dev_P Parameter: DAP Value: 12
  misc_feature: MA Experiment 20000492 PARAMETER Experiment Name: Zm_Hybrid_Seed_Dev_P Parameter: Organism Value: Zea mays
  misc_feature: MA Experiment 20000492 PARAMETER Experiment Name: Zm_Hybrid_Seed_Dev_P Parameter: Plant Line Value: 35A19
  misc_feature: MA Experiment 20000492 PARAMETER Experiment Name: Zm_Hybrid_Seed_Dev_P Parameter: Tissue Value: Fert Kernel vs. Unfert Floret
  misc_feature: MA Experiment ID: 20000535 Result: Up-regulated in Transcription
  misc_feature: MA Experiment 20000535 PARAMETER Experiment Name: Zm_Hybrid_Seed_Dev_P Parameter: DAP Value: 30 vs. 12
  misc_feature: MA Experiment 20000535 PARAMETER Experiment Name: Zm_Hybrid_Seed_Dev_P Parameter: Organism Value: Zea mays
  misc_feature: MA Experiment 20000535 PARAMETER Experiment Name: Zm_Hybrid_Seed_Dev_P Parameter: Plant Line Value: 35A19
  misc_feature: MA Experiment 20000535 PARAMETER Experiment Name: Zm_Hybrid_Seed_Dev_P Parameter: Tissue Value: Embryo vs. Unfert Floret
  misc_feature: MA Experiment ID: 20000626 Result: Up-regulated in Transcription
  misc_feature: MA Experiment 20000626 PARAMETER Experiment Name: Zm_Herbicide-Treatments_P Parameter: Timepoint (hr) Value: 12
  misc_feature: MA Experiment 20000626 PARAMETER Experiment Name: Zm_Herbicide-Treatments_P Parameter: Tissue Value: Aerial
  misc_feature: MA Experiment 20000626 PARAMETER Experiment Name: Zm_Herbicide-Treatments_P Parameter: Treatment Value: Roundup vs. No Treatment
  misc_feature: MA Experiment ID: 20000627 Result: Up-regulated in Transcription
  misc_feature: MA Experiment 20000627 PARAMETER Experiment Name: Zm_Herbicide-Treatments_P Parameter: Timepoint (hr) Value: 12
  misc_feature: MA Experiment 20000627 PARAMETER Experiment Name: Zm_Herbicide-Treatments_P Parameter: Tissue Value: Aerial
  misc_feature: MA Experiment 20000627 PARAMETER Experiment Name: Zm_Herbicide-Treatments_P Parameter: Treatment Value: Finale vs. No Treatment
  misc_feature: MA Experiment ID: 20000632 Result: Down-regulated in Transcription
  misc_feature: MA Experiment 20000632 PARAMETER Experiment Name: Zm_Herbicide-Treatments_P Parameter: Timepoint (hr) Value: 4
  misc_feature: MA Experiment 20000632 PARAMETER Experiment Name: Zm_Herbicide-Treatments_P Parameter: Tissue Value: Aerial
  misc_feature: MA Experiment 20000632 PARAMETER Experiment Name: Zm_Herbicide-Treatments_P Parameter: Treatment Value: Glean vs. No Treatment

SEQ ID NO: 12170 - protein, 231 aa, Zea mays subsp. mays; identical to SEQ ID NO: 4184
  peptide (1)..(231): Ceres Seq. ID no. 13571163
  misc_feature (45)..(211): Pfam Name: Chromadorea ALT protein Pfam Description: Chromadorea ALT protein
  misc_feature (21)..(224): Homolog of NCBI NO: 34894890 NR Description: B1140D12.10 [Oryza sativa (japonica
  misc_feature (25)..(230): Homolog of NCBI NO: 18401985 NR Description: expressed protein [Arabidopsis thaliana]
  misc_feature (59)..(224): Homolog of NCBI NO: 35210494 NR Description: aspartic acid-rich protein aspolin2 [Theragra
  misc_feature (59)..(224): Homolog of NCBI NO: 35210492 NR Description: aspartic acid-rich protein aspolin1 [Theragra
  misc_feature (59)..(224): Homolog of NCBI NO: 35210494 NR Description: aspartic acid-rich protein aspolin2 [Theragra
  misc_feature (50)..(224): Homolog of NCBI NO: 33284873 NR Description: SI:bZ1G18.2 (novel protein similar to human
  misc_feature (52)..(224): Homolog of NCBI NO: 35210492 NR Description: aspartic acid-rich protein aspolin1 [Theragra
  misc_feature (52)..(224): Homolog of NCBI NO: 35210494 NR Description: aspartic acid-rich protein aspolin2 [Theragra
  misc_feature (59)..(224): Homolog of NCBI NO: 35210494 NR Description: aspartic acid-rich protein aspolin2 [Theragra
  misc_feature (59)..(224): Homolog of NCBI NO: 35210492 NR Description: aspartic acid-rich protein aspolin1 [Theragra

SEQ ID NO: 12171 - protein, 211 aa, Zea mays subsp. mays; identical to SEQ ID NO: 4185
  peptide (1)..(211): Ceres Seq. ID no. 13571164
  misc_feature (25)..(191): Pfam Name: Chromadorea ALT protein Pfam Description: Chromadorea ALT protein
  misc_feature (1)..(204): Homolog of NCBI NO: 34894890 NR Description: B1140D12.10 [Oryza sativa (japonica
  misc_feature (5)..(210): Homolog of NCBI NO: 18401985 NR Description: expressed protein [Arabidopsis thaliana]
  misc_feature (39)..(204): Homolog of NCBI NO: 35210494 NR Description: aspartic acid-rich protein aspolin2 [Theragra
  misc_feature (39)..(204): Homolog of NCBI NO: 35210492 NR Description: aspartic acid-rich protein aspolin1 [Theragra
  misc_feature (39)..(204): Homolog of NCBI NO: 35210494 NR Description: aspartic acid-rich protein aspolin2 [Theragra
  misc_feature (30)..(204): Homolog of NCBI NO: 33284873 NR Description: SI:bZ1G18.2 (novel protein similar to human
  misc_feature (32)..(204): Homolog of NCBI NO: 35210492 NR Description: aspartic acid-rich protein aspolin1 [Theragra
  misc_feature (32)..(204): Homolog of NCBI NO: 35210494 NR Description: aspartic acid-rich protein aspolin2 [Theragra
  misc_feature (39)..(204): Homolog of NCBI NO: 35210494 NR Description: aspartic acid-rich protein aspolin2 [Theragra
  misc_feature (39)..(204): Homolog of NCBI NO: 35210492 NR Description: aspartic acid-rich protein aspolin1 [Theragra

SEQ ID NO: 12172 - protein, 195 aa, Zea mays subsp. mays; identical to SEQ ID NO: 4186
  peptide (1)..(195): Ceres Seq. ID no. 13571165
  misc_feature (9)..(175): Pfam Name: Chromadorea ALT protein Pfam Description: Chromadorea ALT protein
  misc_feature (1)..(188): Homolog of NCBI NO: 34894890 NR Description: B1140D12.10 [Oryza sativa (japonica
  misc_feature (1)..(194): Homolog of NCBI NO: 18401985 NR Description: expressed protein [Arabidopsis thaliana]
  misc_feature (23)..(188): Homolog of NCBI NO: 35210494 NR Description: aspartic acid-rich protein aspolin2 [Theragra
  misc_feature (23)..(188): Homolog of NCBI NO: 35210492 NR Description: aspartic acid-rich protein aspolin1 [Theragra
  misc_feature (23)..(188): Homolog of NCBI NO: 35210494 NR Description: aspartic acid-rich protein aspolin2 [Theragra
  misc_feature (14)..(188): Homolog of NCBI NO: 33284873 NR Description: SI:bZ1G18.2 (novel protein similar to human
  misc_feature (16)..(188): Homolog of NCBI NO: 35210492 NR Description: aspartic acid-rich protein aspolin1 [Theragra
  misc_feature (16)..(188): Homolog of NCBI NO: 35210494 NR Description: aspartic acid-rich protein aspolin2 [Theragra
  misc_feature (23)..(188): Homolog of NCBI NO: 35210494 NR Description: aspartic acid-rich protein aspolin2 [Theragra
  misc_feature (23)..(188): Homolog of NCBI NO: 35210492 NR Description: aspartic acid-rich protein aspolin1 [Theragra

SEQ ID NO: 12173 - DNA, 1617 bp, Zea mays subsp. mays
  misc_feature (1)..(1617): Ceres Seq. ID no. 12411615
  misc_feature: MA Experiment ID: 108527 Result: Down-regulated in Transcription
  misc_feature: MA Experiment 108527 PARAMETER Experiment Name: Zm_5mM_NO_P Parameter: Age (day) Value: 8
  misc_feature: MA Experiment 108527 PARAMETER Experiment Name: Zm_5mM_NO_P Parameter: Organism Value: Zea mays
  misc_feature: MA Experiment 108527 PARAMETER Experiment Name: Zm_5mM_NO_P Parameter: Plant Line Value: 35A19
  misc_feature: MA Experiment 108527 PARAMETER Experiment Name: Zm_5mM_NO_P Parameter: Timepoint (hr) Value: 6
  misc_feature: MA Experiment 108527 PARAMETER Experiment Name: Zm_5mM_NO_P Parameter: Tissue Value: Aerial
  misc_feature: MA Experiment 108527 PARAMETER Experiment Name: Zm_5mM_NO_P Parameter: Treatment Value: 5mM NO vs. No Treatment
aaccggacaaatcaccccgtcgtctcgtcccgtagtcactcgcagagtcgcagtcgcagcccctgcgcccaccgggatcgtgatggagagctgggtccgcgcggtgggtggaggccatccactcctctcgctcccagacagtcatctacctcgccgggcggtgcatcccaggcgctcggttggctcctctccgtgcccggcgcttcgggcaccgtcctcgaggtcgtcgtgccatactctagggcctccatggcgcagctccttggcaagatgcccctgcaattcactagcaagcaggctgcagaggacatggcactggccgcatacaatcgagcactcaagctttctggaccaggtctgcaagttatgggtgttggatttactgggtcactggcgagctcacgtccaaaacatggtgaccacaggttttacgtgtcaacatggacacataattgtctcaggacatcacatgttaccttgtcgaagggtttacggagtagggaggaagaagacaaggtttcaagctactttttgcttaaggcaatagcagatacctgcagagtttctgcaaccattcagtcagacattcacaaatctgaaattccagaagaaatcatggaacaatttgatgaagatcaagaactccagcaagttattaatgggcaagtttgcatgaaagtatataattttgctgctccggcggaaagtaacttgaacagaaaaataattctgcctggttcgttcaaccccttgcacgatggtcaccttagattgctagaagctgcagtaagcatgtgtgatgatgggcttccattctttgagatatcagcaattaatgctgataaacctccactatctattgcagaaattaagaggcgtgttgagcaatttagaaaagcagggaagaatgtgattatatctaaccagccatacttctataagaaagcagaacttttcccaggaagcgcttttataattggtgcagacactgcagcaaggcttgttaatcctaagtactatggaggagattacaacagaatgctggagatacttctcgaatgtaagagcatagggactacttttcttgttggtggtcgaaagattgaaggagatttcaaggtccttgagaacttagacattccagaagagctgagagaaatgttcatttctattccggaggaaaagtttcgcatagatatttcatctactgaaataagaaagagccaagggctctgatgtatcaagtggtcgtattctacagcagatttgggatgattctccacgactatagaagattatgataggtccattcatgcatccttgcaaaggaactgttgatgtattctcagggagaatattttatttaacttttgtcttgactgggccccttggtattttgttcagcaaattggaatcaatcctcttgtagaacctcttgatgtcttcactaccccttgcggctaggtggtcaacctctgtctcatatctttggtacaacgctggcaaagtgtgggcgcagagaaatcctgtggatggaatataagaattgttaaatgtatgtcacaactgctttatatattgtcttgccttgttataaaagtcacatttttctgcgct

SEQ ID NO: 12174 - protein, 411 aa, Zea mays subsp. mays
  peptide (1)..(411): Ceres Seq. ID no. 12411616
  misc_feature (53)..(410): Homolog of NCBI NO: 30677890 NR Description: expressed protein [Arabidopsis thaliana]
  misc_feature (53)..(410): Homolog of NCBI NO: 30677893 NR Description: expressed protein [Arabidopsis thaliana]
  misc_feature (53)..(410): Homolog of NCBI NO: 26451899 NR Description: unknown protein [Arabidopsis thaliana]
  misc_feature (53)..(410): Homolog of NCBI NO: 21537099 NR Description: unknown [Arabidopsis thaliana]
  misc_feature (176)..(299): Homolog of NCBI NO: 34911372 NR Description: P0034C09.17 [Oryza sativa (japonica
  misc_feature (337)..(410): Homolog of NCBI NO: 34911372 NR Description: P0034C09.17 [Oryza sativa (japonica
  misc_feature (53)..(123): Homolog of NCBI NO: 34911372 NR Description: P0034C09.17 [Oryza sativa (japonica
  misc_feature (53)..(410): Homolog of NCBI NO: 15232221 NR Description: unknown protein; protein id: At3g27610.1
  misc_feature (53)..(410): Homolog of NCBI NO: 9294466 NR Description: gb|AAD14522.1~gene_id:MGF10.2~similar to unknown
  misc_feature (53)..(180): Homolog of NCBI NO: 25371182 NR Description: hypothetical protein At2g01220 [imported] - thaliana >gi|4262229|gb|AAD14522.1| unknown protein [Arabidopsis
NRTNHPVVSSRSHSQSRSRSPCAHRDRDGELGPRGGWRPSTPLAPRQSSTSPGGASQALGWLLSVPGASGTVLEVVVPYSRASMAQLLGKMPLQFTSKQAAEDMALAAYNRALKLSGPGLQVMGVGFTGSLASSRPKHGDHRFYVSTWTHNCLRTSHVTLSKGLRSREEEDKVSSYFLLKAIADTCRVSATIQSDIHKSEIPEEIMEQFDEDQELQQVINGQVCMKVYNFAAPAESNLNRKIILPGSFNPLHDGHLRLLEAAVSMCDDGLPFFEISAINADKPPLSIAEIKRRVEQFRKAGKNVIISNQPYFYKKAELFPGSAFIIGADTAARLVNPKYYGGDYNRMLEILLECKSIGTTFLVGGRKIEGDFKVLENLDIPEELREMFISIPEEKFRIDISSTEIRKSQGL

SEQ ID NO: 12175 - protein, 328 aa, Zea mays subsp. mays
  peptide (1)..(328): Ceres Seq. ID no. 12411617
  misc_feature (1)..(327): Homolog of NCBI NO: 30677890 NR Description: expressed protein [Arabidopsis thaliana]
  misc_feature (1)..(327): Homolog of NCBI NO: 30677893 NR Description: expressed protein [Arabidopsis thaliana]
  misc_feature (1)..(327): Homolog of NCBI NO: 26451899 NR Description: unknown protein [Arabidopsis thaliana]
  misc_feature (1)..(327): Homolog of NCBI NO: 21537099 NR Description: unknown [Arabidopsis thaliana]
  misc_feature (93)..(216): Homolog of NCBI NO: 34911372 NR Description: P0034C09.17 [Oryza sativa (japonica
  misc_feature (254)..(327): Homolog of NCBI NO: 34911372 NR Description: P0034C09.17 [Oryza sativa (japonica
  misc_feature (1)..(40): Homolog of NCBI NO: 34911372 NR Description: P0034C09.17 [Oryza sativa (japonica
  misc_feature (1)..(327): Homolog of NCBI NO: 15232221 NR Description: unknown protein; protein id: At3g27610.1
  misc_feature (1)..(327): Homolog of NCBI NO: 9294466 NR Description: gb|AAD14522.1~gene_id:MGF10.2~similar to unknown
  misc_feature (1)..(97): Homolog of NCBI NO: 25371182 NR Description: hypothetical protein At2g01220 [imported] - thaliana >gi|4262229|gb|AAD14522.1| unknown protein [Arabidopsis
MAQLLGKMPLQFTSKQAAEDMALAAYNRALKLSGPGLQVMGVGFTGSLASSRPKHGDHRFYVSTWTHNCLRTSHVTLSKGLRSREEEDKVSSYFLLKAIADTCRVSATIQSDIHKSEIPEEIMEQFDEDQELQQVINGQVCMKVYNFAAPAESNLNRKIILPGSFNPLHDGHLRLLEAAVSMCDDGLPFFEISAINADKPPLSIAEIKRRVEQFRKAGKNVIISNQPYFYKKAELFPGSAFIIGADTAARLVNPKYYGGDYNRMLEILLECKSIGTTFLVGGRKIEGDFKVLENLDIPEELREMFISIPEEKFRIDISSTEIRKSQGL

SEQ ID NO: 12176 - protein, 321 aa, Zea mays subsp. mays
  peptide (1)..(321): Ceres Seq. ID no. 12411618
  misc_feature (1)..(320): Homolog of NCBI NO: 30677890 NR Description: expressed protein [Arabidopsis thaliana]
  misc_feature (1)..(320): Homolog of NCBI NO: 30677893 NR Description: expressed protein [Arabidopsis thaliana]
  misc_feature (1)..(320): Homolog of NCBI NO: 26451899 NR Description: unknown protein [Arabidopsis thaliana]
  misc_feature (1)..(320): Homolog of NCBI NO: 21537099 NR Description: unknown [Arabidopsis thaliana]
  misc_feature (86)..(209): Homolog of NCBI NO: 34911372 NR Description: P0034C09.17 [Oryza sativa (japonica
  misc_feature (247)..(320): Homolog of NCBI NO: 34911372 NR Description: P0034C09.17 [Oryza sativa (japonica
  misc_feature (1)..(33): Homolog of NCBI NO: 34911372 NR Description: P0034C09.17 [Oryza sativa (japonica
  misc_feature (1)..(320): Homolog of NCBI NO: 15232221 NR Description: unknown protein; protein id: At3g27610.1
  misc_feature (1)..(320): Homolog of NCBI NO: 9294466 NR Description: gb|AAD14522.1~gene_id:MGF10.2~similar to unknown
  misc_feature (1)..(90): Homolog of NCBI NO: 25371182 NR Description: hypothetical protein At2g01220 [imported] - thaliana >gi|4262229|gb|AAD14522.1| unknown protein [Arabidopsis
MPLQFTSKQAAEDMALAAYNRALKLSGPGLQVMGVGFTGSLASSRPKHGDHRFYVSTWTHNCLRTSHVTLSKGLRSREEEDKVSSYFLLKAIADTCRVSATIQSDIHKSEIPEEIMEQFDEDQELQQVINGQVCMKVYNFAAPAESNLNRKIILPGSFNPLHDGHLRLLEAAVSMCDDGLPFFEISAINADKPPLSIAEIKRRVEQFRKAGKNVIISNQPYFYKKAELFPGSAFIIGADTAARLVNPKYYGGDYNRMLEILLECKSIGTTFLVGGRKIEGDFKVLENLDIPEELREMFISIPEEKFRIDISSTEIRKSQGL

SEQ ID NO: 12177 - DNA, 1320 bp, Zea mays subsp. mays
  misc_feature (1)..(1320): Ceres Seq. ID no. 12357862
  misc_feature: MA Experiment ID: 20000492 Result: Down-regulated in Transcription
  misc_feature: MA Experiment 20000492 PARAMETER Experiment Name: Zm_Hybrid_Seed_Dev_P Parameter: DAP Value: 12
  misc_feature: MA Experiment 20000492 PARAMETER Experiment Name: Zm_Hybrid_Seed_Dev_P Parameter: Organism Value: Zea mays
  misc_feature: MA Experiment 20000492 PARAMETER Experiment Name: Zm_Hybrid_Seed_Dev_P Parameter: Plant Line Value: 35A19
  misc_feature: MA Experiment 20000492 PARAMETER Experiment Name: Zm_Hybrid_Seed_Dev_P Parameter: Tissue Value: Fert Kernel vs. Unfert Floret
  misc_feature: MA Experiment ID: 20000535 Result: Down-regulated in Transcription
  misc_feature: MA Experiment 20000535 PARAMETER Experiment Name: Zm_Hybrid_Seed_Dev_P Parameter: DAP Value: 30 vs. 12
  misc_feature: MA Experiment 20000535 PARAMETER Experiment Name: Zm_Hybrid_Seed_Dev_P Parameter: Organism Value: Zea mays
  misc_feature: MA Experiment 20000535 PARAMETER Experiment Name: Zm_Hybrid_Seed_Dev_P Parameter: Plant Line Value: 35A19
  misc_feature: MA Experiment 20000535 PARAMETER Experiment Name: Zm_Hybrid_Seed_Dev_P Parameter: Tissue Value: Embryo vs. Unfert Floret
acccgttccgcgcccgtcctcgaccctcccacctattcgctcgctcgctcgccgtccgcgcccgcgcgggccgcgagatctaggccagtcgccgcggccgtggccgcgggctgacgggatctctgtcctcccgacacgacgaacctctaggaaggcgcctaagacgaggaggaagcgggggctatggaggcgtcttcctgggacgccgttcgcaagcaggcaaggaggttggaagctcatttagatgaccaaatgattgcataccgtaaattggtttctatgaaatcagacggttcagaggacaacattgagtctgatatagaaagatcactgaagcagttacagcaagtgaattcgcaaatgcaaacttgggtatcatcaggaggttctgaagttctttctcatactctgactcgtcatatggagattttgcaagaccttactcaggaattctatcggcttcgatcaagtctcagggcaaaacaacagcatacttctctccttgacttgagagattttgacagagcaaagtttgatgttgaggagccgtcagactcagctgatcaagttcttctcagggaacaagctgcgattggcaggagtactggacagatggataacgtgatatcacaagctcaggcaacacttggttctctcatgacccaacggtcaacattcggtggcatcactacaaagataagcaacgtcagcagccagcttccaacaattaaccacgtcctctcatcgatcagaaggaagaaatccatggataccatcattctttcgctcgttgcatctgtctgcacgtttctcatcttcatctactggctgtcgaagtaggtttaccagagcaaagatattacagtgttgtaagcttgggaccacaccaccagtaccggtacagatagtcttcattggtgtttgtacaatattattggttgattgaatgctgttacgattcgggcgtgctgtagccaccgtgtctccagctgtgcaactgctgccaatactgtgaactgaactctgtacctcgtgtacttcggcataactaagggtggagcaactggcgttgctttagctgccccatgttggcatgttgctcagatgtcggcttaaaggtggatcttcacctatgactatagttgacaatataggctctatattttatacaataaaatataaggatgaggctctatttgtttttatttttgaactaaaaataatttagaaccctatcaatttgtaaagaaacatttggatcacgatctattaccacccctacctatgtcgtaagcctctgttatcagacattttcgagtc

SEQ ID NO: 12178 - protein, 218 aa, Zea mays subsp. mays
  peptide (1)..(218): Ceres Seq. ID no. 12357863
  misc_feature (46)..(196): Pfam Name: Vesicle transport v-SNARE protein Pfam Description: Vesicle transport v-SNARE protein
  misc_feature (4)..(218): Homolog of NCBI NO: 18394296 NR Description: cis-Golgi SNARE protein, putative; protein id: supported by cDNA: gi_12083259, supported by cDNA: gi_13898892, by cDNA: gi_15294143, supported by cDNA: gi_20147266 gb|F14225,
  misc_feature (32)..(218): Homolog of NCBI NO: 6850926 NR Description: hypothetical protein [Cicer arietinum]
  misc_feature (1)..(218): Homolog of NCBI NO: 15225431 NR Description: cis-Golgi SNARE protein, putative; protein id: supported by cDNA: gi_13898894 [Arabidopsis thaliana]
  misc_feature (45)..(214): Homolog of NCBI NO: 4758456 NR Description: golgi SNAP receptor complex member 1; Golgi SNARE kDa [Homo sapiens] >gi|12643659|sp|O95249|GS28_HUMAN 28 kDa Golgi
  misc_feature (3)..(45): Homolog of NCBI NO: 4758456 NR Description: golgi SNAP receptor complex member 1; Golgi SNARE kDa [Homo sapiens] >gi|12643659|sp|O95249|GS28_HUMAN 28 kDa Golgi
  misc_feature (45)..(214): Homolog of NCBI NO: 11132038 NR Description: 28 kDa Golgi SNARE protein (Golgi SNAP receptor
  misc_feature (45)..(214): Homolog of NCBI NO: 28280046 NR Description: Similar to golgi SNAP receptor complex member 1
  misc_feature (45)..(214): Homolog of NCBI NO: 16758358 NR Description: golgi SNAP receptor complex member 1; cis-Golgi (p28) [Rattus norvegicus] >gi|11131963|sp|Q62931|GS28_RAT 28 kDa
  misc_feature (45)..(214): Homolog of NCBI NO: 30388705 NR Description: Gosr1 protein [Mus musculus]
  misc_feature (45)..(214): Homolog of NCBI NO: 3335132 NR Description: GOS28/P28 protein [Homo sapiens]
MEASSWDAVRKQARRLEAHLDDQMIAYRKLVSMKSDGSEDNIESDIERSLKQLQQVNSQMQTWVSSGGSEVLSHTLTRHMEILQDLTQEFYRLRSSLRAKQQHTSLLDLRDFDRAKFDVEEPSDSADQVLLREQAAIGRSTGQMDNVISQAQATLGSLMTQRSTFGGITTKISNVSSQLPTINHVLSSIRRKKSMDTIILSLVASVCTFLIFIYWLSK

SEQ ID NO: 12179 - protein, 195 aa, Zea mays subsp. mays
  peptide (1)..(195): Ceres Seq. ID no. 12357864
  misc_feature (23)..(173): Pfam Name: Vesicle transport v-SNARE protein Pfam Description: Vesicle transport v-SNARE protein
  misc_feature (1)..(195): Homolog of NCBI NO: 18394296 NR Description: cis-Golgi SNARE protein, putative; protein id: supported by cDNA: gi_12083259, supported by cDNA: gi_13898892, by cDNA: gi_15294143, supported by cDNA: gi_20147266 gb|F14225,
  misc_feature (9)..(195): Homolog of NCBI NO: 6850926 NR Description: hypothetical protein [Cicer arietinum]
  misc_feature (1)..(195): Homolog of NCBI NO: 15225431 NR Description: cis-Golgi SNARE protein, putative; protein id: supported by cDNA: gi_13898894 [Arabidopsis thaliana]
  misc_feature (22)..(191): Homolog of NCBI NO: 4758456 NR Description: golgi SNAP receptor complex member 1; Golgi SNARE kDa [Homo sapiens] >gi|12643659|sp|O95249|GS28_HUMAN 28 kDa Golgi
  misc_feature (1)..(22): Homolog of NCBI NO: 4758456 NR Description: golgi SNAP receptor complex member 1; Golgi SNARE kDa [Homo sapiens] >gi|12643659|sp|O95249|GS28_HUMAN 28 kDa Golgi
  misc_feature (22)..(191): Homolog of NCBI NO: 11132038 NR Description: 28 kDa Golgi SNARE protein (Golgi SNAP receptor
  misc_feature (22)..(191): Homolog of NCBI NO: 28280046 NR Description: Similar to golgi SNAP receptor complex member 1
  misc_feature (22)..(191): Homolog of NCBI NO: 16758358 NR Description: golgi SNAP receptor complex member 1; cis-Golgi (p28) [Rattus norvegicus] >gi|11131963|sp|Q62931|GS28_RAT 28 kDa
  misc_feature (22)..(191): Homolog of NCBI NO: 30388705 NR Description: Gosr1 protein [Mus musculus]
  misc_feature (22)..(191): Homolog of NCBI NO: 3335132 NR Description: GOS28/P28 protein [Homo sapiens]
MIAYRKLVSMKSDGSEDNIESDIERSLKQLQQVNSQMQTWVSSGGSEVLSHTLTRHMEILQDLTQEFYRLRSSLRAKQQHTSLLDLRDFDRAKFDVEEPSDSADQVLLREQAAIGRSTGQMDNVISQAQATLGSLMTQRSTFGGITTKISNVSSQLPTINHVLSSIRRKKSMDTIILSLVASVCTFLIFIYWLSK

SEQ ID NO: 12180 - protein, 186 aa, Zea mays subsp. mays
  peptide (1)..(186): Ceres Seq. ID no. 12357865
  misc_feature (14)..(164): Pfam Name: Vesicle transport v-SNARE protein Pfam Description: Vesicle transport v-SNARE protein
  misc_feature (1)..(186): Homolog of NCBI NO: 18394296 NR Description: cis-Golgi SNARE protein, putative; protein id: supported by cDNA: gi_12083259, supported by cDNA: gi_13898892, by cDNA: gi_15294143, supported by cDNA: gi_20147266 gb|F14225,
  misc_feature (1)..(186): Homolog of NCBI NO: 6850926 NR Description: hypothetical protein [Cicer arietinum]
  misc_feature (1)..(186): Homolog of NCBI NO: 15225431 NR Description: cis-Golgi SNARE protein, putative; protein id: supported by cDNA: gi_13898894 [Arabidopsis thaliana]
  misc_feature (13)..(182): Homolog of NCBI NO: 4758456 NR Description: golgi SNAP receptor complex member 1; Golgi SNARE kDa [Homo sapiens] >gi|12643659|sp|O95249|GS28_HUMAN 28 kDa Golgi
  misc_feature (1)..(13): Homolog of NCBI NO: 4758456 NR Description: golgi SNAP receptor complex member 1; Golgi SNARE kDa [Homo sapiens] >gi|12643659|sp|O95249|GS28_HUMAN 28 kDa Golgi
  misc_feature (13)..(182): Homolog of NCBI NO: 11132038 NR Description: 28 kDa Golgi SNARE protein (Golgi SNAP receptor
  misc_feature (13)..(182): Homolog of NCBI NO: 28280046 NR Description: Similar to golgi SNAP receptor complex member 1
  misc_feature (13)..(182): Homolog of NCBI NO: 16758358 NR Description: golgi SNAP receptor complex member 1; cis-Golgi (p28) [Rattus norvegicus] >gi|11131963|sp|Q62931|GS28_RAT 28 kDa
  misc_feature (13)..(182): Homolog of NCBI NO: 30388705 NR Description: Gosr1 protein [Mus musculus]
  misc_feature (13)..(182): Homolog of NCBI NO: 3335132 NR Description: GOS28/P28 protein [Homo sapiens]
MKSDGSEDNIESDIERSLKQLQQVNSQMQTWVSSGGSEVLSHTLTRHMEILQDLTQEFYRLRSSLRAKQQHTSLLDLRDFDRAKFDVEEPSDSADQVLLREQAAIGRSTGQMDNVISQAQATLGSLMTQRSTFGGITTKISNVSSQLPTINHVLSSIRRKKSMDTIILSLVASVCTFLIFIYWLSK

SEQ ID NO: 12181 - DNA, 1229 bp, Zea mays subsp. mays
  misc_feature (1)..(1229): Ceres Seq. ID no. 12367074
  misc_feature: MA Experiment ID: 108536 Result: Down-regulated in Transcription
  misc_feature: MA Experiment 108536 PARAMETER Experiment Name: Zm_Meristem_P Parameter: Age (day) Value: 8
  misc_feature: MA Experiment 108536 PARAMETER Experiment Name: Zm_Meristem_P Parameter: Organism Value: Zea mays
  misc_feature: MA Experiment 108536 PARAMETER Experiment Name: Zm_Meristem_P Parameter: Plant Line Value: 35A19
  misc_feature: MA Experiment 108536 PARAMETER Experiment Name: Zm_Meristem_P Parameter: Tissue Value: Shoot Meristem vs. Above Shoot Meristem
  misc_feature: MA Experiment ID: 20000535 Result: Down-regulated in Transcription
  misc_feature: MA Experiment 20000535 PARAMETER Experiment Name: Zm_Hybrid_Seed_Dev_P Parameter: DAP Value: 30 vs. 12
  misc_feature: MA Experiment 20000535 PARAMETER Experiment Name: Zm_Hybrid_Seed_Dev_P Parameter: Organism Value: Zea mays
  misc_feature: MA Experiment 20000535 PARAMETER Experiment Name: Zm_Hybrid_Seed_Dev_P Parameter: Plant Line Value: 35A19
  misc_feature: MA Experiment 20000535 PARAMETER Experiment Name: Zm_Hybrid_Seed_Dev_P Parameter: Tissue Value: Embryo vs. Unfert Floret
cctggccaccaaagaagcaaaagtcttccaggttctcccacccacacggccacacgcccacacccactgctcctctaatctcacatgctcatgcatcctcctaatgtaacctgaagctttaagaaaacaaagtgctcccggaagactccaagctgcagctaccggccttcctctcccccattccaattccgagaacaggggcggcggagtcaaccaggtacgatgtgctcggtagcgaggctggcgtttgtgcttgcactggccatagccgcctcatcaattacggttgcggagagcagagattttaatatctttgctcagggcagcttgcctgatgcaaccaagggatcgtcaggtctagctgcaaccagtggaaagttgtgtcagttatgcgagcagtactcatccgaggcgctcctctatctcacacaaaacgagacccagactgagattcttagcattctacaccatgaatgtgccagccttgccccactcaagcagcagtgcatcacgctggttgactactacgtaccccttttcttcttggaggtctccatggttacccctgagaagttctgcgagtcgatgcatctctgcaagaaggggatgaagattagcctacccacccgggagggtacttgtggtttgtgccaccatgttgttgttgagattcttatcatgcttaaagaccccaacatgcagctggaagtaatcgacctactcaccaaaacatgcagcaaggcgcagaactatgaacagcagtgcaagcggctggtcctcaagtatattccactgattctggtgaagggccagaaattccttgagacaacggatgtctgctctgtgatacatgcatgcaaagcaggcacacaagcatcaatggaagccatgcctctgtctgccatgttgtgaaggtgatgcgaatcagaataaggcttatttgcctaggagatcaaattggggagaaacgatgaaaagtcagatgactgttttaagctctcttcctctattgctgaaacactattgatcggtgaaaattcgtctgtgtaaaattcttgtgtaaatttgggggtatatccagtgtttctctgaagtatacagcaactgcagctacaccaatctcttcggcattgggttgagaagttctaagcagtaattgcattttactgtatcatctatttgtttgtaactactgagagttattaattccttgtttctctgttgctctg

SEQ ID NO: 12182 - protein, 229 aa, Zea mays subsp. mays
  peptide (1)..(229): Ceres Seq. ID no. 12367075
  misc_feature (92)..(125): Pfam Name: Saposin-like type B, region 2 Pfam Description: Saposin-like type B, region 2
  misc_feature (17)..(227): Homolog of NCBI NO: 34896130 NR Description: P0701D05.19 [Oryza sativa (japonica >gi|13486662|dbj|BAB39899.1| hypothetical protein~similar to
  misc_feature (53)..(212): Homolog of NCBI NO: 15231028 NR Description: putative protein; protein id: At3g51730.1, by cDNA: 93651. [Arabidopsis thaliana] >gi|11358088|pir||T46069
  misc_feature (56)..(221): Homolog of NCBI NO: 6942199 NR Description: putative protein [Vitis riparia]
  misc_feature (47)..(212): Homolog of NCBI NO: 15241065 NR Description: putative protein; protein id: At5g01800.1, by cDNA: gi_15912284, supported by cDNA: gi_19548000 [Arabidopsis
  misc_feature (51)..(212): Homolog of NCBI NO: 26364659 NR Description: unnamed protein product [Mus musculus]
  misc_feature (51)..(212): Homolog of NCBI NO: 26324414 NR Description: unnamed protein product [Mus musculus]
  misc_feature (51)..(212): Homolog of NCBI NO: 34878577 NR Description: similar to prosaposin (variant Gaucher disease
MCSVARLAFVLALAIAASSITVAESRDFNIFAQGSLPDATKGSSGLAATSGKLCQLCEQYSSEALLYLTQNETQTEILSILHHECASLAPLKQQCITLVDYYVPLFFLEVSMVTPEKFCESMHLCKKGMKISLPTREGTCGLCHHVVVEILIMLKDPNMQLEVIDLLTKTCSKAQNYEQQCKRLVLKYIPLILVKGQKFLETTDVCSVIHACKAGTQASMEAMPLSAML

SEQ ID NO: 12183 - protein, 118 aa, Zea mays subsp. mays
  peptide (1)..(118): Ceres Seq. ID no. 12367076
  misc_feature (1)..(116): Homolog of NCBI NO: 34896130 NR Description: P0701D05.19 [Oryza sativa (japonica >gi|13486662|dbj|BAB39899.1| hypothetical protein~similar to
  misc_feature (1)..(101): Homolog of NCBI NO: 15231028 NR Description: putative protein; protein id: At3g51730.1, by cDNA: 93651. [Arabidopsis thaliana] >gi|11358088|pir||T46069
  misc_feature (1)..(110): Homolog of NCBI NO: 6942199 NR Description: putative protein [Vitis riparia]
  misc_feature (1)..(101): Homolog of NCBI NO: 15241065 NR Description: putative protein; protein id: At5g01800.1, by cDNA: gi_15912284, supported by cDNA: gi_19548000 [Arabidopsis
  misc_feature (1)..(101): Homolog of NCBI NO: 26364659 NR Description: unnamed protein product [Mus musculus]
  misc_feature (1)..(101): Homolog of NCBI NO: 26324414 NR Description: unnamed protein product [Mus musculus]
  misc_feature (1)..(101): Homolog of NCBI NO: 34878577 NR Description: similar to prosaposin (variant Gaucher disease
MVTPEKFCESMHLCKKGMKISLPTREGTCGLCHHVVVEILIMLKDPNMQLEVIDLLTKTCSKAQNYEQQCKRLVLKYIPLILVKGQKFLETTDVCSVIHACKAGTQASMEAMPLSAML

SEQ ID NO: 12184 - DNA, 1541 bp, Zea mays subsp. mays
  misc_feature (1)..(1541): Ceres Seq. ID no. 12348785
  misc_feature: MA Experiment ID: 108528 Result: Up-regulated in Transcription
  misc_feature: MA Experiment 108528 PARAMETER Experiment Name: Zm_Imbibed_Seeds_P Parameter: Age (day) Value: 5 vs. 2
  misc_feature: MA Experiment 108528 PARAMETER Experiment Name: Zm_Imbibed_Seeds_P Parameter: Organism Value: Zea mays
  misc_feature: MA Experiment 108528 PARAMETER Experiment Name: Zm_Imbibed_Seeds_P Parameter: Plant Line Value: 35A19
  misc_feature: MA Experiment 108528 PARAMETER Experiment Name: Zm_Imbibed_Seeds_P Parameter: Tissue Value: Aerial vs. Embryo
  misc_feature: MA Experiment ID: 108535 Result: Up-regulated in Transcription
  misc_feature: MA Experiment 108535 PARAMETER Experiment Name: Zm_Meristem_P Parameter: Age (day) Value: 8
  misc_feature: MA Experiment 108535 PARAMETER Experiment Name: Zm_Meristem_P Parameter: Organism Value: Zea mays
  misc_feature: MA Experiment 108535 PARAMETER Experiment Name: Zm_Meristem_P Parameter: Plant Line Value: 35A19
  misc_feature: MA Experiment 108535 PARAMETER Experiment Name: Zm_Meristem_P Parameter: Tissue Value: Root Meristem vs. Above Root Meristem
  misc_feature: MA Experiment ID: 108545 Result: Up-regulated in Transcription
  misc_feature: MA Experiment 108545 PARAMETER Experiment Name: Zm_Imbibed_Seeds_P Parameter: Age (day) Value: 3 vs. 2
  misc_feature: MA Experiment 108545 PARAMETER Experiment Name: Zm_Imbibed_Seeds_P Parameter: Organism Value: Zea mays
  misc_feature: MA Experiment 108545 PARAMETER Experiment Name: Zm_Imbibed_Seeds_P Parameter: Plant Line Value: 35A19
  misc_feature: MA Experiment 108545 PARAMETER Experiment Name: Zm_Imbibed_Seeds_P Parameter: Tissue Value: Aerial vs. Embryo
  misc_feature: MA Experiment ID: 108546 Result: Down-regulated in Transcription
  misc_feature: MA Experiment 108546 PARAMETER Experiment Name: Zm_Imbibed_Seeds_P Parameter: Age (day) Value: 3 vs. 2
  misc_feature: MA Experiment 108546 PARAMETER Experiment Name: Zm_Imbibed_Seeds_P Parameter: Organism Value: Zea mays
  misc_feature: MA Experiment 108546 PARAMETER Experiment Name: Zm_Imbibed_Seeds_P Parameter: Plant Line Value: 35A19
  misc_feature: MA Experiment 108546 PARAMETER Experiment Name: Zm_Imbibed_Seeds_P Parameter: Tissue Value: Roots vs. Embryo
  misc_feature: MA Experiment ID: 108547 Result: Up-regulated in Transcription
  misc_feature: MA Experiment 108547 PARAMETER Experiment Name: Zm_Imbibed_Seeds_P Parameter: Age (day) Value: 4 vs. 2
  misc_feature: MA Experiment 108547 PARAMETER Experiment Name: Zm_Imbibed_Seeds_P Parameter: Organism Value: Zea mays
  misc_feature: MA Experiment 108547 PARAMETER Experiment Name: Zm_Imbibed_Seeds_P Parameter: Plant Line Value: 35A19
  misc_feature: MA Experiment 108547 PARAMETER Experiment Name: Zm_Imbibed_Seeds_P Parameter: Tissue Value: Aerial vs. Embryo
  misc_feature: MA Experiment ID: 20000479 Result: Down-regulated in Transcription
  misc_feature: MA Experiment 20000479 PARAMETER Experiment Name: Zm_Drought_P Parameter: Age (day) Value: 10
  misc_feature: MA Experiment 20000479 PARAMETER Experiment Name: Zm_Drought_P Parameter: Organism Value: Zea mays
  misc_feature: MA Experiment 20000479 PARAMETER Experiment Name: Zm_Drought_P Parameter: Plant Line Value: 35A19
  misc_feature: MA Experiment 20000479 PARAMETER Experiment Name: Zm_Drought_P Parameter: Timepoint (hr) Value: 48
  misc_feature: MA Experiment 20000479 PARAMETER Experiment Name: Zm_Drought_P Parameter: Tissue Value: Aerial
  misc_feature: MA Experiment 20000479 PARAMETER Experiment Name: Zm_Drought_P Parameter: Treatment Value: Drought vs. No Drought
  misc_feature: MA Experiment ID: 20000480 Result: Down-regulated in Transcription
  misc_feature: MA Experiment 20000480 PARAMETER Experiment Name: Zm_Drought_P Parameter: Age (day) Value: 11
  misc_feature: MA Experiment 20000480 PARAMETER Experiment Name: Zm_Drought_P Parameter: Organism Value: Zea mays
  misc_feature: MA Experiment 20000480 PARAMETER Experiment Name: Zm_Drought_P Parameter: Plant Line Value: 35A19
  misc_feature: MA Experiment 20000480 PARAMETER Experiment Name: Zm_Drought_P Parameter: Timepoint (hr) Value: 72
  misc_feature: MA Experiment 20000480 PARAMETER Experiment Name: Zm_Drought_P Parameter: Tissue Value: Aerial
  misc_feature: MA Experiment 20000480 PARAMETER Experiment Name: Zm_Drought_P Parameter: Treatment Value: Drought vs. No Drought
  misc_feature: MA Experiment ID: 20000534 Result: Down-regulated in Transcription
  misc_feature: MA Experiment 20000534 PARAMETER Experiment Name: Zm_Hybrid_Pollen_P Parameter: Age (day) Value: 8
  misc_feature: MA Experiment 20000534 PARAMETER Experiment Name: Zm_Hybrid_Pollen_P Parameter: Organism Value: Zea mays
  misc_feature: MA Experiment 20000534 PARAMETER Experiment Name: Zm_Hybrid_Pollen_P Parameter: Plant Line Value: 35A19
  misc_feature: MA Experiment 20000534 PARAMETER Experiment Name: Zm_Hybrid_Pollen_P Parameter: Tissue Value: Pollen vs. Aerial
accccccgcggggacaccgagcgctcgccgccgccttcgagttcggagcggagccacagccacgcatgccaatggccgtctccgctgttaccgcctcccatctcgctctctcttttccagcacgtagtcgccggagacgcgctgcgccccgcgccgcggcaggcggcctaacggctcgcgcacggcggctgcgctgcgagttcgtcgccggtggtgggaacggggcgctctccggagaggacgaccctcgcctcgtcgaccgccaaaaagttcttgatgccgctatgaatgacataaacaactcttttggaaaaggaagtgttacaagattaggcagtgctggtggtgcttttgttgagacattcccaagtggttgtctaacactagattttgctctgggtggcggtcttccaaaaggaagagtagtggaggtatatggtccagaaagcagtggaaagactaccctagctttgcatgcaattgctgaaatacagaagcttggaggaaatgccatgcttgtcgatgcagagcatgcttttgatccagcttattcaaaagctcttggggtagatattgaaaatctgattgtctgccagcctgacaacggagagatggcactagaaattgcggaccgtatgtgcagatctggagcaatagatcttatctgtattgattcggtgtcagcgctcaccccacgtgcagaaattgaaggtgagataggaatgcagcagatgggtctacaagctcgtctgatgagtcaagcattgagaaaaatgtcaggcaatgcctcaaaggctggctgtactcttatgttcttgaatcaaataagatacaagattggagtgttctatgggaatcctgaagtcactagtggagggatagccttgaaattctttgcatctgtccgtcttgagatacggctcattgggaagataaaatctgccaagggagatgaagatgttggtgtgaaggttcgtgtcagagtgcagaagagtaaagtatctaggccctacaagcaagctgaatttgaaatcatttttggggagggtgttagtaaattggggtgcgttcttgattgtgctgagctgatggatgtagttgcaaagaagggttcgtggtacagctacaaagatataagattgggccaaggcagagagaaggcactgcagtatctccgagagagcccaaccacctgcgatgagatagaaaaggtggttcgagctatgataccagaaggatccagacatatgagcctactagctttcgggcagtcatcatcaactgaagatgaacaggcgtatgatgaacaataatggtacatgaggttccgaagatggaacacttgtgaaaccgtcaagctctggcttgtgtcccttgcggataacagaaaagatcagagctggaacgattccgggtgcaatccgacggaaacgaacaaggcctaatgttgtacgtgtactgtggcatggcagaaccgtccggtttaacccaatttcgggcacacctgccagctatttatcactaagtgcaccagagattat

SEQ ID NO: 12185 - protein, 436 aa, Zea mays subsp. mays
  peptide (1)..(436): Ceres Seq. ID no. 12348786
  misc_feature (89)..(409): Pfam Name: recA bacterial DNA recombination protein Pfam Description: recA bacterial DNA recombination protein
  misc_feature (73)..(436): Homolog of NCBI NO: 421845 NR Description: recombination protein recA homolog - Arabidopsis
  misc_feature (73)..(436): Homolog of NCBI NO: 18412241 NR Description: replicase, putative; protein id: At1g79050.1, by cDNA: gi_15292902, supported by cDNA: gi_21281180 [Arabidopsis >gi|2500098|sp|Q39199|RECA_ARATH DNA repair protein recA,
  misc_feature (86)..(434): Homolog of NCBI NO: 1350564 NR Description: RecA protein (Recombinase A)
  misc_feature (86)..(431): Homolog of NCBI NO: 132240 NR Description: RecA protein (Recombinase A) >gi|72991|pir||RQYCA
  misc_feature (86)..(435): Homolog of NCBI NO: 23042013 NR Description: hypothetical protein [Trichodesmium erythraeum
  misc_feature (86)..(430): Homolog of NCBI NO: 22299632 NR Description: recombination protein [Thermosynechococcus BP-1] >gi|22295816|dbj|BAC09641.1| recombination protein
  misc_feature (75)..(413): Homolog of NCBI NO: 33866594 NR Description: RecA bacterial DNA recombination protein sp. WH 8102] >gi|33633372|emb|CAE08577.1| RecA bacterial DNA
  misc_feature (87)..(434): Homolog of NCBI NO: 23123656 NR Description: hypothetical protein [Nostoc punctiforme]
  misc_feature (80)..(413): Homolog of NCBI NO: 33241165 NR Description: RecA recombinase [Prochlorococcus marinus subsp. str. CCMP1375] >gi|33238695|gb|AAQ00760.1| RecA recombinase
  misc_feature (87)..(413): Homolog of NCBI NO: 37522985 NR Description: recombination protein [Gloeobacter violaceus]
PPRGHRALAAAFEFGAEPQPRMPMAVSAVTASHLALSFPARSRRRRAAPRAAAGGLTARARRLRCEFVAGGGNGALSGEDDPRLVDRQKVLDAAMNDINNSFGKGSVTRLGSAGGAFVETFPSGCLTLDFALGGGLPKGRVVEVYGPESSGKTTLALHAIAEIQKLGGNAMLVDAEHAFDPAYSKALGVDIENLIVCQPDNGEMALEIADRMCRSGAIDLICIDSVSALTPRAEIEGEIGMQQMGLQARLMSQALRKMSGNASKAGCTLMFLNQIRYKIGVFYGNPEVTSGGIALKFFASVRLEIRLIGKIKSAKGDEDVGVKVRVRVQKSKVSRPYKQAEFEIIFGEGVSKLGCVLDCAELMDVVAKKGSWYSYKDIRLGQGREKALQYLRESPTTCDEIEKVVRAMIPEGSRHMSLLAFGQSSSTEDEQAYDEQ

SEQ ID NO: 12186 - protein, 415 aa, Zea mays subsp. mays
  peptide (1)..(415): Ceres Seq. ID no. 12348787
  misc_feature (68)..(388): Pfam Name: recA bacterial DNA recombination protein Pfam Description: recA bacterial DNA recombination protein
  misc_feature (52)..(415): Homolog of NCBI NO: 421845 NR Description: recombination protein recA homolog - Arabidopsis
  misc_feature (52)..(415): Homolog of NCBI NO: 18412241 NR Description: replicase, putative; protein id: At1g79050.1, by cDNA: gi_15292902, supported by cDNA: gi_21281180 [Arabidopsis >gi|2500098|sp|Q39199|RECA_ARATH DNA repair protein recA,
  misc_feature (65)..(413): Homolog of NCBI NO: 1350564 NR Description: RecA protein (Recombinase A)
  misc_feature (65)..(410): Homolog of NCBI NO: 132240 NR Description: RecA protein (Recombinase A) >gi|72991|pir||RQYCA
  misc_feature (65)..(414): Homolog of NCBI NO: 23042013 NR Description: hypothetical protein [Trichodesmium erythraeum
  misc_feature (65)..(409): Homolog of NCBI NO: 22299632 NR Description: recombination protein [Thermosynechococcus BP-1] >gi|22295816|dbj|BAC09641.1| recombination protein
  misc_feature (54)..(392): Homolog of NCBI NO: 33866594 NR Description: RecA bacterial DNA recombination protein sp. WH 8102] >gi|33633372|emb|CAE08577.1| RecA bacterial DNA
  misc_feature (66)..(413): Homolog of NCBI NO: 23123656 NR Description: hypothetical protein [Nostoc punctiforme]
  misc_feature (59)..(392): Homolog of NCBI NO: 33241165 NR Description: RecA recombinase [Prochlorococcus marinus subsp. str. CCMP1375] >gi|33238695|gb|AAQ00760.1| RecA recombinase
  misc_feature (66)..(392): Homolog of NCBI NO: 37522985 NR Description: recombination protein [Gloeobacter violaceus]
MPMAVSAVTASHLALSFPARSRRRRAAPRAAAGGLTARARRLRCEFVAGGGNGALSGEDDPRLVDRQKVLDAAMNDINNSFGKGSVTRLGSAGGAFVETFPSGCLTLDFALGGGLPKGRVVEVYGPESSGKTTLALHAIAEIQKLGGNAMLVDAEHAFDPAYSKALGVDIENLIVCQPDNGEMALEIADRMCRSGAIDLICIDSVSALTPRAEIEGEIGMQQMGLQARLMSQALRKMSGNASKAGCTLMFLNQIRYKIGVFYGNPEVTSGGIALKFFASVRLEIRLIGKIKSAKGDEDVGVKVRVRVQKSKVSRPYKQAEFEIIFGEGVSKLGCVLDCAELMDVVAKKGSWYSYKDIRLGQGREKALQYLRESPTTCDEIEKVVRAMIPEGSRHMSLLAFGQSSSTEDEQAYDEQ

SEQ ID NO: 12187 - protein, 413 aa, Zea mays subsp. mays
  peptide (1)..(413): Ceres Seq. ID no. 12348788
  misc_feature (66)..(386): Pfam Name: recA bacterial DNA recombination protein Pfam Description: recA bacterial DNA recombination protein
  misc_feature (50)..(413): Homolog of NCBI NO: 421845 NR Description: recombination protein recA homolog - Arabidopsis
  misc_feature (50)..(413): Homolog of NCBI NO: 18412241 NR Description: replicase, putative; protein id: At1g79050.1, by cDNA: gi_15292902, supported by cDNA: gi_21281180 [Arabidopsis >gi|2500098|sp|Q39199|RECA_ARATH DNA repair protein recA,
  misc_feature (63)..(411): Homolog of NCBI NO: 1350564 NR Description: RecA protein (Recombinase A)
  misc_feature (63)..(408): Homolog of NCBI NO: 132240 NR Description: RecA protein (Recombinase A) >gi|72991|pir||RQYCA
  misc_feature (63)..(412): Homolog of NCBI NO: 23042013 NR Description: hypothetical protein [Trichodesmium erythraeum
  misc_feature (63)..(407): Homolog of NCBI NO: 22299632 NR Description: recombination protein [Thermosynechococcus BP-1] >gi|22295816|dbj|BAC09641.1| recombination protein
  misc_feature (52)..(390): Homolog of NCBI NO: 33866594 NR Description: RecA bacterial DNA recombination protein sp. WH 8102] >gi|33633372|emb|CAE08577.1| RecA bacterial DNA
  misc_feature (64)..(411): Homolog of NCBI NO: 23123656 NR Description: hypothetical protein [Nostoc punctiforme]
  misc_feature (57)..(390): Homolog of NCBI NO: 33241165 NR Description: RecA recombinase [Prochlorococcus marinus subsp. str. CCMP1375] >gi|33238695|gb|AAQ00760.1| RecA recombinase
  misc_feature (64)..(390): Homolog of NCBI NO: 37522985 NR Description: recombination protein [Gloeobacter violaceus]
MAVSAVTASHLALSFPARSRRRRAAPRAAAGGLTARARRLRCEFVAGGGNGALSGEDDPRLVDRQKVLDAAMNDINNSFGKGSVTRLGSAGGAFVETFPSGCLTLDFALGGGLPKGRVVEVYGPESSGKTTLALHAIAEIQKLGGNAMLVDAEHAFDPAYSKALGVDIENLIVCQPDNGEMALEIADRMCRSGAIDLICIDSVSALTPRAEIEGEIGMQQMGLQARLMSQALRKMSGNASKAGCTLMFLNQIRYKIGVFYGNPEVTSGGIALKFFASVRLEIRLIGKIKSAKGDEDVGVKVRVRVQKSKVSRPYKQAEFEIIFGEGVSKLGCVLDCAELMDVVAKKGSWYSYKDIRLGQGREKALQYLRESPTTCDEIEKVVRAMIPEGSRHMSLLAFGQSSSTEDEQAYDEQ

SEQ ID NO: 12188 - DNA, 1765 bp, Zea mays subsp. mays
  misc_feature (1)..(1765): Ceres Seq. ID no. 12411611
  misc_feature: MA Experiment ID: 108535 Result: Up-regulated in Transcription
  misc_feature: MA Experiment 108535 PARAMETER Experiment Name: Zm_Meristem_P Parameter: Age (day) Value: 8
  misc_feature: MA Experiment 108535 PARAMETER Experiment Name: Zm_Meristem_P Parameter: Organism Value: Zea mays
  misc_feature: MA Experiment 108535 PARAMETER Experiment Name: Zm_Meristem_P Parameter: Plant Line Value: 35A19
  misc_feature: MA Experiment 108535 PARAMETER Experiment Name: Zm_Meristem_P Parameter: Tissue Value: Root Meristem vs. Above Root Meristem
  misc_feature: MA Experiment ID: 20000108 Result: Up-regulated in Transcription
  misc_feature: MA Experiment 20000108 PARAMETER Experiment Name: Zm_Root-Tips_P Parameter: Age (day) Value: 12
  misc_feature: MA Experiment 20000108 PARAMETER Experiment Name: Zm_Root-Tips_P Parameter: Organism Value: Zea mays
  misc_feature: MA Experiment 20000108 PARAMETER Experiment Name: Zm_Root-Tips_P Parameter: Tissue Value: Root tips vs. Root mid region    35
  misc_feature: MA Experiment 20000108 PARAMETER Experiment Name: Zm_Root-Tips_P Parameter: Tissue Value: Root tips vs. Root mid region   Sequence Listing-Misc Features (4)
gtttttcggtcctattcgacccccaaactccggacgagccttccgcgcgacgctgcacggctccgccagccacccgtaaaaccctagacggctagccggcgcacggaagcgggcagcggagcggaggtgagcctctcctgcgtcggattgtccccgcccccgctaggcgccatgaagctgacggtgaagaccctcaagggaacgcacttcgagatccgggtgcagcccaacgacacgattatggctgtgaagaagaatattgaagagatacaagggaaagacagctatccatggggccaacaactgctgattttcaatggaaaggtcttgaaagatgaaagtacattggaagagaataaagtcaatgaggatgggtttctagttgtcatgcttagtaagggtaaaacatctggttcaactggaacttcatcttcccagcactcaaacactcctgcaacaaggcaggcacctcctctagaggccccacaacaagctcctcaacccccggtggcaccaattacaacttctcagcctgaaggacttcctgcacaggcacctaacacacatgacaatgcggcatcaaatcttctgtctggaaggaatgttgacacaataattaaccagctaatggagatgggtgggggcagttgggacaaagataaagtccaaagggctctccgtgccgcttacaacaaccccgaacgtgctgttgaatacctctactctggtattccagtaacagctgaaattgctgttccaattggtggtcaaggggcaaacacaactgatcgagctcctactggggaagctggtctctctgggattccaaacaccgctccactagatcttttcccgcagggggcttccaatgctggaggtggtgctggtggtggaccacttgattttcttagaaacaatccacagtttcaagcagttcgggaaatggtccatacaaatccacaaattttgcagcctatgctcgttgagttgagcaagcagaatcctcaaattctaaggttgattgaggagaatcatgatgagtttcttcagttactaaatgagccctttgaaggcggagagggggatttcttagaccaacctgaggaggatgaaatgcctcatgccattagtgttacaccagaggagcaggaggccattggacggcttgagtccatggggttcgacagagcacgcgttatcgaagcattcttagcctgcgataggaacgaggagctagcagcaaactatctccttgagcatgctggtgaggaagattaagcgggagtagttttcatacgattttttttagtaccgagtgacgaagagttgatatggagctgacgatcatttgaattgatttcgttgtgcaagacttgtattacataaacatttaaatacatgtagctgaacatttcagtagaaatgctacggttgtggtctcccatcgttgactttcattagcgtggtggtaaacatcggttctgctcctgtcctgtattaacacaagcttggcttgggaggaagcacaaggagctattgctacctagcaaaaggataaaagggaggatgatgaattggcgatgtgtttgtgacacgctgccctcaagtgtggatgatgagtgcagatatgttgatgactgttccaaggctgtcaagtgtgtaaacgaacgctgccttcgtagttctgacaactgcgacagttctgtagctagacctatttgctatctttatgataaaattatctaaatgggacggtccttgaccg

SEQ ID NO: 12189 - protein, 368 aa, Zea mays subsp. mays
  peptide (1)..(368): Ceres Seq. ID no. 12411612
  misc_feature (1)..(78): Pfam Name: Ubiquitin family Pfam Description: Ubiquitin family
  misc_feature (1)..(368): Homolog of NCBI NO: 22330746 NR Description: DNA repair protein RAD23, putative; protein id: supported by cDNA: gi_14334441, supported by cDNA: gi_17104776 thaliana] >gi|14334442|gb|AAK59419.1| putative DNA repair protein
  misc_feature (1)..(368): Homolog of NCBI NO: 30699439 NR Description: DNA repair protein RAD23 -related [Arabidopsis >gi|21593616|gb|AAM65583.1| DNA repair protein RAD23, putative
  misc_feature (1)..(368): Homolog of NCBI NO: 30409720 NR Description: RAD23-like protein [Arabidopsis thaliana]
  misc_feature (1)..(368): Homolog of NCBI NO: 7446460 NR Description: RAD23 protein, isoform II - carrot
  misc_feature (1)..(368): Homolog of NCBI NO: 30409718 NR Description: RAD23-like protein [Arabidopsis thaliana]
  misc_feature (1)..(368): Homolog of NCBI NO: 15221013 NR Description: hypothetical protein; protein id: At1g16190.1
  misc_feature (1)..(368): Homolog of NCBI NO: 30409722 NR Description: RAD23-like protein [Arabidopsis thaliana]
  misc_feature (1)..(368): Homolog of NCBI NO: 25387250 NR Description: protein F20B17.8 [imported] - Arabidopsis >gi|7715605|gb|AAF68123.1|AC010793_18 F20B17.8 [Arabidopsis
  misc_feature (94)..(366): Homolog of NCBI NO: 15232924 NR Description: putative RAD23; protein id: At3g02540.1, by cDNA: gi_14517453 [Arabidopsis thaliana] putative RAD23 [Arabidopsis thaliana] >gi|14517454|gb|AAK62617.1|
  misc_feature (1)..(129): Homolog of NCBI NO: 15232924 NR Description: putative RAD23; protein id: At3g02540.1, by cDNA: gi_14517453 [Arabidopsis thaliana] putative RAD23 [Arabidopsis thaliana] >gi|14517454|gb|AAK62617.1|
MKLTVKTLKGTHFEIRVQPNDTIMAVKKNIEEIQGKDSYPWGQQLLIFNGKVLKDESTLEENKVNEDGFLVVMLSKGKTSGSTGTSSSQHSNTPATRQAPPLEAPQQAPQPPVAPITTSQPEGLPAQAPNTHDNAASNLLSGRNVDTIINQLMEMGGGSWDKDKVQRALRAAYNNPERAVEYLYSGIPVTAEIAVPIGGQGANTTDRAPTGEAGLSGIPNTAPLDLFPQGASNAGGGAGGGPLDFLRNNPQFQAVREMVHTNPQILQPMLVELSKQNPQILRLIEENHDEFLQLLNEPFEGGEGDFLDQPEEDEMPHAISVTPEEQEAIGRLESMGFDRARVIEAFLACDRNEELAANYLLEHAGEED

SEQ ID NO: 12190 - protein, 345 aa, Zea mays subsp. mays
  peptide (1)..(345): Ceres Seq. ID no. 12411613
  misc_feature (1)..(55): Pfam Name: Ubiquitin family Pfam Description: Ubiquitin family
  misc_feature (1)..(345): Homolog of NCBI NO: 22330746 NR Description: DNA repair protein RAD23, putative; protein id: supported by cDNA: gi_14334441, supported by cDNA: gi_17104776 thaliana] >gi|14334442|gb|AAK59419.1| putative DNA repair protein
  misc_feature (1)..(345): Homolog of NCBI NO: 30699439 NR Description: DNA repair protein RAD23 -related [Arabidopsis >gi|21593616|gb|AAM65583.1| DNA repair protein RAD23, putative
  misc_feature (1)..(345): Homolog of NCBI NO: 30409720 NR Description: RAD23-like protein [Arabidopsis thaliana]
  misc_feature (1)..(345): Homolog of NCBI NO: 7446460 NR Description: RAD23 protein, isoform II - carrot
  misc_feature (1)..(345): Homolog of NCBI NO: 30409718 NR Description: RAD23-like protein [Arabidopsis thaliana]
  misc_feature (1)..(345): Homolog of NCBI NO: 15221013 NR Description: hypothetical protein; protein id: At1g16190.1
  misc_feature (1)..(345): Homolog of NCBI NO: 30409722 NR Description: RAD23-like protein [Arabidopsis thaliana]
  misc_feature (1)..(345): Homolog of NCBI NO: 25387250 NR Description: protein F20B17.8 [imported] - Arabidopsis >gi|7715605|gb|AAF68123.1|AC010793_18 F20B17.8 [Arabidopsis
  misc_feature (71)..(343): Homolog of NCBI NO: 15232924 NR Description: putative RAD23; protein id: At3g02540.1, by cDNA: gi_14517453 [Arabidopsis thaliana] putative RAD23 [Arabidopsis thaliana] >gi|14517454|gb|AAK62617.1|
  misc_feature (1)..(106): Homolog of NCBI NO: 15232924 NR Description: putative RAD23; protein id: At3g02540.1, by cDNA: gi_14517453 [Arabidopsis thaliana] putative RAD23 [Arabidopsis thaliana] >gi|14517454|gb|AAK62617.1|
MAVKKNIEEIQGKDSYPWGQQLLIFNGKVLKDESTLEENKVNEDGFLVVMLSKGKTSGSTGTSSSQHSNTPATRQAPPLEAPQQAPQPPVAPITTSQPEGLPAQAPNTHDNAASNLLSGRNVDTIINQLMEMGGGSWDKDKVQRALRAAYNNPERAVEYLYSGIPVTAEIAVPIGGQGANTTDRAPTGEAGLSGIPNTAPLDLFPQGASNAGGGAGGGPLDFLRNNPQFQAVREMVHTNPQILQPMLVELSKQNPQILRLIEENHDEFLQLLNEPFEGGEGDFLDQPEEDEMPHAISVTPEEQEAIGRLESMGFDRARVIEAFLACDRNEELAANYLLEHAGEED

SEQ ID NO: 12191 - protein, 296 aa, Zea mays subsp. mays
  peptide (1)..(296): Ceres Seq. ID no. 12411614
  misc_feature (72)..(114): Pfam Name: UBA/TS-N domain Pfam Description: UBA/TS-N domain
  misc_feature (1)..(296): Homolog of NCBI NO: 22330746 NR Description: DNA repair protein RAD23, putative; protein id: supported by cDNA: gi_14334441, supported by cDNA: gi_17104776 thaliana] >gi|14334442|gb|AAK59419.1| putative DNA repair protein
  misc_feature (1)..(296): Homolog of NCBI NO: 30699439 NR Description: DNA repair protein RAD23 -related [Arabidopsis >gi|21593616|gb|AAM65583.1| DNA repair protein RAD23, putative
  misc_feature (1)..(296): Homolog of NCBI NO: 30409720 NR Description: RAD23-like protein [Arabidopsis thaliana]
  misc_feature (1)..(296): Homolog of NCBI NO: 7446460 NR Description: RAD23 protein, isoform II - carrot
  misc_feature (1)..(296): Homolog of NCBI NO: 30409718 NR Description: RAD23-like protein [Arabidopsis thaliana]
  misc_feature (1)..(296): Homolog of NCBI NO: 15221013 NR Description: hypothetical protein; protein id: At1g16190.1
  misc_feature (1)..(296): Homolog of NCBI NO: 30409722 NR Description: RAD23-like protein [Arabidopsis thaliana]
  misc_feature (1)..(296): Homolog of NCBI NO: 25387250 NR Description: protein F20B17.8 [imported] - Arabidopsis >gi|7715605|gb|AAF68123.1|AC010793_18 F20B17.8 [Arabidopsis
  misc_feature (22)..(294): Homolog of NCBI NO: 15232924 NR Description: putative RAD23; protein id: At3g02540.1, by cDNA: gi_14517453 [Arabidopsis thaliana] putative RAD23 [Arabidopsis thaliana] >gi|14517454|gb|AAK62617.1|
  misc_feature (1)..(57): Homolog of NCBI NO: 15232924 NR Description: putative RAD23; protein id: At3g02540.1, by cDNA: gi_14517453 [Arabidopsis thaliana] putative RAD23 [Arabidopsis thaliana] >gi|14517454|gb|AAK62617.1|
MLSKGKTSGSTGTSSSQHSNTPATRQAPPLEAPQQAPQPPVAPITTSQPEGLPAQAPNTHDNAASNLLSGRNVDTIINQLMEMGGGSWDKDKVQRALRAAYNNPERAVEYLYSGIPVTAEIAVPIGGQGANTTDRAPTGEAGLSGIPNTAPLDLFPQGASNAGGGAGGGPLDFLRNNPQFQAVREMVHTNPQILQPMLVELSKQNPQILRLIEENHDEFLQLLNEPFEGGEGDFLDQPEEDEMPHAISVTPEEQEAIGRLESMGFDRARVIEAFLACDRNEELAANYLLEHAGEED

SEQ ID NO: 12192 - DNA, 1340 bp, Zea mays subsp. mays
  misc_feature (1)..(1340): Ceres Seq. ID no. 12413195
  misc_feature: MA Experiment ID: 108528 Result: Down-regulated in Transcription
  misc_feature: MA Experiment 108528 PARAMETER Experiment Name: Zm_Imbibed_Seeds_P Parameter: Age (day) Value: 5 vs. 2
  misc_feature: MA Experiment 108528 PARAMETER Experiment Name: Zm_Imbibed_Seeds_P Parameter: Organism Value: Zea mays
  misc_feature: MA Experiment 108528 PARAMETER Experiment Name: Zm_Imbibed_Seeds_P Parameter: Plant Line Value: 35A19
  misc_feature: MA Experiment 108528 PARAMETER Experiment Name: Zm_Imbibed_Seeds_P Parameter: Tissue Value: Aerial vs. Embryo
  misc_feature: MA Experiment ID: 108529 Result: Down-regulated in Transcription
  misc_feature: MA Experiment 108529 PARAMETER Experiment Name: Zm_Imbibed_Seeds_P Parameter: Age (day) Value: 5 vs. 2
  misc_feature: MA Experiment 108529 PARAMETER Experiment Name: Zm_Imbibed_Seeds_P Parameter: Organism Value: Zea mays
  misc_feature: MA Experiment 108529 PARAMETER Experiment Name: Zm_Imbibed_Seeds_P Parameter: Plant Line Value: 35A19
  misc_feature: MA Experiment 108529 PARAMETER Experiment Name: Zm_Imbibed_Seeds_P Parameter: Tissue Value: Roots vs. Embryo
  misc_feature: MA Experiment ID: 108530 Result: Down-regulated in Transcription
  misc_feature: MA Experiment 108530 PARAMETER Experiment Name: Zm_Imbibed_Seeds_P Parameter: Age (day) Value: 6 vs. 2
  misc_feature: MA Experiment 108530 PARAMETER Experiment Name: Zm_Imbibed_Seeds_P Parameter: Organism Value: Zea mays
  misc_feature: MA Experiment 108530 PARAMETER Experiment Name: Zm_Imbibed_Seeds_P Parameter: Plant Line Value: 35A19
  misc_feature: MA Experiment 108530 PARAMETER Experiment Name: Zm_Imbibed_Seeds_P Parameter: Tissue Value: Aerial vs. Embryo
  misc_feature: MA Experiment ID: 108535 Result: Up-regulated in Transcription
  misc_feature: MA Experiment 108535 PARAMETER Experiment Name: Zm_Meristem_P Parameter: Age (day) Value: 8
  misc_feature: MA Experiment 108535 PARAMETER Experiment Name: Zm_Meristem_P Parameter: Organism Value: Zea mays
  misc_feature: MA Experiment 108535 PARAMETER Experiment Name: Zm_Meristem_P Parameter: Plant Line Value: 35A19
  misc_feature: MA Experiment 108535 PARAMETER Experiment Name: Zm_Meristem_P Parameter: Tissue Value: Root Meristem vs. Above Root Meristem
  misc_feature: MA Experiment ID: 108545 Result: Down-regulated in Transcription
  misc_feature: MA Experiment 108545 PARAMETER Experiment Name: Zm_Imbibed_Seeds_P Parameter: Age (day) Value: 3 vs. 2
  misc_feature: MA Experiment 108545 PARAMETER Experiment Name: Zm_Imbibed_Seeds_P Parameter: Organism Value: Zea mays
  misc_feature: MA Experiment 108545 PARAMETER Experiment Name: Zm_Imbibed_Seeds_P Parameter: Plant Line Value: 35A19
  misc_feature: MA Experiment 108545 PARAMETER Experiment Name: Zm_Imbibed_Seeds_P Parameter: Tissue Value: Aerial vs. Embryo
  misc_feature: MA Experiment ID: 108547 Result: Down-regulated in Transcription
  misc_feature: MA Experiment 108547 PARAMETER Experiment Name: Zm_Imbibed_Seeds_P Parameter: Age (day) Value: 4 vs. 2
  misc_feature: MA Experiment 108547 PARAMETER Experiment Name: Zm_Imbibed_Seeds_P Parameter: Organism Value: Zea mays
  misc_feature: MA Experiment 108547 PARAMETER Experiment Name: Zm_Imbibed_Seeds_P Parameter: Plant Line Value: 35A19
  misc_feature: MA Experiment 108547 PARAMETER Experiment Name: Zm_Imbibed_Seeds_P Parameter: Tissue Value: Aerial vs. Embryo
  misc_feature: MA Experiment ID: 108559 Result: Up-regulated in Transcription
  misc_feature: MA Experiment 108559 PARAMETER Experiment Name: Zm_5mM_NO_P Parameter: Age (day) Value: 8
  misc_feature: MA Experiment 108559 PARAMETER Experiment Name: Zm_5mM_NO_P Parameter: Organism Value: Zea mays
  misc_feature: MA Experiment 108559 PARAMETER Experiment Name: Zm_5mM_NO_P Parameter: Plant Line Value: 35A19
  misc_feature: MA Experiment 108559 PARAMETER Experiment Name: Zm_5mM_NO_P Parameter: Timepoint (hr) Value: 12
  misc_feature: MA Experiment 108559 PARAMETER Experiment Name: Zm_5mM_NO_P Parameter: Tissue Value: Aerial
  misc_feature: MA Experiment 108559 PARAMETER Experiment Name: Zm_5mM_NO_P Parameter: Treatment Value: 5mM NO vs. No Treatment
  misc_feature: MA Experiment ID: 20000477 Result: Down-regulated in Transcription
  misc_feature: MA Experiment 20000477 PARAMETER Experiment Name: Zm_5mM_SA_P Parameter: Age (day) Value: 10
  misc_feature: MA Experiment 20000477 PARAMETER Experiment Name: Zm_5mM_SA_P Parameter: Organism Value: Zea mays
  misc_feature: MA Experiment 20000477 PARAMETER Experiment Name: Zm_5mM_SA_P Parameter: Plant Line Value: 35A19
  misc_feature: MA Experiment 20000477 PARAMETER Experiment Name: Zm_5mM_SA_P Parameter: Timepoint (hr) Value: 48
  misc_feature: MA Experiment 20000477 PARAMETER Experiment Name: Zm_5mM_SA_P Parameter: Tissue Value: Aerial
  misc_feature: MA Experiment 20000477 PARAMETER Experiment Name: Zm_5mM_SA_P Parameter: Treatment Value: 5mM SA vs. No Treatment
  misc_feature: MA Experiment ID: 20000478 Result: Down-regulated in Transcription
  misc_feature: MA Experiment 20000478 PARAMETER Experiment Name: Zm_5mM_SA_P Parameter: Age (day) Value: 11
  misc_feature: MA Experiment 20000478 PARAMETER Experiment Name: Zm_5mM_SA_P Parameter: Organism Value: Zea mays
  misc_feature: MA Experiment 20000478 PARAMETER Experiment Name: Zm_5mM_SA_P Parameter: Plant Line Value: 35A19
  misc_feature: MA Experiment 20000478 PARAMETER Experiment Name: Zm_5mM_SA_P Parameter: Timepoint (hr) Value: 72
  misc_feature: MA Experiment 20000478 PARAMETER Experiment Name: Zm_5mM_SA_P Parameter: Tissue Value: Aerial
  misc_feature: MA Experiment 20000478 PARAMETER Experiment Name: Zm_5mM_SA_P Parameter: Treatment Value: 5mM SA vs. No Treatment
  misc_feature: MA Experiment ID: 20000479 Result: Down-regulated in Transcription
  misc_feature: MA Experiment 20000479 PARAMETER Experiment Name: Zm_Drought_P Parameter: Age (day) Value: 10
  misc_feature: MA Experiment 20000479 PARAMETER Experiment Name: Zm_Drought_P Parameter: Organism Value: Zea mays
  misc_feature: MA Experiment 20000479 PARAMETER Experiment Name: Zm_Drought_P Parameter: Plant Line Value: 35A19
  misc_feature: MA Experiment 20000479 PARAMETER Experiment Name: Zm_Drought_P Parameter: Timepoint (hr) Value: 48
  misc_feature: MA Experiment 20000479 PARAMETER Experiment Name: Zm_Drought_P Parameter: Tissue Value: Aerial
  misc_feature: MA Experiment 20000479 PARAMETER Experiment Name: Zm_Drought_P Parameter: Treatment Value: Drought vs. No Drought
  misc_feature: MA Experiment ID: 20000480 Result: Down-regulated in Transcription
  misc_feature: MA Experiment 20000480 PARAMETER Experiment Name: Zm_Drought_P Parameter: Age (day) Value: 11
  misc_feature: MA Experiment 20000480 PARAMETER Experiment Name: Zm_Drought_P Parameter: Organism Value: Zea mays
  misc_feature: MA Experiment 20000480 PARAMETER Experiment Name: Zm_Drought_P Parameter: Plant Line Value: 35A19
  misc_feature: MA Experiment 20000480 PARAMETER Experiment Name: Zm_Drought_P Parameter: Timepoint (hr) Value: 72
  misc_feature: MA Experiment 20000480 PARAMETER Experiment Name: Zm_Drought_P Parameter: Tissue Value: Aerial
  misc_feature: MA Experiment 20000480 PARAMETER Experiment Name: Zm_Drought_P Parameter: Treatment Value: Drought vs. No Drought
  misc_feature: MA Experiment ID: 20001614 Result: Up-regulated in Transcription
  misc_feature: MA Experiment 20001614 PARAMETER Experiment Name: Zm_50ppm_KNO3_L-to-H_P Parameter: Age (day) Value: 21
  misc_feature: MA Experiment 20001614 PARAMETER Experiment Name: Zm_50ppm_KNO3_L-to-H_P Parameter: Organism Value: Zea mays
  misc_feature: MA Experiment 20001614 PARAMETER Experiment Name: Zm_50ppm_KNO3_L-to-H_P Parameter: Plant Line Value: 35A19
  misc_feature: MA Experiment 20001614 PARAMETER Experiment Name: Zm_50ppm_KNO3_L-to-H_P Parameter: Timepoint (hr) Value: 48
  misc_feature: MA Experiment 20001614 PARAMETER Experiment Name: Zm_50ppm_KNO3_L-to-H_P Parameter: Tissue Value: Roots
  misc_feature: MA Experiment 20001614 PARAMETER Experiment Name: Zm_50ppm_KNO3_L-to-H_P Parameter: Treatment Value: 50ppm KNO3 vs. 50ppm KCl
aaccactgctcgcactcactcacagtcgccgccgctgcccagtgcccactgctcgccgctagaggaatctgagagagagaggggaaagggcgaaggaggcgcaggcaggcatgggctccccttcctccctccccgccgcggcggcgctcgtgctcctggccctgctcgccggagcccagtgccgcgaggcccagttcgacgccgcggacgccggcgcggagaacttcaacaccagcgaggccgccgtgtactggggcccctggcagaaggcccgggccacctggtacggccagcccaacggcgccggcccggacgacaacggtggtgcgtgcggcttcaagcacaccaaccagtaccccttcatgtccatgggctcctgcggaaaccagccattgttcaaggacggcaagggatgcggctcctgctacaagattcggtgcaggaaggacccgtcctgctccgggcggacggagacggtgatcatcaccgacatgaactactacccggtgtccaagtaccacttcgacctcagcggcacggcgttcggcaggctggccaagcccggcctcaacgacaagctccgccactcgggcatcatcgacatcgagttcaccagggtgccgtgcgagttccctggcctcaagatcgggttccacgtggaggagtactcgagccccgtctacttcgcggtgctggtggagtacgaggacggcgacggcgacgtggtgcaggtggacctgatggagtccaagacggcgcgcgggccgccgacggggcggtgggcgccgatgcgcgagtcctggggctccatctggcgcatggacaccaaccaccgcatgcagccgcccttctccatccgcatccgcaacgagtccggcaagacgctcgtcgccaggaacgtcatcccggccaactggaggcccaacaccttctaccgctccttcgtccagtacagctagctagctggtttgcgccctcgggccgctcggtcaccaccacccaccactactaccaccaccacccactagactactgcttctgctaccaaatactacggcggaacggaacggctggttgccgccgccgccgtcgtccttggaaaggttgaggcgtctcttggtcatccgtatcgttaccgttgtcatggtcctttgagtcgttgcaaccctgattgcaagccggcaagggggaaaaaaccaacaaagccgtgtgggaaaatggaggaggcaggcgtacaatgtacgctctcccgcccactgttgctttataatctctatatcatcatcatcttcttcttctccattccgatcggtgattaatcgaaaagtatattgtaatgt

SEQ ID NO: 12193 - protein, 368 aa, Zea mays subsp. mays
  peptide (1)..(368): Ceres Seq. ID no. 12413196
TTARTHSQSPPLPSAHCSPLEESERERGKGEGGAGRHGLPFLPPRRGGARAPGPARRSPVPRGPVRRRGRRRGELQHQRGRRVLGPLAEGPGHLVRPAQRRRPGRQRWCVRLQAHQPVPLHVHGLLRKPAIVQGRQGMRLLLQDSVQEGPVLLRADGDGDHHRHELLPGVQVPLRPQRHGVRQAGQARPQRQAPPLGHHRHRVHQGAVRVPWPQDRVPRGGVLEPRLLRGAGGVRGRRRRRGAGGPDGVQDGARAADGAVGADARVLGLHLAHGHQPPHAAALLHPHPQRVRQDARRQERHPGQLEAQHLLPLLRPVQLASWFAPSGRSVTTTHHYYHHHPLDYCFCYQILRRNGTAGCRRRRRPWKG

SEQ ID NO: 12194 - protein, 282 aa, Zea mays subsp. mays
  peptide (1)..(282): Ceres Seq. ID no. 12413197
  misc_feature (179)..(266): Pfam Name: Pollen allergen Pfam Description: Pollen allergen
  misc_feature (1)..(282): Homolog of NCBI NO: 14193775 NR Description: beta-expansin 8 [Zea mays]
  misc_feature (1)..(282): Homolog of NCBI NO: 37536762 NR Description: beta-expansin EXPB4 [Oryza sativa (japonica
  misc_feature (1)..(282): Homolog of NCBI NO: 8118425 NR Description: beta-expansin [Oryza sativa]
  misc_feature (38)..(282): Homolog of NCBI NO: 37536756 NR Description: beta-expansin EXPB6 [Oryza sativa (japonica
  misc_feature (9)..(282): Homolog of NCBI NO: 14330328 NR Description: beta expansin B2 [Festuca pratensis]
  misc_feature (31)..(282): Homolog of NCBI NO: 14330330 NR Description: beta expansin B3 [Festuca pratensis]
  misc_feature (14)..(282): Homolog of NCBI NO: 11346546 NR Description: beta-expansin [Oryza sativa]
  misc_feature (34)..(282): Homolog of NCBI NO: 37536760 NR Description: beta-expansin EXPB3 [Oryza sativa (japonica
  misc_feature (11)..(281): Homolog of NCBI NO: 14193773 NR Description: beta-expansin 7 [Zea mays]
  misc_feature (49)..(281): Homolog of NCBI NO: 8118432 NR Description: beta-expansin [Oryza sativa]
MGSPSSLPAAAALVLLALLAGAQCREAQFDAADAGAENFNTSEAAVYWGPWQKARATWYGQPNGAGPDDNGGACGFKHTNQYPFMSMGSCGNQPLFKDGKGCGSCYKIRCRKDPSCSGRTETVIITDMNYYPVSKYHFDLSGTAFGRLAKPGLNDKLRHSGIIDIEFTRVPCEFPGLKIGFHVEEYSSPVYFAVLVEYEDGDGDVVQVDLMESKTARGPPTGRWAPMRESWGSIWRMDTNHRMQPPFSIRIRNESGKTLVARNVIPANWRPNTFYRSFVQYS

SEQ ID NO: 12195 - protein, 231 aa, Zea mays subsp. mays
  peptide (1)..(231): Ceres Seq. ID no. 12413198
MRLLLQDSVQEGPVLLRADGDGDHHRHELLPGVQVPLRPQRHGVRQAGQARPQRQAPPLGHHRHRVHQGAVRVPWPQDRVPRGGVLEPRLLRGAGGVRGRRRRRGAGGPDGVQDGARAADGAVGADARVLGLHLAHGHQPPHAAALLHPHPQRVRQDARRQERHPGQLEAQHLLPLLRPVQLASWFAPSGRSVTTTHHYYHHHPLDYCFCYQILRRNGTAGCRRRRRPWKG

SEQ ID NO: 12196 - DNA, 1274 bp, Zea mays subsp. mays
  misc_feature (1)..(1274): Ceres Seq. ID no. 12408122
  misc_feature: MA Experiment ID: 108527 Result: Up-regulated in Transcription
  misc_feature: MA Experiment 108527 PARAMETER Experiment Name: Zm_5mM_NO_P Parameter: Age (day) Value: 8
  misc_feature: MA Experiment 108527 PARAMETER Experiment Name: Zm_5mM_NO_P Parameter: Organism Value: Zea mays
  misc_feature: MA Experiment 108527 PARAMETER Experiment Name: Zm_5mM_NO_P Parameter: Plant Line Value: 35A19
  misc_feature: MA Experiment 108527 PARAMETER Experiment Name: Zm_5mM_NO_P Parameter: Timepoint (hr) Value: 6
  misc_feature: MA Experiment 108527 PARAMETER Experiment Name: Zm_5mM_NO_P Parameter: Tissue Value: Aerial
  misc_feature: MA Experiment 108527 PARAMETER Experiment Name: Zm_5mM_NO_P Parameter: Treatment Value: 5mM NO vs. No Treatment
  misc_feature: MA Experiment ID: 108559 Result: Up-regulated in Transcription
  misc_feature: MA Experiment 108559 PARAMETER Experiment Name: Zm_5mM_NO_P Parameter: Age (day) Value: 8
  misc_feature: MA Experiment 108559 PARAMETER Experiment Name: Zm_5mM_NO_P Parameter: Organism Value: Zea mays
  misc_feature: MA Experiment 108559 PARAMETER Experiment Name: Zm_5mM_NO_P Parameter: Plant Line Value: 35A19
  misc_feature: MA Experiment 108559 PARAMETER Experiment Name: Zm_5mM_NO_P Parameter: Timepoint (hr) Value: 12
  misc_feature: MA Experiment 108559 PARAMETER Experiment Name: Zm_5mM_NO_P Parameter: Tissue Value: Aerial
  misc_feature: MA Experiment 108559 PARAMETER Experiment Name: Zm_5mM_NO_P Parameter: Treatment Value: 5mM NO vs. No Treatment
gcgcagagccagccaagccaaccagccagtcagaagaggaaccggggagcggcagctgcagcggccgagggcggagcacgcgaggttcaagattatccggtttaaagacatcagaagaggctgtggcatggatagataccaaagggtagagaagcctcggaatgacacgccaatcagccagaatgagatcagaatcactactcaggggaggatgaggaactatatcagctatgggatgtcgctgcttgaggaaaatggacatgatgagattagtatcaaggccatgggacgggccataaataagacagttatggttgttgaattgatcaagagaagggttggaggtcttcatcagaacactgctactgaatctgttgatatcacagacacatgggaacctttggaagaaggccttctcccactagagacaactcgccatgtgtcgatgatcactgtgacactgtcaaagaaccctctggatacatcatctccaggataccagccacctatcccagctgaagaggtgaaacctgcttttgactatgatcatgaagaatcgtatcccactggtcgtggaagaggacgtggtggtggcagaagaggcaggggaagaggcatgagcaatggcccccctccacctgcttatggttacaacgaagagtgggaggaggaaggagattattataacagagggcgcgggagagggcggctacgtggacgaggagggagagggcgtggtggctactacggaggtgggaggcgtggtggctacggttatgattatggctatgcccccagaggcgggtactatgaagagcaagacgaatactatgatgagcccgaggaatatgctcctccccctggccgcggacgtggcagagggagaaggggcggcatgccttggcgtgggcgtggaggccgcgggccaccgcgcggtggccgagggagctactactaggcgcgagaaatgcgacgtgccgaatgcgtgtgcttattagttatctgttagcgtttgctgcagtgctcttctatggagctccgaccccggactggaattatctcgtaggcccttccaggtgctactctacttcagctgctgtccctgtgcaactcgtccgggcaagttttgtggctcgctcgtggttttgtagctaggttaagcgagtgaagttacactcggtagcgcagtatttcctgcgagattgtttattcttctgttaatgtacctaccttactatttcgtttggattatggatactgggtgcatccgttcc

SEQ ID NO: 12197 - protein, 318 aa, Zea mays subsp. mays
  peptide (1)..(318): Ceres Seq. ID no. 12408123
  misc_feature (43)..(310): Homolog of NCBI NO: 18394837 NR Description: expressed protein; protein id: At1g20220.1, by cDNA: gi_16612273 [Arabidopsis thaliana]
  misc_feature (43)..(310): Homolog of NCBI NO: 25518088 NR Description: T20H2.2 protein - Arabidopsis thaliana Contains similarity to pigpen protein from Mus musculus and contains protein of unknown function DUF78 PF|01918 domain.
  misc_feature (84)..(317): Homolog of NCBI NO: 25404999 NR Description: protein T4O12.22 [imported] - Arabidopsis >gi|8778814|gb|AAF79819.1|AC007396_20 T4O12.22 [Arabidopsis
  misc_feature (43)..(90): Homolog of NCBI NO: 25404999 NR Description: protein T4O12.22 [imported] - Arabidopsis >gi|8778814|gb|AAF79819.1|AC007396_20 T4O12.22 [Arabidopsis
  misc_feature (43)..(179): Homolog of NCBI NO: 15231369 NR Description: unknown protein; protein id: At3g07030.1 thaliana] >gi|6729010|gb|AAF27007.1|AC016827_18 unknown protein
  misc_feature (57)..(307): Homolog of NCBI NO: 23612874 NR Description: hypothetical protein, conserved [Plasmodium
  misc_feature (181)..(315): Homolog of NCBI NO: 25404999 NR Description: protein T4O12.22 [imported] - Arabidopsis >gi|8778814|gb|AAF79819.1|AC007396_20 T4O12.22 [Arabidopsis
  misc_feature (43)..(310): Homolog of NCBI NO: 34897552 NR Description: OSJNBa0042L16.13 [Oryza sativa (japonica
  misc_feature (43)..(317): Homolog of NCBI NO: 18410994 NR Description: expressed protein; protein id: At1g76010.1, by cDNA: gi_15724323, supported by cDNA: gi_15809881, supported cDNA: gi_16226598 [Arabidopsis thaliana]
  misc_feature (43)..(318): Homolog of NCBI NO: 24417384 NR Description: unknown [Arabidopsis thaliana]
RRASQANQPVRRGTGERQLQRPRAEHARFKIIRFKDIRRGCGMDRYQRVEKPRNDTPISQNEIRITTQGRMRNYISYGMSLLEENGHDEISIKAMGRAINKTVMVVELIKRRVGGLHQNTATESVDITDTWEPLEEGLLPLETTRHVSMITVTLSKNPLDTSSPGYQPPIPAEEVKPAFDYDHEESYPTGRGRGRGGGRRGRGRGMSNGPPPPAYGYNEEWEEEGDYYNRGRGRGRLRGRGGRGRGGYYGGGRRGGYGYDYGYAPRGGYYEEQDEYYDEPEEYAPPPGRGRGRGRRGGMPWRGRGGRGPPRGGRGSYY

SEQ ID NO: 12198 - protein, 276 aa, Zea mays subsp. mays
  peptide (1)..(276): Ceres Seq. ID no. 12408124
  misc_feature (1)..(268): Homolog of NCBI NO: 34897552 NR Description: OSJNBa0042L16.13 [Oryza sativa (japonica
  misc_feature (1)..(275): Homolog of NCBI NO: 18410994 NR Description: expressed protein; protein id: At1g76010.1, by cDNA: gi_15724323, supported by cDNA: gi_15809881, supported cDNA: gi_16226598 [Arabidopsis thaliana]
  misc_feature (1)..(276): Homolog of NCBI NO: 24417384 NR Description: unknown [Arabidopsis thaliana]
  misc_feature (1)..(268): Homolog of NCBI NO: 18394837 NR Description: expressed protein; protein id: At1g20220.1, by cDNA: gi_16612273 [Arabidopsis thaliana]
  misc_feature (1)..(268): Homolog of NCBI NO: 25518088 NR Description: T20H2.2 protein - Arabidopsis thaliana Contains similarity to pigpen protein from Mus musculus and contains protein of unknown function DUF78 PF|01918 domain.
  misc_feature (42)..(275): Homolog of NCBI NO: 25404999 NR Description: protein T4O12.22 [imported] - Arabidopsis >gi|8778814|gb|AAF79819.1|AC007396_20 T4O12.22 [Arabidopsis
  misc_feature (1)..(48): Homolog of NCBI NO: 25404999 NR Description: protein T4O12.22 [imported] - Arabidopsis >gi|8778814|gb|AAF79819.1|AC007396_20 T4O12.22 [Arabidopsis
  misc_feature (1)..(137): Homolog of NCBI NO: 15231369 NR Description: unknown protein; protein id: At3g07030.1 thaliana] >gi|6729010|gb|AAF27007.1|AC016827_18 unknown protein
  misc_feature (15)..(265): Homolog of NCBI NO: 23612874 NR Description: hypothetical protein, conserved [Plasmodium
  misc_feature (139)..(273): Homolog of NCBI NO: 25404999 NR Description: protein T4O12.22 [imported] - Arabidopsis >gi|8778814|gb|AAF79819.1|AC007396_20 T4O12.22 [Arabidopsis
MDRYQRVEKPRNDTPISQNEIRITTQGRMRNYISYGMSLLEENGHDEISIKAMGRAINKTVMVVELIKRRVGGLHQNTATESVDITDTWEPLEEGLLPLETTRHVSMITVTLSKNPLDTSSPGYQPPIPAEEVKPAFDYDHEESYPTGRGRGRGGGRRGRGRGMSNGPPPPAYGYNEEWEEEGDYYNRGRGRGRLRGRGGRGRGGYYGGGRRGGYGYDYGYAPRGGYYEEQDEYYDEPEEYAPPPGRGRGRGRRGGMPWRGRGGRGPPRGGRGSYY

SEQ ID NO: 12199 - protein, 248 aa, Zea mays subsp. mays
  peptide (1)..(248): Ceres Seq. ID no. 12408125
  misc_feature (1)..(240): Homolog of NCBI NO: 34897552 NR Description: OSJNBa0042L16.13 [Oryza sativa (japonica
  misc_feature (1)..(247): Homolog of NCBI NO: 18410994 NR Description: expressed protein; protein id: At1g76010.1, by cDNA: gi_15724323, supported by cDNA: gi_15809881, supported cDNA: gi_16226598 [Arabidopsis thaliana]
  misc_feature (1)..(248): Homolog of NCBI NO: 24417384 NR Description: unknown [Arabidopsis thaliana]
  misc_feature (1)..(240): Homolog of NCBI NO: 18394837 NR Description: expressed protein; protein id: At1g20220.1, by cDNA: gi_16612273 [Arabidopsis thaliana]
  misc_feature (1)..(240): Homolog of NCBI NO: 25518088 NR Description: T20H2.2 protein - Arabidopsis thaliana Contains similarity to pigpen protein from Mus musculus and contains protein of unknown function DUF78 PF|01918 domain.
  misc_feature (14)..(247): Homolog of NCBI NO: 25404999 NR Description: protein T4O12.22 [imported] - Arabidopsis >gi|8778814|gb|AAF79819.1|AC007396_20 T4O12.22 [Arabidopsis
  misc_feature (1)..(20): Homolog of NCBI NO: 25404999 NR Description: protein T4O12.22 [imported] - Arabidopsis >gi|8778814|gb|AAF79819.1|AC007396_20 T4O12.22 [Arabidopsis
  misc_feature (1)..(109): Homolog of NCBI NO: 15231369 NR Description: unknown protein; protein id: At3g07030.1 thaliana] >gi|6729010|gb|AAF27007.1|AC016827_18 unknown protein
  misc_feature (1)..(237): Homolog of NCBI NO: 23612874 NR Description: hypothetical protein, conserved [Plasmodium
  misc_feature (111)..(245): Homolog of NCBI NO: 25404999 NR Description: protein T4O12.22 [imported] - Arabidopsis >gi|8778814|gb|AAF79819.1|AC007396_20 T4O12.22 [Arabidopsis
MRNYISYGMSLLEENGHDEISIKAMGRAINKTVMVVELIKRRVGGLHQNTATESVDITDTWEPLEEGLLPLETTRHVSMITVTLSKNPLDTSSPGYQPPIPAEEVKPAFDYDHEESYPTGRGRGRGGGRRGRGRGMSNGPPPPAYGYNEEWEEEGDYYNRGRGRGRLRGRGGRGRGGYYGGGRRGGYGYDYGYAPRGGYYEEQDEYYDEPEEYAPPPGRGRGRGRRGGMPWRGRGGRGPPRGGRGSYY

SEQ ID NO: 12200 - DNA, 1086 bp, Zea mays subsp. mays
  misc_feature (1)..(1086): Ceres Seq. ID no. 12413899
  misc_feature: MA Experiment ID: 108522 Result: Down-regulated in Transcription
  misc_feature: MA Experiment 108522 PARAMETER Experiment Name: Zm_42deg_Heat_P Parameter: Age (day) Value: 8
  misc_feature: MA Experiment 108522 PARAMETER Experiment Name: Zm_42deg_Heat_P Parameter: Organism Value: Zea mays
  misc_feature: MA Experiment 108522 PARAMETER Experiment Name: Zm_42deg_Heat_P Parameter: Plant Line Value: 35A19
  misc_feature: MA Experiment 108522 PARAMETER Experiment Name: Zm_42deg_Heat_P Parameter: Temperature (deg C) Value: 42 vs. 22
  misc_feature: MA Experiment 108522 PARAMETER Experiment Name: Zm_42deg_Heat_P Parameter: Timepoint (hr) Value: 1
  misc_feature: MA Experiment 108522 PARAMETER Experiment Name: Zm_42deg_Heat_P Parameter: Tissue Value: Aerial
agtcacggtactccaccgctaaaaccttcggaaagaatccccaaatctcgcacacctcgaagccttcgaggcccgaaaccctagctcctcggcctccccgccgcttccacccatggctccaggactgcagcgcttcactgacattgcggacgacggcacgccccagctcgacgccgcgtccggcgaggagctggtccgtgtggaccgcaccgtggctgtcgcccttggcccccgctcgccggagtccccggggactctgttcgtcaccaccaggagggtgatttggctcagcgaagcggagaagggcaagggctacgcggtggacttcctcgccatctcgcttcacgctgtgtcgcgcgacctcgaggcgtacccctcgccctgtatctacactcagattgaggcacagttggtacagaagaggaggctggggaatcaaatcctgaagcaaatgaactagagctatctagagtatctgaaatgaggctcatactagcggaccccggtcaactggatgcactttttgatgtcttctgtcattgtgctgaactgaatcctgaccctaatgctgagtgcaatggggagaatggctggatccgtggtgaagatatgtctaatggtgactggattcgtgatgatgtggacatggttgatgaaaatgtcccgcagtttttcaatgccaatccgataggtcaaaatggtggatatgaccttagtcgttcagtatttgagcttcaaatcaacgaccaacgttttgaggatgcagaggaggaacaggagagccatgaaaataatggacattagaaacagagacatgttcctcgagagcatcatgtgatttattttgttgtaaatcactaccgatgcagctcggtttgcctactgtttcatctacactttctcttcctttttccttgatgttataggattaacatcactgggtgactttctggaattgcatcgatggttccttttggtgagaaaaggtcttgctgctggtcaagaatgtaacttgtagagcatgatgttgaatcgtgtgaaattagttcagtacttttgatctaacaaatagaaggtcgaattggg

SEQ ID NO: 12201 - protein, 115 aa, Zea mays subsp. mays
  peptide (1)..(115): Ceres Seq. ID no. 12413900
  misc_feature (44)..(97): Pfam Name: Nucleotide-sensitive chloride conductance Pfam Description: Nucleotide-sensitive chloride conductance
  misc_feature (1)..(99): Homolog of NCBI NO: 15241766 NR Description: putative protein; protein id: At5g62290.1, by cDNA: 7236. [Arabidopsis thaliana] >gi|8809642|dbj|BAA97193.1| protein [Arabidopsis thaliana] >gi|21594704|gb|AAM66035.1|
  misc_feature (1)..(97): Homolog of NCBI NO: 37531484 NR Description: unknown protein [Oryza sativa (japonica
  misc_feature (26)..(100): Homolog of NCBI NO: 18873796 NR Description: swelling dependent chloride channel [Danio rerio]
  misc_feature (26)..(100): Homolog of NCBI NO: 30354604 NR Description: Similar to chloride channel,
MAPGLQRFTDIADDGTPQLDAASGEELVRVDRTVAVALGPRSPESPGTLFVTTRRVIWLSEAEKGKGYAVDFLAISLHAVSRDLEAYPSPCIYTQIEAQLVQKRRLGNQILKQMN

SEQ ID NO: 12202 - protein, 107 aa, Zea mays subsp. mays
  peptide (1)..(107): Ceres Seq. ID no. 12413901
  misc_feature (1)..(107): Homolog of NCBI NO: 15241766 NR Description: putative protein; protein id: At5g62290.1, by cDNA: 7236. [Arabidopsis thaliana] >gi|8809642|dbj|BAA97193.1| protein [Arabidopsis thaliana] >gi|21594704|gb|AAM66035.1|
  misc_feature (1)..(107): Homolog of NCBI NO: 37531488 NR Description: hypothetical protein [Oryza sativa (japonica group)] >gi|21671878|gb|AAM74240.1| Hypothetical protein [Oryza
  misc_feature (1)..(107): Homolog of NCBI NO: 21671879 NR Description: Hypothetical protein [Oryza sativa (japonica
  misc_feature (11)..(107): Homolog of NCBI NO: 19881624 NR Description: Hypothetical protein [Oryza sativa]
  misc_feature (1)..(65): Homolog of NCBI NO: 18873796 NR Description: swelling dependent chloride channel [Danio rerio]
  misc_feature (1)..(65): Homolog of NCBI NO: 30354604 NR Description: Similar to chloride channel,
MRLILADPGQLDALFDVFCHCAELNPDPNAECNGENGWIRGEDMSNGDWIRDDVDMVDENVPQFFNANPIGQNGGYDLSRSVFELQINDQRFEDAEEEQESHENNGH

SEQ ID NO: 12203 - protein, 92 aa, Zea mays subsp. mays
  peptide (1)..(92): Ceres Seq. ID no. 12413902
SRYSTAKTFGKNPQISHTSKPSRPETLAPRPPRRFHPWLQDCSASLTLRTTARPSSTPRPARSWSVWTAPWLSPLAPARRSPRGLCSSPPGG

SEQ ID NO: 12204 - DNA, 840 bp, Zea mays subsp. mays
  misc_feature (1)..(840): Ceres Seq. ID no. 12467613
  misc_feature: MA Experiment ID: 108530 Result: Down-regulated in Transcription
  misc_feature: MA Experiment 108530 PARAMETER Experiment Name: Zm_Imbibed_Seeds_P Parameter: Age (day) Value: 6 vs. 2
  misc_feature: MA Experiment 108530 PARAMETER Experiment Name: Zm_Imbibed_Seeds_P Parameter: Organism Value: Zea mays
  misc_feature: MA Experiment 108530 PARAMETER Experiment Name: Zm_Imbibed_Seeds_P Parameter: Plant Line Value: 35A19
  misc_feature: MA Experiment 108530 PARAMETER Experiment Name: Zm_Imbibed_Seeds_P Parameter: Tissue Value: Aerial vs. Embryo
  misc_feature: MA Experiment ID: 108535 Result: Up-regulated in Transcription
  misc_feature: MA Experiment 108535 PARAMETER Experiment Name: Zm_Meristem_P Parameter: Age (day) Value: 8
  misc_feature: MA Experiment 108535 PARAMETER Experiment Name: Zm_Meristem_P Parameter: Organism Value: Zea mays
  misc_feature: MA Experiment 108535 PARAMETER Experiment Name: Zm_Meristem_P Parameter: Plant Line Value: 35A19
  misc_feature: MA Experiment 108535 PARAMETER Experiment Name: Zm_Meristem_P Parameter: Tissue Value: Root Meristem vs. Above Root Meristem
  misc_feature: MA Experiment ID: 108544 Result: Down-regulated in Transcription
  misc_feature: MA Experiment ID: 108556 Result: Down-regulated in Transcription
  misc_feature: MA Experiment 108556 PARAMETER Experiment Name: Zm_Drought_P Parameter: Age (day) Value: 9
  misc_feature: MA Experiment 108556 PARAMETER Experiment Name: Zm_Drought_P Parameter: Organism Value: Zea mays
  misc_feature: MA Experiment 108556 PARAMETER Experiment Name: Zm_Drought_P Parameter: Plant Line Value: 35A19
  misc_feature: MA Experiment 108556 PARAMETER Experiment Name: Zm_Drought_P Parameter: Timepoint (hr) Value: 24
  misc_feature: MA Experiment 108556 PARAMETER Experiment Name: Zm_Drought_P Parameter: Tissue Value: Aerial
  misc_feature: MA Experiment 108556 PARAMETER Experiment Name: Zm_Drought_P Parameter: Treatment Value: Drought vs. No Drought
  misc_feature: MA Experiment ID: 108689 Result: Down-regulated in Transcription
  misc_feature: MA Experiment 108689 PARAMETER Experiment Name: Zm_Drought_Roots_P Parameter: Age (day) Value: 9
  misc_feature: MA Experiment 108689 PARAMETER Experiment Name: Zm_Drought_Roots_P Parameter: Organism Value: Zea mays
  misc_feature: MA Experiment 108689 PARAMETER Experiment Name: Zm_Drought_Roots_P Parameter: Plant Line Value: 35A19
  misc_feature: MA Experiment 108689 PARAMETER Experiment Name: Zm_Drought_Roots_P Parameter: Timepoint (hr) Value: 24
  misc_feature: MA Experiment 108689 PARAMETER Experiment Name: Zm_Drought_Roots_P Parameter: Tissue Value: Roots
  misc_feature: MA Experiment 108689 PARAMETER Experiment Name: Zm_Drought_Roots_P Parameter: Treatment Value: Drought vs. No Drought
  misc_feature: MA Experiment ID: 20000478 Result: Down-regulated in Transcription
  misc_feature: MA Experiment 20000478 PARAMETER Experiment Name: Zm_5mM_SA_P Parameter: Age (day) Value: 11
  misc_feature: MA Experiment 20000478 PARAMETER Experiment Name: Zm_5mM_SA_P Parameter: Organism Value: Zea mays
  misc_feature: MA Experiment 20000478 PARAMETER Experiment Name: Zm_5mM_SA_P Parameter: Plant Line Value: 35A19
  misc_feature: MA Experiment 20000478 PARAMETER Experiment Name: Zm_5mM_SA_P Parameter: Timepoint (hr) Value: 72
  misc_feature: MA Experiment 20000478 PARAMETER Experiment Name: Zm_5mM_SA_P Parameter: Tissue Value: Aerial
  misc_feature: MA Experiment 20000478 PARAMETER Experiment Name: Zm_5mM_SA_P Parameter: Treatment Value: 5mM SA vs. No Treatment
  misc_feature: MA Experiment ID: 20000488 Result: Up-regulated in Transcription
  misc_feature: MA Experiment 20000488 PARAMETER Experiment Name: Zm_50mM_NH4NO3_L_to_H_P Parameter: Organism Value: Zea mays
  misc_feature: MA Experiment 20000488 PARAMETER Experiment Name: Zm_50mM_NH4NO3_L_to_H_P Parameter: Timepoint (hr) Value: 8
  misc_feature: MA Experiment 20000488 PARAMETER Experiment Name: Zm_50mM_NH4NO3_L_to_H_P Parameter: Tissue Value: Leaves
  misc_feature: MA Experiment 20000488 PARAMETER Experiment Name: Zm_50mM_NH4NO3_L_to_H_P Parameter: Treatment Value: 50mM NH4NO3 vs. 100mM Mannitol
  misc_feature: MA Experiment ID: 20000492 Result: Up-regulated in Transcription
  misc_feature: MA Experiment 20000492 PARAMETER Experiment Name: Zm_Hybrid_Seed_Dev_P Parameter: DAP Value: 12
  misc_feature: MA Experiment 20000492 PARAMETER Experiment Name: Zm_Hybrid_Seed_Dev_P Parameter: Organism Value: Zea mays
  misc_feature: MA Experiment 20000492 PARAMETER Experiment Name: Zm_Hybrid_Seed_Dev_P Parameter: Plant Line Value: 35A19
  misc_feature: MA Experiment 20000492 PARAMETER Experiment Name: Zm_Hybrid_Seed_Dev_P Parameter: Tissue Value: Fert Kernel vs. Unfert Floret
  misc_feature: MA Experiment ID: 20000534 Result: Down-regulated in Transcription
  misc_feature: MA Experiment 20000534 PARAMETER Experiment Name: Zm_Hybrid_Pollen_P Parameter: Age (day) Value: 8
  misc_feature: MA Experiment 20000534 PARAMETER Experiment Name: Zm_Hybrid_Pollen_P Parameter: Organism Value: Zea mays
  misc_feature: MA Experiment 20000534 PARAMETER Experiment Name: Zm_Hybrid_Pollen_P Parameter: Plant Line Value: 35A19
  misc_feature: MA Experiment 20000534 PARAMETER Experiment Name: Zm_Hybrid_Pollen_P Parameter: Tissue Value: Pollen vs. Aerial
  misc_feature: MA Experiment ID: 20000626 Result: Up-regulated in Transcription
  misc_feature: MA Experiment 20000626 PARAMETER Experiment Name: Zm_Herbicide-Treatments_P Parameter: Timepoint (hr) Value: 12
  misc_feature: MA Experiment 20000626 PARAMETER Experiment Name: Zm_Herbicide-Treatments_P Parameter: Tissue Value: Aerial
  misc_feature: MA Experiment 20000626 PARAMETER Experiment Name: Zm_Herbicide-Treatments_P Parameter: Treatment Value: Roundup vs. No Treatment
  misc_feature: MA Experiment ID: 20000632 Result: Down-regulated in Transcription
  misc_feature: MA Experiment 20000632 PARAMETER Experiment Name: Zm_Herbicide-Treatments_P Parameter: Timepoint (hr) Value: 4
  misc_feature: MA Experiment 20000632 PARAMETER Experiment Name: Zm_Herbicide-Treatments_P Parameter: Tissue Value: Aerial
  misc_feature: MA Experiment 20000632 PARAMETER Experiment Name: Zm_Herbicide-Treatments_P Parameter: Treatment Value: Glean vs. No Treatment
  misc_feature: MA Experiment ID: 20001612 Result: Up-regulated in Transcription
  misc_feature: MA Experiment 20001612 PARAMETER Experiment Name: Zm_50ppm_KNO3_L-to-H_P Parameter: Age (day) Value: 19
  misc_feature: MA Experiment 20001612 PARAMETER Experiment Name: Zm_50ppm_KNO3_L-to-H_P Parameter: Organism Value: Zea mays
  misc_feature: MA Experiment 20001612 PARAMETER Experiment Name: Zm_50ppm_KNO3_L-to-H_P Parameter: Plant Line Value: 35A19
  misc_feature: MA Experiment 20001612 PARAMETER Experiment Name: Zm_50ppm_KNO3_L-to-H_P Parameter: Timepoint (hr) Value: 8
  misc_feature: MA Experiment 20001612 PARAMETER Experiment Name: Zm_50ppm_KNO3_L-to-H_P Parameter: Tissue Value: Roots
  misc_feature: MA Experiment 20001612 PARAMETER Experiment Name: Zm_50ppm_KNO3_L-to-H_P Parameter: Treatment Value: 50ppm KNO3 vs. 50ppm KCl
attggcaaggcttctcaaaagcacaagggaaaaatctctcgttctcttgctgcaaaaacagctcttgctatccggtatgatgcccttggtgatggtgaggacaactccattggcactgagagtcgacttaagcttgagacacggcttcaagttcttgagggtagagaacttgggaaatctgctggttccacaaaggggaagcccaagatagaagtgtatgaaaaggaccggaagaagggtactggggctttaacaactcctgctaagacatataaccctgcagctgatctggtactcacggaagaaacaccaaagaagtcagaattggcttcaaagaagaggaaacataatgaggtggaaactgaaccattagcagagcctgcagaggaagcaatccaggaggatggtgaccaggaggatcggaagaagaagaagaaaaagaacaaggaaagcaaggaggctcctgctggtgaaggtgatggtgagaagaaaaagaaaaagaagtctaaggaggtcgaggaagagcctgttgtggctgctgcttcagaagttaagaagaagaaaaagaagtctgacgctgatggtgaggatgtcgcaatgcaaaccgaagaatcaggtaagaaagagaagaaaaagaagaaaaaggcgtgctgatgatgagtgagacattcacactggaagagaatttgcgggtaccaaactaccaaaggctgggactcagctgttctgtaaaatggatttgcgggtagaaacgatatcgacatcagtttttttggacccggcttgtattcaagtacttgctcgatcctggtgatgatggaatttaagttttgctgttgc

SEQ ID NO: 12205 - protein, 217 aa, Zea mays subsp. mays
  peptide (1)..(217): Ceres Seq. ID no. 12467614
  misc_feature (1)..(55): Pfam Name: Putative snoRNA binding domain Pfam Description: Putative snoRNA binding domain
  misc_feature (1)..(139): Homolog of NCBI NO: 3288883 NR Description: SAR DNA binding protein [Oryza sativa]
  misc_feature (1)..(215): Homolog of NCBI NO: 13623892 NR Description: MAR-binding protein [Nicotiana tabacum]
  misc_feature (1)..(192): Homolog of NCBI NO: 7451352 NR Description: SAR DNA-binding protein 2 - garden pea
  misc_feature (1)..(192): Homolog of NCBI NO: 33945887 NR Description: SAR DNA-binding protein-like protein [Lotus
  misc_feature (1)..(194): Homolog of NCBI NO: 15229884 NR Description: putative SAR DNA-binding protein-1; protein id: supported by cDNA: gi_11878186, supported by cDNA: gi_15724279
  misc_feature (1)..(192): Homolog of NCBI NO: 15240445 NR Description: SAR DNA-binding protein - like; protein id: supported by cDNA: gi_11878184, supported by cDNA: gi_18377655, by cDNA: gi_20465698 [Arabidopsis thaliana]
  misc_feature (1)..(214): Homolog of NCBI NO: 7451353 NR Description: SAR DNA-binding protein-1 - garden pea
  misc_feature (1)..(89): Homolog of NCBI NO: 2811028 NR Description: Hypothetical protein At5g27120
  misc_feature (1)..(197): Homolog of NCBI NO: 9256555 NR Description: nucleolar protein 5; SIK similar protein [Mus
  misc_feature (1)..(197): Homolog of NCBI NO: 26336274 NR Description: unnamed protein product [Mus musculus]
IGKASQKHKGKISRSLAAKTALAIRYDALGDGEDNSIGTESRLKLETRLQVLEGRELGKSAGSTKGKPKIEVYEKDRKKGTGALTTPAKTYNPAADLVLTEETPKKSELASKKRKHNEVETEPLAEPAEEAIQEDGDQEDRKKKKKKNKESKEAPAGEGDGEKKKKKKSKEVEEEPVVAAASEVKKKKKKSDADGEDVAMQTEESGKKEKKKKKKAC

SEQ ID NO: 12206 - DNA, 1561 bp, Zea mays subsp. mays
  misc_feature (1)..(1561): Ceres Seq. ID no. 12411608
  misc_feature: MA Experiment ID: 108523 Result: Up-regulated in Transcription
  misc_feature: MA Experiment 108523 PARAMETER Experiment Name: Zm_42deg_Heat_P Parameter: Age (day) Value: 8
  misc_feature: MA Experiment 108523 PARAMETER Experiment Name: Zm_42deg_Heat_P Parameter: Organism Value: Zea mays
  misc_feature: MA Experiment 108523 PARAMETER Experiment Name: Zm_42deg_Heat_P Parameter: Plant Line Value: 35A19
  misc_feature: MA Experiment 108523 PARAMETER Experiment Name: Zm_42deg_Heat_P Parameter: Temperature (deg C) Value: 42 vs. 22
  misc_feature: MA Experiment 108523 PARAMETER Experiment Name: Zm_42deg_Heat_P Parameter: Timepoint (hr) Value: 6
  misc_feature: MA Experiment 108523 PARAMETER Experiment Name: Zm_42deg_Heat_P Parameter: Tissue Value: Aerial
ctctccccgtctgcctcgccctccacaccaggccacgccacacacaggatagcgagcgggagcgacggcggcggcggaggagctagggttttgatccggcctcgccggctaggctgcgccgccccgacgccgaagccatggacagggagcttctagagacgtttgacgcggccaagaaggcggccgacgaggcggcaggggacggcaactcgccggaggctggccgctgcctcgacgcgctgcggcggctgcgcgacattcgcgtcaacaccgacatcctcgtctcgacgcaggttggcaaacgccttcgaccccttactaagcatcctcactcaggcattcaagcagttgctgcagacctttttgggtactggaaaaaggttgtccttgaagagtcaggaaagaaaaatggcggctcagagaatgaaagatcaagtgactcttcaggaaaggttgagaaggtgaggcccgtgaagattgaaaagaactctgcatcagcaagcatgaagcttgagaaaagagatgtggatgttaggggtcagaagcctaacaatgtcaaagttgagaagactactagtaatggttccaaagctcaatctgtgaaggtggaaagggtatccaaagaagtcataaggactcctgactcgaagaggccagcatccgtccccaatggccacccaaagcttacatctcttgtcaaatgcaatgatcctacccgagataaaatccgggaactacttgctgaagcctttgtaagtgtttccagagagactagtgatgatgacagagacgaagtgaaaaacatcttggatgaagtcgaggcatgcgacccatacagggttgccgtgacagtagagtctgcactattcgagaggcttggaccttccactgggactcacagggcgaaatacaggtcaatcatgttcaacctgagggctgaaaacaataccgatttccggaggagggtcctcatcggtctagtggcgccggagaggcttccagacataccccctgatgagatggctagcgacgcaaggaagcaagagaacatgcagatcaaggagaaggctctgttcgactgcgagcgtggagcggcaccaaaggcgacgacggaccagttcaagtgtgccagatgtgggcagcggaagacgacttactaccagctgcagactcggagtgctgatgaaccgatgacgacgttcgtcacatgcgtgaactgcaacaatcactggaagttctgctgagtgttcagccttgctaaagtgtttacttagttgtgctgagcacactatcctgctgtgatgtgtgtgctctgttagttgtgactggaagttcgacagggcaggctgaacaactcaacttttttccccttttttaccccccgtaaactaggagcagttatcctcttcctctgtcaggcagcctcctgattcattcagattgtactagtcgaacgcgtgaatgttgttgacttgatcgcatcgtcaccagatgtgaatgttcttgggtggagttagaatagaatggtgccaagtcagacgatgctgatggattagtggcg

SEQ ID NO: 12207 - protein, 368 aa, Zea mays subsp. mays
  peptide (1)..(368): Ceres Seq. ID no. 12411609
  misc_feature (328)..(366): Pfam Name: Transcription factor S-II (TFIIS) Pfam Description: Transcription factor S-II (TFIIS)
  misc_feature (1)..(368): Homolog of NCBI NO: 28876018 NR Description: putative transcription elongation factor [Oryza
  misc_feature (1)..(368): Homolog of NCBI NO: 23617251 NR Description: putative transcription elongation factor [Oryza
  misc_feature (1)..(368): Homolog of NCBI NO: 15224901 NR Description: putative elongation factor; protein id: [Arabidopsis thaliana] >gi|25408599|pir||E84806 probable
  misc_feature (1)..(368): Homolog of NCBI NO: 18377737 NR Description: putative elongation factor [Arabidopsis thaliana]
  misc_feature (32)..(368): Homolog of NCBI NO: 20473950 NR Description: similar to transcription elongation factor [Mus musculus] [Homo sapiens] >gi|28380172|sp|O75764|TCE3_HUMAN
  misc_feature (35)..(368): Homolog of NCBI NO: 3288459 NR Description: transcription elongation factor TFIIS.h [Homo
  misc_feature (32)..(368): Homolog of NCBI NO: 12832213 NR Description: unnamed protein product [Mus musculus]
  misc_feature (181)..(297): Homolog of NCBI NO: 15233998 NR Description: putative protein; protein id: At4g18720.1
  misc_feature (3)..(97): Homolog of NCBI NO: 15233998 NR Description: putative protein; protein id: At4g18720.1
  misc_feature (38)..(367): Homolog of NCBI NO: 23485845 NR Description: transcription elongation factor TFIIS.h, putative
MDRELLETFDAAKKAADEAAGDGNSPEAGRCLDALRRLRDIRVNTDILVSTQVGKRLRPLTKHPHSGIQAVAADLFGYWKKVVLEESGKKNGGSENERSSDSSGKVEKVRPVKIEKNSASASMKLEKRDVDVRGQKPNNVKVEKTTSNGSKAQSVKVERVSKEVIRTPDSKRPASVPNGHPKLTSLVKCNDPTRDKIRELLAEAFVSVSRETSDDDRDEVKNILDEVEACDPYRVAVTVESALFERLGPSTGTHRAKYRSIMFNLRAENNTDFRRRVLIGLVAPERLPDIPPDEMASDARKQENMQIKEKALFDCERGAAPKATTDQFKCARCGQRKTTYYQLQTRSADEPMTTFVTCVNCNNHWKFC

SEQ ID NO: 12208 - protein, 246 aa, Zea mays subsp. mays
  peptide (1)..(246): Ceres Seq. ID no. 12411610
  misc_feature (206)..(244): Pfam Name: Transcription factor S-II (TFIIS) Pfam Description: Transcription factor S-II (TFIIS)
  misc_feature (1)..(246): Homolog of NCBI NO: 28876018 NR Description: putative transcription elongation factor [Oryza
  misc_feature (1)..(246): Homolog of NCBI NO: 23617251 NR Description: putative transcription elongation factor [Oryza
  misc_feature (1)..(246): Homolog of NCBI NO: 15224901 NR Description: putative elongation factor; protein id: [Arabidopsis thaliana] >gi|25408599|pir||E84806 probable
  misc_feature (1)..(246): Homolog of NCBI NO: 18377737 NR Description: putative elongation factor [Arabidopsis thaliana]
  misc_feature (1)..(246): Homolog of NCBI NO: 20473950 NR Description: similar to transcription elongation factor [Mus musculus] [Homo sapiens] >gi|28380172|sp|O75764|TCE3_HUMAN
  misc_feature (1)..(246): Homolog of NCBI NO: 3288459 NR Description: transcription elongation factor TFIIS.h [Homo
  misc_feature (1)..(246): Homolog of NCBI NO: 12832213 NR Description: unnamed protein product [Mus musculus]
  misc_feature (59)..(175): Homolog of NCBI NO: 15233998 NR Description: putative protein; protein id: At4g18720.1
  misc_feature (1)..(245): Homolog of NCBI NO: 23485845 NR Description: transcription elongation factor TFIIS.h, putative
  misc_feature (39)..(246): Homolog of NCBI NO: 4507385 NR Description: transcription elongation factor A (SII), 2 [Homo >gi|28380177|sp|Q15560|TCE2_HUMAN Transcription elongation factor
MKLEKRDVDVRGQKPNNVKVEKTTSNGSKAQSVKVERVSKEVIRTPDSKRPASVPNGHPKLTSLVKCNDPTRDKIRELLAEAFVSVSRETSDDDRDEVKNILDEVEACDPYRVAVTVESALFERLGPSTGTHRAKYRSIMFNLRAENNTDFRRRVLIGLVAPERLPDIPPDEMASDARKQENMQIKEKALFDCERGAAPKATTDQFKCARCGQRKTTYYQLQTRSADEPMTTFVTCVNCNNHWKFC

SEQ ID NO: 12209 - DNA, 1443 bp, Zea mays subsp. mays; identical to SEQ ID NO: 9150
  misc_feature (1)..(1443): Ceres Seq. ID no. 12351752
  misc_feature: MA Experiment ID: 108528 Result: Down-regulated in Transcription
  misc_feature: MA Experiment 108528 PARAMETER Experiment Name: Zm_Imbibed_Seeds_P Parameter: Age (day) Value: 5 vs. 2
  misc_feature: MA Experiment 108528 PARAMETER Experiment Name: Zm_Imbibed_Seeds_P Parameter: Organism Value: Zea mays
  misc_feature: MA Experiment 108528 PARAMETER Experiment Name: Zm_Imbibed_Seeds_P Parameter: Plant Line Value: 35A19
  misc_feature: MA Experiment 108528 PARAMETER Experiment Name: Zm_Imbibed_Seeds_P Parameter: Tissue Value: Aerial vs. Embryo
  misc_feature: MA Experiment ID: 108529 Result: Down-regulated in Transcription
  misc_feature: MA Experiment 108529 PARAMETER Experiment Name: Zm_Imbibed_Seeds_P Parameter: Age (day) Value: 5 vs. 2
  misc_feature: MA Experiment 108529 PARAMETER Experiment Name: Zm_Imbibed_Seeds_P Parameter: Organism Value: Zea mays
  misc_feature: MA Experiment 108529 PARAMETER Experiment Name: Zm_Imbibed_Seeds_P Parameter: Plant Line Value: 35A19
  misc_feature: MA Experiment 108529 PARAMETER Experiment Name: Zm_Imbibed_Seeds_P Parameter: Tissue Value: Roots vs. Embryo
  misc_feature: MA Experiment ID: 108530 Result: Down-regulated in Transcription
  misc_feature: MA Experiment 108530 PARAMETER Experiment Name: Zm_Imbibed_Seeds_P Parameter: Age (day) Value: 6 vs. 2
  misc_feature: MA Experiment 108530 PARAMETER Experiment Name: Zm_Imbibed_Seeds_P Parameter: Organism Value: Zea mays
  misc_feature: MA Experiment 108530 PARAMETER Experiment Name: Zm_Imbibed_Seeds_P Parameter: Plant Line Value: 35A19
  misc_feature: MA Experiment 108530 PARAMETER Experiment Name: Zm_Imbibed_Seeds_P Parameter: Tissue Value: Aerial vs. Embryo
  misc_feature: MA Experiment ID: 108536 Result: Up-regulated in Transcription
  misc_feature: MA Experiment 108536 PARAMETER Experiment Name: Zm_Meristem_P Parameter: Age (day) Value: 8
  misc_feature: MA Experiment 108536 PARAMETER Experiment Name: Zm_Meristem_P Parameter: Organism Value: Zea mays
  misc_feature: MA Experiment 108536 PARAMETER Experiment Name: Zm_Meristem_P Parameter: Plant Line Value: 35A19
  misc_feature: MA Experiment 108536 PARAMETER Experiment Name: Zm_Meristem_P Parameter: Tissue Value: Shoot Meristem vs. Above Shoot Meristem
  misc_feature: MA Experiment ID: 108543 Result: Down-regulated in Transcription
  misc_feature: MA Experiment ID: 108546 Result: Down-regulated in Transcription
  misc_feature: MA Experiment 108546 PARAMETER Experiment Name: Zm_Imbibed_Seeds_P Parameter: Age (day) Value: 3 vs. 2
  misc_feature: MA Experiment 108546 PARAMETER Experiment Name: Zm_Imbibed_Seeds_P Parameter: Organism Value: Zea mays
  misc_feature: MA Experiment 108546 PARAMETER Experiment Name: Zm_Imbibed_Seeds_P Parameter: Plant Line Value: 35A19
  misc_feature: MA Experiment 108546 PARAMETER Experiment Name: Zm_Imbibed_Seeds_P Parameter: Tissue Value: Roots vs. Embryo
  misc_feature: MA Experiment ID: 20000479 Result: Up-regulated in Transcription
  misc_feature: MA Experiment 20000479 PARAMETER Experiment Name: Zm_Drought_P Parameter: Age (day) Value: 10
  misc_feature: MA Experiment 20000479 PARAMETER Experiment Name: Zm_Drought_P Parameter: Organism Value: Zea mays
  misc_feature: MA Experiment 20000479 PARAMETER Experiment Name: Zm_Drought_P Parameter: Plant Line Value: 35A19
  misc_feature: MA Experiment 20000479 PARAMETER Experiment Name: Zm_Drought_P Parameter: Timepoint (hr) Value: 48
  misc_feature: MA Experiment 20000479 PARAMETER Experiment Name: Zm_Drought_P Parameter: Tissue Value: Aerial
  misc_feature: MA Experiment 20000479 PARAMETER Experiment Name: Zm_Drought_P Parameter: Treatment Value: Drought vs. No Drought
  misc_feature: MA Experiment ID: 20000535 Result: Up-regulated in Transcription
  misc_feature: MA Experiment 20000535 PARAMETER Experiment Name: Zm_Hybrid_Seed_Dev_P Parameter: DAP Value: 30 vs. 12
  misc_feature: MA Experiment 20000535 PARAMETER Experiment Name: Zm_Hybrid_Seed_Dev_P Parameter: Organism Value: Zea mays
  misc_feature: MA Experiment 20000535 PARAMETER Experiment Name: Zm_Hybrid_Seed_Dev_P Parameter: Plant Line Value: 35A19
  misc_feature: MA Experiment 20000535 PARAMETER Experiment Name: Zm_Hybrid_Seed_Dev_P Parameter: Tissue Value: Embryo vs. Unfert Floret

SEQ ID NO: 12210 - protein, 242 aa, Zea mays subsp. mays; identical to SEQ ID NO: 9151
  peptide (1)..(242): Ceres Seq. ID no. 12351753
  misc_feature (48)..(233): Pfam Name: GDSL-like Lipase/Acylhydrolase Pfam Description: GDSL-like Lipase/Acylhydrolase
  misc_feature (48)..(233): Pfam Name: GDSL-like Lipase/Acylhydrolase Pfam Description: GDSL-like Lipase/Acylhydrolase
  misc_feature (19)..(233): Homolog of NCBI NO: 34898314 NR Description: ESTs AU075322(C11109),D22430(C11109) correspond
  misc_feature (19)..(233): Homolog of NCBI NO: 15234074 NR Description: putative acetyltransferase; protein id: [Arabidopsis thaliana] >gi|25407083|pir||H85014 probable
  misc_feature (19)..(216): Homolog of NCBI NO: 7485222 NR Description: hypothetical protein A_IG002N01.17 - Arabidopsis >gi|2191137|gb|AAB61024.1| similar to the GDSL family of
  misc_feature (7)..(216): Homolog of NCBI NO: 33147015 NR Description: putative early nodulin 8 precursor [Oryza sativa
  misc_feature (7)..(216): Homolog of NCBI NO: 34901120 NR Description: contains ESTs
  misc_feature (31)..(217): Homolog of NCBI NO: 33147016 NR Description: putative early nodulin 8 precursor [Oryza sativa
  misc_feature (23)..(216): Homolog of NCBI NO: 30909057 NR Description: ENSP-like protein [Hevea brasiliensis]
  misc_feature (24)..(216): Homolog of NCBI NO: 15231558 NR Description: nodulin, putative; protein id: At3g26430.1,
  misc_feature (23)..(224): Homolog of NCBI NO: 18390045 NR Description: Enod8.1 [Medicago truncatula]
  misc_feature (23)..(224): Homolog of NCBI NO: 25457244 NR Description: early nodule-specific protein ENOD8 [imported] -
  misc_feature (19)..(216): Homolog of NCBI NO: 7485222 NR Description: hypothetical protein A_IG002N01.17 - Arabidopsis >gi|2191137|gb|AAB61024.1| similar to the GDSL family of
  misc_feature (7)..(216): Homolog of NCBI NO: 33147015 NR Description: putative early nodulin 8 precursor [Oryza sativa
  misc_feature (7)..(216): Homolog of NCBI NO: 34901120 NR Description: contains ESTs
  misc_feature (31)..(217): Homolog of NCBI NO: 33147016 NR Description: putative early nodulin 8 precursor [Oryza sativa
  misc_feature (23)..(216): Homolog of NCBI NO: 30909057 NR Description: ENSP-like protein [Hevea brasiliensis]
  misc_feature (24)..(216): Homolog of NCBI NO: 15231558 NR Description: nodulin, putative; protein id: At3g26430.1,
  misc_feature (19)..(233): Homolog of NCBI NO: 15234074 NR Description: putative acetyltransferase; protein id: [Arabidopsis thaliana] >gi|25407083|pir||H85014 probable
  misc_feature (19)..(233): Homolog of NCBI NO: 34898314 NR Description: ESTs AU075322(C11109),D22430(C11109) correspond
  misc_feature (23)..(224): Homolog of NCBI NO: 18390045 NR Description: Enod8.1 [Medicago truncatula]
  misc_feature (23)..(224): Homolog of NCBI NO: 25457244 NR Description: early nodule-specific protein ENOD8 [imported] -

SEQ ID NO: 12211 - protein, 233 aa, Zea mays subsp. mays; identical to SEQ ID NO: 9152
  peptide (1)..(233): Ceres Seq. ID no. 12351754
  misc_feature (39)..(224): Pfam Name: GDSL-like Lipase/Acylhydrolase Pfam Description: GDSL-like Lipase/Acylhydrolase
  misc_feature (39)..(224): Pfam Name: GDSL-like Lipase/Acylhydrolase Pfam Description: GDSL-like Lipase/Acylhydrolase
  misc_feature (10)..(224): Homolog of NCBI NO: 34898314 NR Description: ESTs AU075322(C11109),D22430(C11109) correspond
  misc_feature (10)..(224): Homolog of NCBI NO: 15234074 NR Description: putative acetyltransferase; protein id: [Arabidopsis thaliana] >gi|25407083|pir||H85014 probable
  misc_feature (10)..(207): Homolog of NCBI NO: 7485222 NR Description: hypothetical protein A_IG002N01.17 - Arabidopsis >gi|2191137|gb|AAB61024.1| similar to the GDSL family of
  misc_feature (1)..(207): Homolog of NCBI NO: 33147015 NR Description: putative early nodulin 8 precursor [Oryza sativa
  misc_feature (1)..(207): Homolog of NCBI NO: 34901120 NR Description: contains ESTs
  misc_feature (10)..(224): Homolog of NCBI NO: 15234074 NR Description: putative acetyltransferase; protein id: [Arabidopsis thaliana] >gi|25407083|pir||H85014 probable
  misc_feature (1)..(207): Homolog of NCBI NO: 33147015 NR Description: putative early nodulin 8 precursor [Oryza sativa
  misc_feature (14)..(215): Homolog of NCBI NO: 25457244 NR Description: early nodule-specific protein ENOD8 [imported] -
  misc_feature (14)..(215): Homolog of NCBI NO: 18390045 NR Description: Enod8.1 [Medicago truncatula]
  misc_feature (15)..(207): Homolog of NCBI NO: 15231558 NR Description: nodulin, putative; protein id: At3g26430.1,
  misc_feature (14)..(207): Homolog of NCBI NO: 30909057 NR Description: ENSP-like protein [Hevea brasiliensis]
  misc_feature (22)..(208): Homolog of NCBI NO: 33147016 NR Description: putative early nodulin 8 precursor [Oryza sativa
  misc_feature (1)..(207): Homolog of NCBI NO: 34901120 NR Description: contains ESTs
  misc_feature (10)..(207): Homolog of NCBI NO: 7485222 NR Description: hypothetical protein A_IG002N01.17 - Arabidopsis >gi|2191137|gb|AAB61024.1| similar to the GDSL family of
  misc_feature (10)..(224): Homolog of NCBI NO: 34898314 NR Description: ESTs AU075322(C11109),D22430(C11109) correspond
  misc_feature (22)..(208): Homolog of NCBI NO: 33147016 NR Description: putative early nodulin 8 precursor [Oryza sativa
  misc_feature (14)..(207): Homolog of NCBI NO: 30909057 NR Description: ENSP-like protein [Hevea brasiliensis]
  misc_feature (15)..(207): Homolog of NCBI NO: 15231558 NR Description: nodulin, putative; protein id: At3g26430.1,
  misc_feature (14)..(215): Homolog of NCBI NO: 18390045 NR Description: Enod8.1 [Medicago truncatula]
  misc_feature (14)..(215): Homolog of NCBI NO: 25457244 NR Description: early nodule-specific protein ENOD8 [imported] -

SEQ ID NO: 12212 - protein, 230 aa, Zea mays subsp. mays; identical to SEQ ID NO: 9153
  peptide (1)..(230): Ceres Seq. ID no. 12351755

SEQ ID NO: 12213 - DNA, 1482 bp, Zea mays subsp. mays
  misc_feature (1)..(1482): Ceres Seq. ID no. 12390132
  misc_feature: MA Experiment ID: 108522 Result: Down-regulated in Transcription
  misc_feature: MA Experiment 108522 PARAMETER Experiment Name: Zm_42deg_Heat_P Parameter: Age (day) Value: 8
  misc_feature: MA Experiment 108522 PARAMETER Experiment Name: Zm_42deg_Heat_P Parameter: Organism Value: Zea mays
  misc_feature: MA Experiment 108522 PARAMETER Experiment Name: Zm_42deg_Heat_P Parameter: Plant Line Value: 35A19
  misc_feature: MA Experiment 108522 PARAMETER Experiment Name: Zm_42deg_Heat_P Parameter: Temperature (deg C) Value: 42 vs. 22
  misc_feature: MA Experiment 108522 PARAMETER Experiment Name: Zm_42deg_Heat_P Parameter: Timepoint (hr) Value: 1
  misc_feature: MA Experiment 108522 PARAMETER Experiment Name: Zm_42deg_Heat_P Parameter: Tissue Value: Aerial
  misc_feature: MA Experiment ID: 108523 Result: Down-regulated in Transcription
  misc_feature: MA Experiment 108523 PARAMETER Experiment Name: Zm_42deg_Heat_P Parameter: Age (day) Value: 8
  misc_feature: MA Experiment 108523 PARAMETER Experiment Name: Zm_42deg_Heat_P Parameter: Organism Value: Zea mays
  misc_feature: MA Experiment 108523 PARAMETER Experiment Name: Zm_42deg_Heat_P Parameter: Plant Line Value: 35A19
  misc_feature: MA Experiment 108523 PARAMETER Experiment Name: Zm_42deg_Heat_P Parameter: Temperature (deg C) Value: 42 vs. 22
  misc_feature: MA Experiment 108523 PARAMETER Experiment Name: Zm_42deg_Heat_P Parameter: Timepoint (hr) Value: 6
  misc_feature: MA Experiment 108523 PARAMETER Experiment Name: Zm_42deg_Heat_P Parameter: Tissue Value: Aerial
  misc_feature: MA Experiment ID: 108543 Result: Up-regulated in Transcription
  misc_feature: MA Experiment ID: 108544 Result: Down-regulated in Transcription
  misc_feature: MA Experiment ID: 20000478 Result: Down-regulated in Transcription
  misc_feature: MA Experiment 20000478 PARAMETER Experiment Name: Zm_5mM_SA_P Parameter: Age (day) Value: 11
  misc_feature: MA Experiment 20000478 PARAMETER Experiment Name: Zm_5mM_SA_P Parameter: Organism Value: Zea mays
  misc_feature: MA Experiment 20000478 PARAMETER Experiment Name: Zm_5mM_SA_P Parameter: Plant Line Value: 35A19
  misc_feature: MA Experiment 20000478 PARAMETER Experiment Name: Zm_5mM_SA_P Parameter: Timepoint (hr) Value: 72
  misc_feature: MA Experiment 20000478 PARAMETER Experiment Name: Zm_5mM_SA_P Parameter: Tissue Value: Aerial
  misc_feature: MA Experiment 20000478 PARAMETER Experiment Name: Zm_5mM_SA_P Parameter: Treatment Value: 5mM SA vs. No Treatment
  misc_feature: MA Experiment ID: 20000532 Result: Down-regulated in Transcription
  misc_feature: MA Experiment 20000532 PARAMETER Experiment Name: Zm_0.001percent_MeJA_P Parameter: Age (day) Value: 10
  misc_feature: MA Experiment 20000532 PARAMETER Experiment Name: Zm_0.001percent_MeJA_P Parameter: Organism Value: Zea mays
  misc_feature: MA Experiment 20000532 PARAMETER Experiment Name: Zm_0.001percent_MeJA_P Parameter: Plant Line Value: 35A19
  misc_feature: MA Experiment 20000532 PARAMETER Experiment Name: Zm_0.001percent_MeJA_P Parameter: Timepoint (hr) Value: 48
  misc_feature: MA Experiment 20000532 PARAMETER Experiment Name: Zm_0.001percent_MeJA_P Parameter: Tissue Value: Aerial
  misc_feature: MA Experiment 20000532 PARAMETER Experiment Name: Zm_0.001percent_MeJA_P Parameter: Treatment Value: 0.001percent MeJA vs. No Treatment
  misc_feature: MA Experiment ID: 20000535 Result: Up-regulated in Transcription
  misc_feature: MA Experiment 20000535 PARAMETER Experiment Name: Zm_Hybrid_Seed_Dev_P Parameter: DAP Value: 30 vs. 12
  misc_feature: MA Experiment 20000535 PARAMETER Experiment Name: Zm_Hybrid_Seed_Dev_P Parameter: Organism Value: Zea mays
  misc_feature: MA Experiment 20000535 PARAMETER Experiment Name: Zm_Hybrid_Seed_Dev_P Parameter: Plant Line Value: 35A19
  misc_feature: MA Experiment 20000535 PARAMETER Experiment Name: Zm_Hybrid_Seed_Dev_P Parameter: Tissue Value: Embryo vs. Unfert Floret
  misc_feature: MA Experiment ID: 20000626 Result: Down-regulated in Transcription
  misc_feature: MA Experiment 20000626 PARAMETER Experiment Name: Zm_Herbicide-Treatments_P Parameter: Timepoint (hr) Value: 12
  misc_feature: MA Experiment 20000626 PARAMETER Experiment Name: Zm_Herbicide-Treatments_P Parameter: Tissue Value: Aerial
  misc_feature: MA Experiment 20000626 PARAMETER Experiment Name: Zm_Herbicide-Treatments_P Parameter: Treatment Value: Roundup vs. No Treatment
tcttcctcctcccctctcccccgttggcttgttcagttgctcttcgtctcctcccctcccctccgccggctctccggcccctcttcgtcccccctcatcctccgcgcacatttccagacgaggaaccagggaggctaagtgcaggaaggcaggatgcagtacaagaacctgggccggtcggggctccgcgtcagccagctctcgtacggcgcgtgggtgaccttcgggaaccagctggacgtgaaggaggccaaggcgctgctgcaggcgtgccgggacgcgggcgtcaacttcttcgacaacgccgaggtgtacgccaacggccgcgccgaggagatcatgggccaggccatccgggacctgggctggcgccgctccgacgtcgtcatctccaccaagctcttctggggcggccagggccccaacgacaaggggcctctcccgcaagcacgtcgtcgagggcctccgcgcctcgctccgccgcctcgacatggactacgtcgacgtcgtctactgccaccgccccgacgcctccacgcccgtcgaggagacggtgcgcgccatcaactgggtcatcgaccagggctgggccttctactggggcacctccgagtggtccgcgcagcagatcaccgaggcctgggcagtcgccaaccgcctcgacctcgtcggacccatcgtcgagcagccggagtacaaccttttctccagacacaaggttgagtctgagttcttgccactttacagcacctatggcatcggattgactacatggagtcctctagcttcaggagtactaactggaaaatataccaaagggaacatacctgctgatagcaggtttgctctagacaattacaagaacctggcaaataggtccctggttgacgacacgcttcggaaagtgaatgggctaaaacctatcgccgctgaactcggcgtttcgttagctcaactctccattgcttggtgcgcgtcaaaccccaacgtctcatccgtgatcactggagccaccaaagaaagccagatcgtggagaacatgaaggctctagatgtcatcccactgctgacgccggaggtcgttgacaggattgaggcggtcgtccagagcaagcccaaacgcactgaatcatacaggtgaaggcggtacgtacgggcctacgtgaccgtgcagattgtgagtggcgcggagggattctcggcattcgtccgaatggagtttaggcctctccagtaccttgatttcacgaaattatatccatggaacattggtcccatgtattctttctgggcgtccccagtcgtggtgctgtgttccaaacatctgtccgtcctgtgtgtattctgcctgcgtttcagattcagattttttttttattttggacccaatcaaccctgcactgccttgtcgaggaccgtggtccgtggatggcaatggttcttacttcttactggttatattatatatgctgcaagattgct

SEQ ID NO: 12214 - protein, 254 aa, Zea mays subsp. mays
  peptide (1)..(254): Ceres Seq. ID no. 12390133
  misc_feature (136)..(253): Pfam Name: Equine herpesvirus glycoprotein gp2 Pfam Description: Equine herpesvirus glycoprotein gp2
FLLPSPPLACSVALRLLPSPPPALRPLFVPPHPPRTFPDEEPGRLSAGRQDAVQEPGPVGAPRQPALVRRVGDLREPAGREGGQGAAAGVPGRGRQLLRQRRGVRQRPRRGDHGPGHPGPGLAPLRRRHLHQALLGRPGPQRQGASPASTSSRASAPRSAASTWTTSTSSTATAPTPPRPSRRRCAPSTGSSTRAGPSTGAPPSGPRSRSPRPGQSPTASTSSDPSSSSRSTTFSPDTRLSLSSCHFTAPMASD

SEQ ID NO: 12215 - protein, 216 aa, Zea mays subsp. mays
  peptide (1)..(216): Ceres Seq. ID no. 12390134
  misc_feature (1)..(216): Homolog of NCBI NO: 2832783 NR Description: potassium channel beta subunit [Egeria densa]
  misc_feature (1)..(216): Homolog of NCBI NO: 15219795 NR Description: putative K+ channel, beta subunit; protein id: supported by cDNA: 23300., supported by cDNA: gi_1063414, by cDNA: gi_15292774, supported by cDNA: gi_20259254, supported
  misc_feature (1)..(216): Homolog of NCBI NO: 7447934 NR Description: probable potassium channel beta chain KB1 - potato
  misc_feature (1)..(216): Homolog of NCBI NO: 1063415 NR Description: K+ channel protein
  misc_feature (1)..(216): Homolog of NCBI NO: 7447935 NR Description: probable potassium channel beta chain - rice
  misc_feature (1)..(210): Homolog of NCBI NO: 23394348 NR Description: K+ channel protein [Phytophthora infestans]
  misc_feature (1)..(205): Homolog of NCBI NO: 22987410 NR Description: hypothetical protein [Burkholderia fungorum]
  misc_feature (1)..(216): Homolog of NCBI NO: 5019764 NR Description: potassium channel subunit Kv beta 1.1 cuniculus] >gi|15928440|gb|AAH14701.1| potassium voltage gated
  misc_feature (1)..(216): Homolog of NCBI NO: 8393643 NR Description: potassium voltage gated channel, shaker related beta member 1 [Rattus norvegicus] >gi|27436964|ref|NP_751891.1|
  misc_feature (1)..(216): Homolog of NCBI NO: 1695763 NR Description: voltage gated potassium channels, beta subunit
MDYVDVVYCHRPDASTPVEETVRAINWVIDQGWAFYWGTSEWSAQQITEAWAVANRLDLVGPIVEQPEYNLFSRHKVESEFLPLYSTYGIGLTTWSPLASGVLTGKYTKGNIPADSRFALDNYKNLANRSLVDDTLRKVNGLKPIAAELGVSLAQLSIAWCASNPNVSSVITGATKESQIVENMKALDVIPLLTPEVVDRIEAVVQSKPKRTESYR

SEQ ID NO: 12216 - protein, 189 aa, Zea mays subsp. mays
  peptide (1)..(189): Ceres Seq. ID no. 12390135
  misc_feature (1)..(91): Homolog of NCBI NO: 22987410 NR Description: hypothetical protein [Burkholderia fungorum]
  misc_feature (1)..(94): Homolog of NCBI NO: 5019764 NR Description: potassium channel subunit Kv beta 1.1 cuniculus] >gi|15928440|gb|AAH14701.1| potassium voltage gated
  misc_feature (1)..(94): Homolog of NCBI NO: 8393643 NR Description: potassium voltage gated channel, shaker related beta member 1 [Rattus norvegicus] >gi|27436964|ref|NP_751891.1|
  misc_feature (1)..(94): Homolog of NCBI NO: 18202525 NR Description: Voltage-gated potassium channel beta-1 subunit
  misc_feature (1)..(94): Homolog of NCBI NO: 27436962 NR Description: potassium voltage-gated channel, shaker-related
  misc_feature (1)..(94): Homolog of NCBI NO: 2832783 NR Description: potassium channel beta subunit [Egeria densa]
  misc_feature (1)..(94): Homolog of NCBI NO: 15219795 NR Description: putative K+ channel, beta subunit; protein id: supported by cDNA: 23300., supported by cDNA: gi_1063414, by cDNA: gi_15292774, supported by cDNA: gi_20259254, supported
  misc_feature (1)..(94): Homolog of NCBI NO: 7447934 NR Description: probable potassium channel beta chain KB1 - potato
  misc_feature (1)..(94): Homolog of NCBI NO: 1063415 NR Description: K+ channel protein
  misc_feature (1)..(94): Homolog of NCBI NO: 23394348 NR Description: K+ channel protein [Phytophthora infestans]
MQYKNLGRSGLRVSQLSYGAWVTFGNQLDVKEAKALLQACRDAGVNFFDNAEVYANGRAEEIMGQAIRDLGWRRSDVVISTKLFWGGQGPNDKGPLPQARRRGPPRLAPPPRHGLRRRRLLPPPRRLHARRGDGARHQLGHRPGLGLLLGHLRVVRAADHRGLGSRQPPRPRRTHRRAAGVQPFLQTQG

SEQ ID NO: 12217 - DNA, 1244 bp, Zea mays subsp. mays
  misc_feature (1)..(1244): Ceres Seq. ID no. 12376380
  misc_feature: MA Experiment ID: 108504 Result: Down-regulated in Transcription
  misc_feature: MA Experiment 108504 PARAMETER Experiment Name: Zm_Drought_P Parameter: Age (day) Value: 8
  misc_feature: MA Experiment 108504 PARAMETER Experiment Name: Zm_Drought_P Parameter: Organism Value: Zea mays
  misc_feature: MA Experiment 108504 PARAMETER Experiment Name: Zm_Drought_P Parameter: Plant Line Value: 35A19
  misc_feature: MA Experiment 108504 PARAMETER Experiment Name: Zm_Drought_P Parameter: Timepoint (hr) Value: 12
  misc_feature: MA Experiment 108504 PARAMETER Experiment Name: Zm_Drought_P Parameter: Tissue Value: Aerial
  misc_feature: MA Experiment 108504 PARAMETER Experiment Name: Zm_Drought_P Parameter: Treatment Value: Drought vs. No Drought
  misc_feature: MA Experiment ID: 108540 Result: Down-regulated in Transcription
  misc_feature: MA Experiment 108540 PARAMETER Experiment Name: Zm_20percent_PEG_P Parameter: Age (day) Value: 8
  misc_feature: MA Experiment 108540 PARAMETER Experiment Name: Zm_20percent_PEG_P Parameter: Organism Value: Zea mays
  misc_feature: MA Experiment 108540 PARAMETER Experiment Name: Zm_20percent_PEG_P Parameter: Plant Line Value: 35A19
  misc_feature: MA Experiment 108540 PARAMETER Experiment Name: Zm_20percent_PEG_P Parameter: Timepoint (hr) Value: 6
  misc_feature: MA Experiment 108540 PARAMETER Experiment Name: Zm_20percent_PEG_P Parameter: Tissue Value: Aerial
  misc_feature: MA Experiment 108540 PARAMETER Experiment Name: Zm_20percent_PEG_P Parameter: Treatment Value: 20percent PEG vs. No Treatment
  misc_feature: MA Experiment ID: 108543 Result: Up-regulated in Transcription
  misc_feature: MA Experiment ID: 108544 Result: Down-regulated in Transcription
  misc_feature: MA Experiment ID: 108556 Result: Down-regulated in Transcription
  misc_feature: MA Experiment 108556 PARAMETER Experiment Name: Zm_Drought_P Parameter: Age (day) Value: 9
  misc_feature: MA Experiment 108556 PARAMETER Experiment Name: Zm_Drought_P Parameter: Organism Value: Zea mays
  misc_feature: MA Experiment 108556 PARAMETER Experiment Name: Zm_Drought_P Parameter: Plant Line Value: 35A19
  misc_feature: MA Experiment 108556 PARAMETER Experiment Name: Zm_Drought_P Parameter: Timepoint (hr) Value: 24
  misc_feature: MA Experiment 108556 PARAMETER Experiment Name: Zm_Drought_P Parameter: Tissue Value: Aerial
  misc_feature: MA Experiment 108556 PARAMETER Experiment Name: Zm_Drought_P Parameter: Treatment Value: Drought vs. No Drought
  misc_feature: MA Experiment ID: 108689 Result: Down-regulated in Transcription
  misc_feature: MA Experiment 108689 PARAMETER Experiment Name: Zm_Drought_Roots_P Parameter: Age (day) Value: 9
  misc_feature: MA Experiment 108689 PARAMETER Experiment Name: Zm_Drought_Roots_P Parameter: Organism Value: Zea mays
  misc_feature: MA Experiment 108689 PARAMETER Experiment Name: Zm_Drought_Roots_P Parameter: Plant Line Value: 35A19
  misc_feature: MA Experiment 108689 PARAMETER Experiment Name: Zm_Drought_Roots_P Parameter: Timepoint (hr) Value: 24
  misc_feature: MA Experiment 108689 PARAMETER Experiment Name: Zm_Drought_Roots_P Parameter: Tissue Value: Roots
  misc_feature: MA Experiment 108689 PARAMETER Experiment Name: Zm_Drought_Roots_P Parameter: Treatment Value: Drought vs. No Drought
  misc_feature: MA Experiment ID: 20000477 Result: Down-regulated in Transcription
  misc_feature: MA Experiment 20000477 PARAMETER Experiment Name: Zm_5mM_SA_P Parameter: Age (day) Value: 10
  misc_feature: MA Experiment 20000477 PARAMETER Experiment Name: Zm_5mM_SA_P Parameter: Organism Value: Zea mays
  misc_feature: MA Experiment 20000477 PARAMETER Experiment Name: Zm_5mM_SA_P Parameter: Plant Line Value: 35A19
  misc_feature: MA Experiment 20000477 PARAMETER Experiment Name: Zm_5mM_SA_P Parameter: Timepoint (hr) Value: 48
  misc_feature: MA Experiment 20000477 PARAMETER Experiment Name: Zm_5mM_SA_P Parameter: Tissue Value: Aerial
  misc_feature: MA Experiment 20000477 PARAMETER Experiment Name: Zm_5mM_SA_P Parameter: Treatment Value: 5mM SA vs. No Treatment
  misc_feature: MA Experiment ID: 20000478 Result: Down-regulated in Transcription
  misc_feature: MA Experiment 20000478 PARAMETER Experiment Name: Zm_5mM_SA_P Parameter: Age (day) Value: 11
  misc_feature: MA Experiment 20000478 PARAMETER Experiment Name: Zm_5mM_SA_P Parameter: Organism Value: Zea mays
  misc_feature: MA Experiment 20000478 PARAMETER Experiment Name: Zm_5mM_SA_P Parameter: Plant Line Value: 35A19
  misc_feature: MA Experiment 20000478 PARAMETER Experiment Name: Zm_5mM_SA_P Parameter: Timepoint (hr) Value: 72
  misc_feature: MA Experiment 20000478 PARAMETER Experiment Name: Zm_5mM_SA_P Parameter: Tissue Value: Aerial
  misc_feature: MA Experiment 20000478 PARAMETER Experiment Name: Zm_5mM_SA_P Parameter: Treatment Value: 5mM SA vs. No Treatment
  misc_feature: MA Experiment ID: 20000480 Result: Down-regulated in Transcription
  misc_feature: MA Experiment 20000480 PARAMETER Experiment Name: Zm_Drought_P Parameter: Age (day) Value: 11
  misc_feature: MA Experiment 20000480 PARAMETER Experiment Name: Zm_Drought_P Parameter: Organism Value: Zea mays
  misc_feature: MA Experiment 20000480 PARAMETER Experiment Name: Zm_Drought_P Parameter: Plant Line Value: 35A19
  misc_feature: MA Experiment 20000480 PARAMETER Experiment Name: Zm_Drought_P Parameter: Timepoint (hr) Value: 72
  misc_feature: MA Experiment 20000480 PARAMETER Experiment Name: Zm_Drought_P Parameter: Tissue Value: Aerial
  misc_feature: MA Experiment 20000480 PARAMETER Experiment Name: Zm_Drought_P Parameter: Treatment Value: Drought vs. No Drought
gccttctttcgccgttcatatactccgccgcttctactagtggtatcgtaggttaaggccaccccaagcaggagtctgcttccgttccattgcatcccagtcccagccaaagcaggatgccgcacgccaagacggactcggaggtgacgagcctggcgccgtcgtcgcctccgcggtcgcctccacggacccgcggcgccgtctactacgtgcagagcccgtcccgcgactcgcacgacggcgagacgatcaaggcggccacgtctgtgcactccacccccgcgctgagccccatggcgtcgccgcggccactcgcactcccactcccactcgtccatgggcagggactcctcctccagccgattctcgggccacggccacaacaagcgcaaggccgacaagggcggcagcaacaagggcgcgccgggcggcaaggggtggcaggagatcggcgtcatcgaggaggaagggctcatggacgaggaggaccacacgcggatcgtgccccgcaagtgctactgcttcctcgccttcctgctcggcttcgtcgcgctcttctccttcttcgcgctcgtgctctggggcgccagcaggtcccagaagccgcgcatcgtcatgggcaccatccgcttcgacaacttcatcatccaggccggcaccgacgcgtcgctcgtgcccaccgacatggccaccaccaactccaccgtcagattcacctaccgcaacaggggcaccttcttcgggatccacgtcaccgccgacccgttccagctctcctacagccagctcacgctcgcgtcaggagacctccacaacttctaccagcctcgcagcagcagccgcaccgtcagcgtcgccgtggtcggcaacaaggtgccgctgtacggcggcggacccacgctgacggcggcgccggcggccgggggcaaggggcagcagcaggccagcgccaaggtggcatcggtgcccatggtgctgaggaccacgctgcactcgcgggcctacgtgctgggcgcgctggtcaagcccaagttcacgctcgccgtcgagtgcagggtgctcatgaacccaaacaagcagaacaagcccatctcgctcgggaacgcctgccactactcatgatatatttagcctctcatactagctgctcaacatcaccatgcccatgcatccatctcctacctacctctcaattgtactgtaatggagtatttattgatttatttatgctttgcttcgtcttc

SEQ ID NO: 12218 - protein, 376 aa, Zea mays subsp. mays
  peptide (1)..(376): Ceres Seq. ID no. 12376381
  misc_feature (1)..(64): Homolog of NCBI NO: 5777621 NR Description: CAA30379.1 protein [Oryza sativa]
  misc_feature (3)..(64): Homolog of NCBI NO: 38345517 NR Description: OSJNBa0039K24.20 [Oryza sativa (japonica
  misc_feature (3)..(63): Homolog of NCBI NO: 18401556 NR Description: expressed protein; protein id: At1g45688.1, by cDNA: 8255., supported by cDNA: gi_20466719 [Arabidopsis
  misc_feature (10)..(63): Homolog of NCBI NO: 34904260 NR Description: P0452F10.18 [Oryza sativa (japonica
  misc_feature (1)..(59): Homolog of NCBI NO: 34898370 NR Description: ESTD24835(R2634) corresponds to a region of the gene.~Similar to Arabidopsis thaliana chromosome II BAC T06D20
  misc_feature (3)..(112): Homolog of NCBI NO: 15239097 NR Description: putative protein; protein id: At5g42860.1 thaliana] >gi|9758574|dbj|BAB09187.1|
  misc_feature (3)..(112): Homolog of NCBI NO: 28416677 NR Description: At5g42860 [Arabidopsis thaliana]
MPHAKTDSEVTSLAPSSPPRSPPRTRGAVYYVQSPSRDSHDGETIKAATSVHSTPALSPMASPRPLALPLPLVHGQGLLLQPILGPRPQQAQGRQGRQQQGRAGRQGVAGDRRHRGGRAHGRGGPHADRAPQVLLLPRLPARLRRALLLLRARALGRQQVPEAAHRHGHHPLRQLHHPGRHRRVARAHRHGHHQLHRQIHLPQQGHLLRDPRHRRPVPALLQPAHARVRRPPQLLPASQQQPHRQRRRGRQQGAAVRRRTHADGGAGGRGQGAAAGQRQGGIGAHGAEDHAALAGLRAGRAGQAQVHARRRVQGAHEPKQAEQAHLARERLPLLMIYLASHTSCSTSPCPCIHLLPTSQLYCNGVFIDLFMLCFVF

SEQ ID NO: 12219 - protein, 317 aa, Zea mays subsp. mays
  peptide (1)..(317): Ceres Seq. ID no. 12376382
  misc_feature (1)..(53): Homolog of NCBI NO: 15239097 NR Description: putative protein; protein id: At5g42860.1 thaliana] >gi|9758574|dbj|BAB09187.1|
  misc_feature (1)..(53): Homolog of NCBI NO: 28416677 NR Description: At5g42860 [Arabidopsis thaliana]
MASPRPLALPLPLVHGQGLLLQPILGPRPQQAQGRQGRQQQGRAGRQGVAGDRRHRGGRAHGRGGPHADRAPQVLLLPRLPARLRRALLLLRARALGRQQVPEAAHRHGHHPLRQLHHPGRHRRVARAHRHGHHQLHRQIHLPQQGHLLRDPRHRRPVPALLQPAHARVRRPPQLLPASQQQPHRQRRRGRQQGAAVRRRTHADGGAGGRGQGAAAGQRQGGIGAHGAEDHAALAGLRAGRAGQAQVHARRRVQGAHEPKQAEQAHLARERLPLLMIYLASHTSCSTSPCPCIHLLPTSQLYCNGVFIDLFMLCFVF

SEQ ID NO: 12220 - protein, 261 aa, Zea mays subsp. mays
  peptide (1)..(261): Ceres Seq. ID no. 12376383
  misc_feature (1)..(260): Homolog of NCBI NO: 5777621 NR Description: CAA30379.1 protein [Oryza sativa]
  misc_feature (1)..(260): Homolog of NCBI NO: 38345517 NR Description: OSJNBa0039K24.20 [Oryza sativa (japonica
  misc_feature (1)..(258): Homolog of NCBI NO: 18401556 NR Description: expressed protein; protein id: At1g45688.1, by cDNA: 8255., supported by cDNA: gi_20466719 [Arabidopsis
  misc_feature (1)..(258): Homolog of NCBI NO: 32488073 NR Description: OSJNBa0084A10.1 [Oryza sativa (japonica
  misc_feature (1)..(261): Homolog of NCBI NO: 34904260 NR Description: P0452F10.18 [Oryza sativa (japonica
  misc_feature (5)..(258): Homolog of NCBI NO: 15239097 NR Description: putative protein; protein id: At5g42860.1 thaliana] >gi|9758574|dbj|BAB09187.1|
  misc_feature (5)..(258): Homolog of NCBI NO: 28416677 NR Description: At5g42860 [Arabidopsis thaliana]
  misc_feature (1)..(99): Homolog of NCBI NO: 34898370 NR Description: ESTD24835(R2634) corresponds to a region of the gene.~Similar to Arabidopsis thaliana chromosome II BAC T06D20
  misc_feature (158)..(258): Homolog of NCBI NO: 34898370 NR Description: ESTD24835(R2634) corresponds to a region of the gene.~Similar to Arabidopsis thaliana chromosome II BAC T06D20
  misc_feature (1)..(258): Homolog of NCBI NO: 15227481 NR Description: unknown protein; protein id: At2g41990.1
MGRDSSSSRFSGHGHNKRKADKGGSNKGAPGGKGWQEIGVIEEEGLMDEEDHTRIVPRKCYCFLAFLLGFVALFSFFALVLWGASRSQKPRIVMGTIRFDNFIIQAGTDASLVPTDMATTNSTVRFTYRNRGTFFGIHVTADPFQLSYSQLTLASGDLHNFYQPRSSSRTVSVAVVGNKVPLYGGGPTLTAAPAAGGKGQQQASAKVASVPMVLRTTLHSRAYVLGALVKPKFTLAVECRVLMNPNKQNKPISLGNACHYS

SEQ ID NO: 12221 - DNA, 1389 bp, Zea mays subsp. mays; identical to SEQ ID NO: 3569
  misc_feature (1)..(1389): Ceres Seq. ID no. 13498794
  misc_feature: MA Experiment ID: 108535 Result: Up-regulated in Transcription
  misc_feature: MA Experiment 108535 PARAMETER Experiment Name: Zm_Meristem_P Parameter: Age (day) Value: 8
  misc_feature: MA Experiment 108535 PARAMETER Experiment Name: Zm_Meristem_P Parameter: Organism Value: Zea mays
  misc_feature: MA Experiment 108535 PARAMETER Experiment Name: Zm_Meristem_P Parameter: Plant Line Value: 35A19
  misc_feature: MA Experiment 108535 PARAMETER Experiment Name: Zm_Meristem_P Parameter: Tissue Value: Root Meristem vs. Above Root Meristem
  misc_feature: MA Experiment ID: 20000108 Result: Up-regulated in Transcription
  misc_feature: MA Experiment 20000108 PARAMETER Experiment Name: Zm_Root-Tips_P Parameter: Age (day) Value: 12
  misc_feature: MA Experiment 20000108 PARAMETER Experiment Name: Zm_Root-Tips_P Parameter: Organism Value: Zea mays
  misc_feature: MA Experiment 20000108 PARAMETER Experiment Name: Zm_Root-Tips_P Parameter: Tissue Value: Root tips vs. Root mid region    35
  misc_feature: MA Experiment 20000108 PARAMETER Experiment Name: Zm_Root-Tips_P Parameter: Tissue Value: Root tips vs. Root mid region   Sequence Listing-Misc Features (4)
  misc_feature: MA Experiment ID: 20000487 Result: Up-regulated in Transcription
  misc_feature: MA Experiment 20000487 PARAMETER Experiment Name: Zm_50mM_NH4NO3_L_to_H_P Parameter: Organism Value: Zea mays
  misc_feature: MA Experiment 20000487 PARAMETER Experiment Name: Zm_50mM_NH4NO3_L_to_H_P Parameter: Timepoint (hr) Value: 4
  misc_feature: MA Experiment 20000487 PARAMETER Experiment Name: Zm_50mM_NH4NO3_L_to_H_P Parameter: Tissue Value: Leaves
  misc_feature: MA Experiment 20000487 PARAMETER Experiment Name: Zm_50mM_NH4NO3_L_to_H_P Parameter: Treatment Value: 50mM NH4NO3 vs. 100mM Mannitol
  misc_feature: MA Experiment ID: 20000488 Result: Up-regulated in Transcription
  misc_feature: MA Experiment 20000488 PARAMETER Experiment Name: Zm_50mM_NH4NO3_L_to_H_P Parameter: Organism Value: Zea mays
  misc_feature: MA Experiment 20000488 PARAMETER Experiment Name: Zm_50mM_NH4NO3_L_to_H_P Parameter: Timepoint (hr) Value: 8
  misc_feature: MA Experiment 20000488 PARAMETER Experiment Name: Zm_50mM_NH4NO3_L_to_H_P Parameter: Tissue Value: Leaves
  misc_feature: MA Experiment 20000488 PARAMETER Experiment Name: Zm_50mM_NH4NO3_L_to_H_P Parameter: Treatment Value: 50mM NH4NO3 vs. 100mM Mannitol
  misc_feature: MA Experiment ID: 20000492 Result: Up-regulated in Transcription
  misc_feature: MA Experiment 20000492 PARAMETER Experiment Name: Zm_Hybrid_Seed_Dev_P Parameter: DAP Value: 12
  misc_feature: MA Experiment 20000492 PARAMETER Experiment Name: Zm_Hybrid_Seed_Dev_P Parameter: Organism Value: Zea mays
  misc_feature: MA Experiment 20000492 PARAMETER Experiment Name: Zm_Hybrid_Seed_Dev_P Parameter: Plant Line Value: 35A19
  misc_feature: MA Experiment 20000492 PARAMETER Experiment Name: Zm_Hybrid_Seed_Dev_P Parameter: Tissue Value: Fert Kernel vs. Unfert Floret

SEQ ID NO: 12222 - protein, 254 aa, Zea mays subsp. mays; identical to SEQ ID NO: 3570
  peptide (1)..(254): Ceres Seq. ID no. 13498795
  misc_feature (14)..(210): Pfam Name: Ribosomal protein L3 Pfam Description: Ribosomal protein L3
  misc_feature (1)..(254): Homolog of NCBI NO: 34902796 NR Description: unnamed protein product [Oryza sativa (japonica group)] >gi|7106521|dbj|BAA92206.1| unnamed protein product
  misc_feature (1)..(254): Homolog of NCBI NO: 18401521 NR Description: ribosomal protein L3p family [Arabidopsis
  misc_feature (1)..(236): Homolog of NCBI NO: 23108389 NR Description: hypothetical protein [Novosphingobium
  misc_feature (1)..(233): Homolog of NCBI NO: 16125497 NR Description: ribosomal protein L3 [Caulobacter crescentus CB15]
  misc_feature (7)..(225): Homolog of NCBI NO: 23014088 NR Description: hypothetical protein [Magnetospirillum
  misc_feature (122)..(254): Homolog of NCBI NO: 21450877 NR Description: putative ribosomal protein L3 [Arabidopsis
  misc_feature (7)..(223): Homolog of NCBI NO: 22956505 NR Description: hypothetical protein [Rhodobacter sphaeroides]
  misc_feature (7)..(228): Homolog of NCBI NO: 22965161 NR Description: hypothetical protein [Rhodopseudomonas palustris]
  misc_feature (7)..(235): Homolog of NCBI NO: 27380511 NR Description: 50S ribosomal protein L3 [Bradyrhizobium >gi|27353675|dbj|BAC50665.1| 50S ribosomal protein L3
  misc_feature (2)..(223): Homolog of NCBI NO: 17987040 NR Description: LSU ribosomal protein L3P [Brucella melitensis]

SEQ ID NO: 12223 - protein, 238 aa, Zea mays subsp. mays; identical to SEQ ID NO: 3571
  peptide (1)..(238): Ceres Seq. ID no. 13498796
  misc_feature (1)..(194): Pfam Name: Ribosomal protein L3 Pfam Description: Ribosomal protein L3
  misc_feature (1)..(238): Homolog of NCBI NO: 34902796 NR Description: unnamed protein product [Oryza sativa (japonica group)] >gi|7106521|dbj|BAA92206.1| unnamed protein product
  misc_feature (1)..(238): Homolog of NCBI NO: 18401521 NR Description: ribosomal protein L3p family [Arabidopsis
  misc_feature (1)..(220): Homolog of NCBI NO: 23108389 NR Description: hypothetical protein [Novosphingobium
  misc_feature (1)..(217): Homolog of NCBI NO: 16125497 NR Description: ribosomal protein L3 [Caulobacter crescentus CB15]
  misc_feature (1)..(209): Homolog of NCBI NO: 23014088 NR Description: hypothetical protein [Magnetospirillum
  misc_feature (106)..(238): Homolog of NCBI NO: 21450877 NR Description: putative ribosomal protein L3 [Arabidopsis
  misc_feature (1)..(207): Homolog of NCBI NO: 22956505 NR Description: hypothetical protein [Rhodobacter sphaeroides]
  misc_feature (1)..(212): Homolog of NCBI NO: 22965161 NR Description: hypothetical protein [Rhodopseudomonas palustris]
  misc_feature (1)..(219): Homolog of NCBI NO: 27380511 NR Description: 50S ribosomal protein L3 [Bradyrhizobium >gi|27353675|dbj|BAC50665.1| 50S ribosomal protein L3
  misc_feature (1)..(207): Homolog of NCBI NO: 17987040 NR Description: LSU ribosomal protein L3P [Brucella melitensis]

SEQ ID NO: 12224 - protein, 235 aa, Zea mays subsp. mays; identical to SEQ ID NO: 3572
  peptide (1)..(235): Ceres Seq. ID no. 13498797
  misc_feature (1)..(191): Pfam Name: Ribosomal protein L3 Pfam Description: Ribosomal protein L3
  misc_feature (1)..(235): Homolog of NCBI NO: 34902796 NR Description: unnamed protein product [Oryza sativa (japonica group)] >gi|7106521|dbj|BAA92206.1| unnamed protein product
  misc_feature (1)..(235): Homolog of NCBI NO: 18401521 NR Description: ribosomal protein L3p family [Arabidopsis
  misc_feature (1)..(217): Homolog of NCBI NO: 23108389 NR Description: hypothetical protein [Novosphingobium
  misc_feature (1)..(214): Homolog of NCBI NO: 16125497 NR Description: ribosomal protein L3 [Caulobacter crescentus CB15]
  misc_feature (1)..(206): Homolog of NCBI NO: 23014088 NR Description: hypothetical protein [Magnetospirillum
  misc_feature (103)..(235): Homolog of NCBI NO: 21450877 NR Description: putative ribosomal protein L3 [Arabidopsis
  misc_feature (1)..(204): Homolog of NCBI NO: 22956505 NR Description: hypothetical protein [Rhodobacter sphaeroides]
  misc_feature (1)..(209): Homolog of NCBI NO: 22965161 NR Description: hypothetical protein [Rhodopseudomonas palustris]
  misc_feature (1)..(216): Homolog of NCBI NO: 27380511 NR Description: 50S ribosomal protein L3 [Bradyrhizobium >gi|27353675|dbj|BAC50665.1| 50S ribosomal protein L3
  misc_feature (1)..(204): Homolog of NCBI NO: 17987040 NR Description: LSU ribosomal protein L3P [Brucella melitensis]

SEQ ID NO: 12225 - DNA, 1283 bp, Zea mays subsp. mays
  misc_feature (1)..(1283): Ceres Seq. ID no. 12348789
  misc_feature: MA Experiment ID: 108528 Result: Down-regulated in Transcription
  misc_feature: MA Experiment 108528 PARAMETER Experiment Name: Zm_Imbibed_Seeds_P Parameter: Age (day) Value: 5 vs. 2
  misc_feature: MA Experiment 108528 PARAMETER Experiment Name: Zm_Imbibed_Seeds_P Parameter: Organism Value: Zea mays
  misc_feature: MA Experiment 108528 PARAMETER Experiment Name: Zm_Imbibed_Seeds_P Parameter: Plant Line Value: 35A19
  misc_feature: MA Experiment 108528 PARAMETER Experiment Name: Zm_Imbibed_Seeds_P Parameter: Tissue Value: Aerial vs. Embryo
  misc_feature: MA Experiment ID: 108529 Result: Up-regulated in Transcription
  misc_feature: MA Experiment 108529 PARAMETER Experiment Name: Zm_Imbibed_Seeds_P Parameter: Age (day) Value: 5 vs. 2
  misc_feature: MA Experiment 108529 PARAMETER Experiment Name: Zm_Imbibed_Seeds_P Parameter: Organism Value: Zea mays
  misc_feature: MA Experiment 108529 PARAMETER Experiment Name: Zm_Imbibed_Seeds_P Parameter: Plant Line Value: 35A19
  misc_feature: MA Experiment 108529 PARAMETER Experiment Name: Zm_Imbibed_Seeds_P Parameter: Tissue Value: Roots vs. Embryo
  misc_feature: MA Experiment ID: 108530 Result: Down-regulated in Transcription
  misc_feature: MA Experiment 108530 PARAMETER Experiment Name: Zm_Imbibed_Seeds_P Parameter: Age (day) Value: 6 vs. 2
  misc_feature: MA Experiment 108530 PARAMETER Experiment Name: Zm_Imbibed_Seeds_P Parameter: Organism Value: Zea mays
  misc_feature: MA Experiment 108530 PARAMETER Experiment Name: Zm_Imbibed_Seeds_P Parameter: Plant Line Value: 35A19
  misc_feature: MA Experiment 108530 PARAMETER Experiment Name: Zm_Imbibed_Seeds_P Parameter: Tissue Value: Aerial vs. Embryo
  misc_feature: MA Experiment ID: 108543 Result: Up-regulated in Transcription
  misc_feature: MA Experiment ID: 108545 Result: Down-regulated in Transcription
  misc_feature: MA Experiment 108545 PARAMETER Experiment Name: Zm_Imbibed_Seeds_P Parameter: Age (day) Value: 3 vs. 2
  misc_feature: MA Experiment 108545 PARAMETER Experiment Name: Zm_Imbibed_Seeds_P Parameter: Organism Value: Zea mays
  misc_feature: MA Experiment 108545 PARAMETER Experiment Name: Zm_Imbibed_Seeds_P Parameter: Plant Line Value: 35A19
  misc_feature: MA Experiment 108545 PARAMETER Experiment Name: Zm_Imbibed_Seeds_P Parameter: Tissue Value: Aerial vs. Embryo
  misc_feature: MA Experiment ID: 108546 Result: Up-regulated in Transcription
  misc_feature: MA Experiment 108546 PARAMETER Experiment Name: Zm_Imbibed_Seeds_P Parameter: Age (day) Value: 3 vs. 2
  misc_feature: MA Experiment 108546 PARAMETER Experiment Name: Zm_Imbibed_Seeds_P Parameter: Organism Value: Zea mays
  misc_feature: MA Experiment 108546 PARAMETER Experiment Name: Zm_Imbibed_Seeds_P Parameter: Plant Line Value: 35A19
  misc_feature: MA Experiment 108546 PARAMETER Experiment Name: Zm_Imbibed_Seeds_P Parameter: Tissue Value: Roots vs. Embryo
  misc_feature: MA Experiment ID: 108547 Result: Down-regulated in Transcription
  misc_feature: MA Experiment 108547 PARAMETER Experiment Name: Zm_Imbibed_Seeds_P Parameter: Age (day) Value: 4 vs. 2
  misc_feature: MA Experiment 108547 PARAMETER Experiment Name: Zm_Imbibed_Seeds_P Parameter: Organism Value: Zea mays
  misc_feature: MA Experiment 108547 PARAMETER Experiment Name: Zm_Imbibed_Seeds_P Parameter: Plant Line Value: 35A19
  misc_feature: MA Experiment 108547 PARAMETER Experiment Name: Zm_Imbibed_Seeds_P Parameter: Tissue Value: Aerial vs. Embryo
  misc_feature: MA Experiment ID: 20000535 Result: Down-regulated in Transcription
  misc_feature: MA Experiment 20000535 PARAMETER Experiment Name: Zm_Hybrid_Seed_Dev_P Parameter: DAP Value: 30 vs. 12
  misc_feature: MA Experiment 20000535 PARAMETER Experiment Name: Zm_Hybrid_Seed_Dev_P Parameter: Organism Value: Zea mays
  misc_feature: MA Experiment 20000535 PARAMETER Experiment Name: Zm_Hybrid_Seed_Dev_P Parameter: Plant Line Value: 35A19
  misc_feature: MA Experiment 20000535 PARAMETER Experiment Name: Zm_Hybrid_Seed_Dev_P Parameter: Tissue Value: Embryo vs. Unfert Floret
  misc_feature: MA Experiment ID: 20000630 Result: Up-regulated in Transcription
  misc_feature: MA Experiment 20000630 PARAMETER Experiment Name: Zm_Herbicide-Treatments_P Parameter: Timepoint (hr) Value: 4
  misc_feature: MA Experiment 20000630 PARAMETER Experiment Name: Zm_Herbicide-Treatments_P Parameter: Tissue Value: Aerial
  misc_feature: MA Experiment 20000630 PARAMETER Experiment Name: Zm_Herbicide-Treatments_P Parameter: Treatment Value: Roundup vs. No Treatment
  misc_feature: MA Experiment ID: 20001614 Result: Up-regulated in Transcription
  misc_feature: MA Experiment 20001614 PARAMETER Experiment Name: Zm_50ppm_KNO3_L-to-H_P Parameter: Age (day) Value: 21
  misc_feature: MA Experiment 20001614 PARAMETER Experiment Name: Zm_50ppm_KNO3_L-to-H_P Parameter: Organism Value: Zea mays
  misc_feature: MA Experiment 20001614 PARAMETER Experiment Name: Zm_50ppm_KNO3_L-to-H_P Parameter: Plant Line Value: 35A19
  misc_feature: MA Experiment 20001614 PARAMETER Experiment Name: Zm_50ppm_KNO3_L-to-H_P Parameter: Timepoint (hr) Value: 48
  misc_feature: MA Experiment 20001614 PARAMETER Experiment Name: Zm_50ppm_KNO3_L-to-H_P Parameter: Tissue Value: Roots
  misc_feature: MA Experiment 20001614 PARAMETER Experiment Name: Zm_50ppm_KNO3_L-to-H_P Parameter: Treatment Value: 50ppm KNO3 vs. 50ppm KCl
atcgtacgtcgtgtcctgcagtggctcacattcgacgacacacagtagagggtagctagcagtggtgctcctggcctgtgacgatggtttcctcgtcgtcgtctccttccgccaccgccgccgccgccgccgccgtggtcctggcggtggccctgatgacgacgacgtgcttccatggcgcgacggcgcagctgtgcgaggactactatgacagcacctgcccggacgcctacgacatcgtgaaccaggtgctcgtcgacgcagtgcagtcggacacccgcatcttcgccagcctcatccgcctgcacttccacgactgcttcgtccagggctgcgacgcctcgcttctgctggacagcgtcccagggatgccgtcggagaagacgtcggcgcccaacaacggctcagcgcgcgggttcggggtggtggacgccgccaaggctgcgctggagagcgcctgccctggtgttgtctcctgcgctgacatcctcgccatcgccgcagagatctcagtcgagctgtcgggaggccccagctggggtgtgcttctgggcaggctggacagcaagacctccgacttcaacggatccctggacctcccagagcccaccgacaacctcaccatacttcagcagaagttcagcaacctcagcctcaacgatgtcgacctggtcgccctttcaggggggcacacgttcggccgggtccaatgcaagttcatcacggaccggctctacaacttcagcgggacgaacatgcccgacccgacgctggacgcctcctaccgggccttcctgacgcagaggtgccccaggaacggcgaccccacagccctgaacgacctggacccgacgaccccggacaccttcgacaacaactactacaccaacatcgaggtgaaccgaggcatcctcaactccgaccaggagctcaagtcgtcgcccctagcgcagggcaccacggcgcccatcgtcgaccagttcgcggccagccaagacgacttcttcgcgagcttcgcgcagtccatgatcaacatggggaacatcaagccgctcacggacccgtccagaggagaagtccgcaccaactgcagaagggtcaactgatccaattaagtcgatcggtcgtaattaatgtgtgcagagaaaacgacatgttcatcattggctggtcgatgtcatttggctagctgctcatcagggtgtgaagtttctgtatacacatgcagcatgcatgtatgtttcatgttttccaatccaactcaataaaatttgccaaagatt

SEQ ID NO: 12226 - protein, 340 aa, Zea mays subsp. mays
  peptide (1)..(340): Ceres Seq. ID no. 12348790
  misc_feature (53)..(303): Pfam Name: Peroxidase Pfam Description: Peroxidase
  misc_feature (4)..(340): Homolog of NCBI NO: 37530466 NR Description: putative peroxidase [Oryza sativa (japonica >gi|19920085|gb|AAM08517.1| Putative peroxidase [Oryza sativa]
  misc_feature (13)..(340): Homolog of NCBI NO: 20330758 NR Description: Putative peroxidase [Oryza sativa (japonica
  misc_feature (14)..(340): Homolog of NCBI NO: 8546851 NR Description: peroxidase [Ipomoea batatas]
  misc_feature (19)..(340): Homolog of NCBI NO: 21593262 NR Description: peroxidase [Arabidopsis thaliana]
  misc_feature (19)..(340): Homolog of NCBI NO: 5002348 NR Description: peroxidase 5 precursor [Phaseolus vulgaris]
  misc_feature (19)..(340): Homolog of NCBI NO: 15240140 NR Description: peroxidase, putative; protein id: At5g06720.1, by cDNA: 37564., supported by cDNA: gi_15810294, supported by gi_20466024 [Arabidopsis thaliana]
  misc_feature (7)..(340): Homolog of NCBI NO: 15224496 NR Description: peroxidase; protein id: At2g38380.1, supported by gi_14334719, supported by cDNA: gi_16323435, supported by cDNA: [Arabidopsis thaliana] >gi|20455508|sp|P24102|PE22_ARATH
  misc_feature (33)..(340): Homolog of NCBI NO: 1279654 NR Description: peroxidase [Populus balsamifera subsp.
  misc_feature (7)..(340): Homolog of NCBI NO: 81653 NR Description: peroxidase (EC 1.11.1.7) E - Arabidopsis thaliana
  misc_feature (36)..(340): Homolog of NCBI NO: 11513747 NR Description: Chain A, Arabidopsis Thaliana Peroxidase A2
MVSSSSSPSATAAAAAAVVLAVALMTTTCFHGATAQLCEDYYDSTCPDAYDIVNQVLVDAVQSDTRIFASLIRLHFHDCFVQGCDASLLLDSVPGMPSEKTSAPNNGSARGFGVVDAAKAALESACPGVVSCADILAIAAEISVELSGGPSWGVLLGRLDSKTSDFNGSLDLPEPTDNLTILQQKFSNLSLNDVDLVALSGGHTFGRVQCKFITDRLYNFSGTNMPDPTLDASYRAFLTQRCPRNGDPTALNDLDPTTPDTFDNNYYTNIEVNRGILNSDQELKSSPLAQGTTAPIVDQFAASQDDFFASFAQSMINMGNIKPLTDPSRGEVRTNCRRVN

SEQ ID NO: 12227 - protein, 316 aa, Zea mays subsp. mays
  peptide (1)..(316): Ceres Seq. ID no. 12348791
  misc_feature (29)..(279): Pfam Name: Peroxidase Pfam Description: Peroxidase
  misc_feature (1)..(316): Homolog of NCBI NO: 37530466 NR Description: putative peroxidase [Oryza sativa (japonica >gi|19920085|gb|AAM08517.1| Putative peroxidase [Oryza sativa]
  misc_feature (1)..(316): Homolog of NCBI NO: 20330758 NR Description: Putative peroxidase [Oryza sativa (japonica
  misc_feature (1)..(316): Homolog of NCBI NO: 8546851 NR Description: peroxidase [Ipomoea batatas]
  misc_feature (1)..(316): Homolog of NCBI NO: 21593262 NR Description: peroxidase [Arabidopsis thaliana]
  misc_feature (1)..(316): Homolog of NCBI NO: 5002348 NR Description: peroxidase 5 precursor [Phaseolus vulgaris]
  misc_feature (1)..(316): Homolog of NCBI NO: 15240140 NR Description: peroxidase, putative; protein id: At5g06720.1, by cDNA: 37564., supported by cDNA: gi_15810294, supported by gi_20466024 [Arabidopsis thaliana]
  misc_feature (1)..(316): Homolog of NCBI NO: 15224496 NR Description: peroxidase; protein id: At2g38380.1, supported by gi_14334719, supported by cDNA: gi_16323435, supported by cDNA: [Arabidopsis thaliana] >gi|20455508|sp|P24102|PE22_ARATH
  misc_feature (9)..(316): Homolog of NCBI NO: 1279654 NR Description: peroxidase [Populus balsamifera subsp.
  misc_feature (1)..(316): Homolog of NCBI NO: 81653 NR Description: peroxidase (EC 1.11.1.7) E - Arabidopsis thaliana
  misc_feature (12)..(316): Homolog of NCBI NO: 11513747 NR Description: Chain A, Arabidopsis Thaliana Peroxidase A2
MTTTCFHGATAQLCEDYYDSTCPDAYDIVNQVLVDAVQSDTRIFASLIRLHFHDCFVQGCDASLLLDSVPGMPSEKTSAPNNGSARGFGVVDAAKAALESACPGVVSCADILAIAAEISVELSGGPSWGVLLGRLDSKTSDFNGSLDLPEPTDNLTILQQKFSNLSLNDVDLVALSGGHTFGRVQCKFITDRLYNFSGTNMPDPTLDASYRAFLTQRCPRNGDPTALNDLDPTTPDTFDNNYYTNIEVNRGILNSDQELKSSPLAQGTTAPIVDQFAASQDDFFASFAQSMINMGNIKPLTDPSRGEVRTNCRRVN

SEQ ID NO: 12228 - protein, 245 aa, Zea mays subsp. mays
  peptide (1)..(245): Ceres Seq. ID no. 12348792
  misc_feature (1)..(208): Pfam Name: Peroxidase Pfam Description: Peroxidase
  misc_feature (1)..(245): Homolog of NCBI NO: 37530466 NR Description: putative peroxidase [Oryza sativa (japonica >gi|19920085|gb|AAM08517.1| Putative peroxidase [Oryza sativa]
  misc_feature (1)..(245): Homolog of NCBI NO: 20330758 NR Description: Putative peroxidase [Oryza sativa (japonica
  misc_feature (1)..(245): Homolog of NCBI NO: 8546851 NR Description: peroxidase [Ipomoea batatas]
  misc_feature (1)..(245): Homolog of NCBI NO: 21593262 NR Description: peroxidase [Arabidopsis thaliana]
  misc_feature (1)..(245): Homolog of NCBI NO: 5002348 NR Description: peroxidase 5 precursor [Phaseolus vulgaris]
  misc_feature (1)..(245): Homolog of NCBI NO: 15240140 NR Description: peroxidase, putative; protein id: At5g06720.1, by cDNA: 37564., supported by cDNA: gi_15810294, supported by gi_20466024 [Arabidopsis thaliana]
  misc_feature (1)..(245): Homolog of NCBI NO: 15224496 NR Description: peroxidase; protein id: At2g38380.1, supported by gi_14334719, supported by cDNA: gi_16323435, supported by cDNA: [Arabidopsis thaliana] >gi|20455508|sp|P24102|PE22_ARATH
  misc_feature (1)..(245): Homolog of NCBI NO: 1279654 NR Description: peroxidase [Populus balsamifera subsp.
  misc_feature (1)..(245): Homolog of NCBI NO: 81653 NR Description: peroxidase (EC 1.11.1.7) E - Arabidopsis thaliana
  misc_feature (1)..(245): Homolog of NCBI NO: 11513747 NR Description: Chain A, Arabidopsis Thaliana Peroxidase A2
MPSEKTSAPNNGSARGFGVVDAAKAALESACPGVVSCADILAIAAEISVELSGGPSWGVLLGRLDSKTSDFNGSLDLPEPTDNLTILQQKFSNLSLNDVDLVALSGGHTFGRVQCKFITDRLYNFSGTNMPDPTLDASYRAFLTQRCPRNGDPTALNDLDPTTPDTFDNNYYTNIEVNRGILNSDQELKSSPLAQGTTAPIVDQFAASQDDFFASFAQSMINMGNIKPLTDPSRGEVRTNCRRVN

SEQ ID NO: 12229 - DNA, 924 bp, Zea mays subsp. mays
  misc_feature (1)..(924): Ceres Seq. ID no. 12413613
  misc_feature: MA Experiment ID: 20000487 Result: Up-regulated in Transcription
  misc_feature: MA Experiment 20000487 PARAMETER Experiment Name: Zm_50mM_NH4NO3_L_to_H_P Parameter: Organism Value: Zea mays
  misc_feature: MA Experiment 20000487 PARAMETER Experiment Name: Zm_50mM_NH4NO3_L_to_H_P Parameter: Timepoint (hr) Value: 4
  misc_feature: MA Experiment 20000487 PARAMETER Experiment Name: Zm_50mM_NH4NO3_L_to_H_P Parameter: Tissue Value: Leaves
  misc_feature: MA Experiment 20000487 PARAMETER Experiment Name: Zm_50mM_NH4NO3_L_to_H_P Parameter: Treatment Value: 50mM NH4NO3 vs. 100mM Mannitol
  misc_feature: MA Experiment ID: 20000488 Result: Up-regulated in Transcription
  misc_feature: MA Experiment 20000488 PARAMETER Experiment Name: Zm_50mM_NH4NO3_L_to_H_P Parameter: Organism Value: Zea mays
  misc_feature: MA Experiment 20000488 PARAMETER Experiment Name: Zm_50mM_NH4NO3_L_to_H_P Parameter: Timepoint (hr) Value: 8
  misc_feature: MA Experiment 20000488 PARAMETER Experiment Name: Zm_50mM_NH4NO3_L_to_H_P Parameter: Tissue Value: Leaves
  misc_feature: MA Experiment 20000488 PARAMETER Experiment Name: Zm_50mM_NH4NO3_L_to_H_P Parameter: Treatment Value: 50mM NH4NO3 vs. 100mM Mannitol
aaaaaactgccactccactcctaccccacacagaagcggcggcggcggagcaaacgcaggcgaaggcgagggtgtgagggaaggagcaccagccatggtgcacgtcaacttctaccgcaactatggtaagacgttcaagaaaccaaggcgtccttatgagaaggagcgtcttgatgctgaactgaagctggtcggtgagtatgggctgaggtgcaagcgtgagctttggagggtccagtatgcactgagcaggatccgtaatgctgcaaggcacttgctcacccttgacgagaagaacccccgtcgtatctttgagggtgaggcgcttcttcgccgcatgaaccgctatgggctgcttgctgagggtcagaacaagcttgattatgttcttgccctcaccgctgagaacttcctcgcaaggcggcttcaaacacttgtcttcaaggctggcatggccaagtccattcaccatgctcgtgtcttgatcaagcagcgtcacatcagggttggcaggcaaattgtcaacgtcccatcattcatggtgagggtggagtctgagaagcacattgacttttcactgtcaagcccattcggtggaggccccgcaggaagggtgaagagaaagaatcagaagaaggcaagcggtggcggcgatgctggcgatgaggatgaggagtgaggatggacaagtagcgttacccaatataataatattatctagttttcttgaacttgttcgaatgatgagtgcttagctgtgtgatctgacgcagagttccctgtgctgactctgtgtcatggatggtccattttatcttatggtattatcagcctttacataactgctatgtttggatatgttcaattctgttgcaattttatgtggttgttttttgcgttttgttgctattaagctgttctttc

SEQ ID NO: 12230 - protein, 225 aa, Zea mays subsp. mays
  peptide (1)..(225): Ceres Seq. ID no. 12413614
  misc_feature (37)..(138): Pfam Name: Ribosomal protein S4/S9 N-terminal domain Pfam Description: Ribosomal protein S4/S9 N-terminal domain
  misc_feature (32)..(225): Homolog of NCBI NO: 15242498 NR Description: 40S ribosomal protein S9-like; protein id: supported by cDNA: 41408. [Arabidopsis thaliana]
  misc_feature (32)..(225): Homolog of NCBI NO: 15242241 NR Description: 40S ribosomal protein - like; protein id:
  misc_feature (32)..(224): Homolog of NCBI NO: 6440857 NR Description: 40S ribosomal protein S9 [Chlamydomonas sp. HS-5]
  misc_feature (39)..(225): Homolog of NCBI NO: 40741183 NR Description: RS9_PODAN 40S ribosomal protein S9 (S7)
  misc_feature (39)..(225): Homolog of NCBI NO: 1710780 NR Description: 40S ribosomal protein S9 (S7)
  misc_feature (43)..(225): Homolog of NCBI NO: 14141193 NR Description: ribosomal protein S9; 40S ribosomal protein S9 sapiens] >gi|20818468|ref|XP_133123.1| RIKEN cDNA 3010033P07 [Mus >gi|20178311|sp|P46781|RS9_HUMAN 40S ribosomal protein S9 Unknown
  misc_feature (43)..(225): Homolog of NCBI NO: 27735416 NR Description: Similar to ribosomal protein S9 [Xenopus laevis]
  misc_feature (43)..(225): Homolog of NCBI NO: 13592067 NR Description: ribosomal protein S9 [Rattus norvegicus]
  misc_feature (43)..(225): Homolog of NCBI NO: 15294029 NR Description: 40S ribosomal protein S9 [Ictalurus punctatus]
  misc_feature (43)..(225): Homolog of NCBI NO: 1362936 NR Description: ribosomal protein S9, cytosolic - human ribosomal protein S9 >gi|1096943|prf||2113200F ribosomal protein
KNCHSTPTPHRSGGGGANAGEGEGVREGAPAMVHVNFYRNYGKTFKKPRRPYEKERLDAELKLVGEYGLRCKRELWRVQYALSRIRNAARHLLTLDEKNPRRIFEGEALLRRMNRYGLLAEGQNKLDYVLALTAENFLARRLQTLVFKAGMAKSIHHARVLIKQRHIRVGRQIVNVPSFMVRVESEKHIDFSLSSPFGGGPAGRVKRKNQKKASGGGDAGDEDEE

SEQ ID NO: 12231 - protein, 194 aa, Zea mays subsp. mays
  peptide (1)..(194): Ceres Seq. ID no. 12413615
  misc_feature (6)..(107): Pfam Name: Ribosomal protein S4/S9 N-terminal domain Pfam Description: Ribosomal protein S4/S9 N-terminal domain
  misc_feature (1)..(194): Homolog of NCBI NO: 15242498 NR Description: 40S ribosomal protein S9-like; protein id: supported by cDNA: 41408. [Arabidopsis thaliana]
  misc_feature (1)..(194): Homolog of NCBI NO: 15242241 NR Description: 40S ribosomal protein - like; protein id:
  misc_feature (1)..(193): Homolog of NCBI NO: 6440857 NR Description: 40S ribosomal protein S9 [Chlamydomonas sp. HS-5]
  misc_feature (8)..(194): Homolog of NCBI NO: 40741183 NR Description: RS9_PODAN 40S ribosomal protein S9 (S7)
  misc_feature (8)..(194): Homolog of NCBI NO: 1710780 NR Description: 40S ribosomal protein S9 (S7)
  misc_feature (12)..(194): Homolog of NCBI NO: 14141193 NR Description: ribosomal protein S9; 40S ribosomal protein S9 sapiens] >gi|20818468|ref|XP_133123.1| RIKEN cDNA 3010033P07 [Mus >gi|20178311|sp|P46781|RS9_HUMAN 40S ribosomal protein S9 Unknown
  misc_feature (12)..(194): Homolog of NCBI NO: 27735416 NR Description: Similar to ribosomal protein S9 [Xenopus laevis]
  misc_feature (12)..(194): Homolog of NCBI NO: 13592067 NR Description: ribosomal protein S9 [Rattus norvegicus]
  misc_feature (12)..(194): Homolog of NCBI NO: 15294029 NR Description: 40S ribosomal protein S9 [Ictalurus punctatus]
  misc_feature (12)..(194): Homolog of NCBI NO: 1362936 NR Description: ribosomal protein S9, cytosolic - human ribosomal protein S9 >gi|1096943|prf||2113200F ribosomal protein
MVHVNFYRNYGKTFKKPRRPYEKERLDAELKLVGEYGLRCKRELWRVQYALSRIRNAARHLLTLDEKNPRRIFEGEALLRRMNRYGLLAEGQNKLDYVLALTAENFLARRLQTLVFKAGMAKSIHHARVLIKQRHIRVGRQIVNVPSFMVRVESEKHIDFSLSSPFGGGPAGRVKRKNQKKASGGGDAGDEDEE

SEQ ID NO: 12232 - protein, 113 aa, Zea mays subsp. mays
  peptide (1)..(113): Ceres Seq. ID no. 12413616
  misc_feature (28)..(75): Pfam Name: S4 domain Pfam Description: S4 domain
  misc_feature (1)..(113): Homolog of NCBI NO: 40741183 NR Description: RS9_PODAN 40S ribosomal protein S9 (S7)
  misc_feature (1)..(113): Homolog of NCBI NO: 1710780 NR Description: 40S ribosomal protein S9 (S7)
  misc_feature (1)..(113): Homolog of NCBI NO: 14141193 NR Description: ribosomal protein S9; 40S ribosomal protein S9 sapiens] >gi|20818468|ref|XP_133123.1| RIKEN cDNA 3010033P07 [Mus >gi|20178311|sp|P46781|RS9_HUMAN 40S ribosomal protein S9 Unknown
  misc_feature (1)..(113): Homolog of NCBI NO: 27735416 NR Description: Similar to ribosomal protein S9 [Xenopus laevis]
  misc_feature (1)..(113): Homolog of NCBI NO: 15242241 NR Description: 40S ribosomal protein - like; protein id:
  misc_feature (1)..(112): Homolog of NCBI NO: 6440857 NR Description: 40S ribosomal protein S9 [Chlamydomonas sp. HS-5]
  misc_feature (1)..(113): Homolog of NCBI NO: 15242498 NR Description: 40S ribosomal protein S9-like; protein id: supported by cDNA: 41408. [Arabidopsis thaliana]
  misc_feature (1)..(113): Homolog of NCBI NO: 13592067 NR Description: ribosomal protein S9 [Rattus norvegicus]
  misc_feature (1)..(113): Homolog of NCBI NO: 15294029 NR Description: 40S ribosomal protein S9 [Ictalurus punctatus]
  misc_feature (1)..(113): Homolog of NCBI NO: 1362936 NR Description: ribosomal protein S9, cytosolic - human ribosomal protein S9 >gi|1096943|prf||2113200F ribosomal protein
MNRYGLLAEGQNKLDYVLALTAENFLARRLQTLVFKAGMAKSIHHARVLIKQRHIRVGRQIVNVPSFMVRVESEKHIDFSLSSPFGGGPAGRVKRKNQKKASGGGDAGDEDEE

SEQ ID NO: 12233 - DNA, 935 bp, Zea mays subsp. mays
  misc_feature (1)..(935): Ceres Seq. ID no. 12342362
  misc_feature: MA Experiment ID: 108522 Result: Down-regulated in Transcription
  misc_feature: MA Experiment 108522 PARAMETER Experiment Name: Zm_42deg_Heat_P Parameter: Age (day) Value: 8
  misc_feature: MA Experiment 108522 PARAMETER Experiment Name: Zm_42deg_Heat_P Parameter: Organism Value: Zea mays
  misc_feature: MA Experiment 108522 PARAMETER Experiment Name: Zm_42deg_Heat_P Parameter: Plant Line Value: 35A19
  misc_feature: MA Experiment 108522 PARAMETER Experiment Name: Zm_42deg_Heat_P Parameter: Temperature (deg C) Value: 42 vs. 22
  misc_feature: MA Experiment 108522 PARAMETER Experiment Name: Zm_42deg_Heat_P Parameter: Timepoint (hr) Value: 1
  misc_feature: MA Experiment 108522 PARAMETER Experiment Name: Zm_42deg_Heat_P Parameter: Tissue Value: Aerial
  misc_feature: MA Experiment ID: 108543 Result: Down-regulated in Transcription
gaggaagggaaggtggtggtgctgaactactccttgatggccaatttcgtgatggtttatgggtatgttcctggggcacagtctgaggtttgccggttgtgcttggagttgccggggctggagcctctactttatctggatggcgatcagctgaatggagtgcatgagaagggagttcatgatctgtggagagtgctgaaggatgagatttgcctgccactgatgatatcattgtgccaactgaacggtctgcgcttgccgccttgcttgatggctttgcctgctgatctcaagactaaggtattggggtttttacctggggttgatcttgcaaaggttgagtgcacatgcaaggaaatgatgaatcttgcatcagatgatagtatctggaagaagcttgtatccaagtttgaaaattatggcgagggctctaggctggcaggcaagaatgcaaaggccatatttgtagaagcttggcaggccaataagagacggcagaagaggcccaatccaaccttttggaactatggctggggaaacagtccttatagccgcccacttaggctgccattgattggtggggactcggacagacttccttttattgggaatcatggttctgttgggcgccactttggaaatcaacgaaggaatatctcaccgaactgcattcttgatggtcaccgtcataacttcctttgaagccatgtcaatgagttttacttgtatgttaagagtgttttataaggacttcaatggtgcatatacggttagaccgccttgttcatatcgtcaagtcgcacacttatgcttgtgcacagcactcttatgatcttatcctaatatatccccttagtatcttagatcgtatctttactatctttttttggtaccaaatgtaatccagtgtcctagtaataaagtacccttgttct

SEQ ID NO: 12234 - protein, 233 aa, Zea mays subsp. mays
  peptide (1)..(233): Ceres Seq. ID no. 12342363
  misc_feature (90)..(132): Pfam Name: F-box domain Pfam Description: F-box domain
  misc_feature (1)..(132): Homolog of NCBI NO: 27311243 NR Description: Hypothetical protein [Oryza sativa (japonica
  misc_feature (6)..(219): Homolog of NCBI NO: 18395296 NR Description: expressed protein; protein id: At1g23780.1, by cDNA: gi_15146299 [Arabidopsis thaliana]
  misc_feature (6)..(131): Homolog of NCBI NO: 15220857 NR Description: unknown protein; protein id: At1g23770.1
  misc_feature (63)..(125): Homolog of NCBI NO: 15223132 NR Description: hypothetical protein; protein id: At1g70360.1
  misc_feature (62)..(136): Homolog of NCBI NO: 37530790 NR Description: unknown protein [Oryza sativa (japonica
EEGKVVVLNYSLMANFVMVYGYVPGAQSEVCRLCLELPGLEPLLYLDGDQLNGVHEKGVHDLWRVLKDEICLPLMISLCQLNGLRLPPCLMALPADLKTKVLGFLPGVDLAKVECTCKEMMNLASDDSIWKKLVSKFENYGEGSRLAGKNAKAIFVEAWQANKRRQKRPNPTFWNYGWGNSPYSRPLRLPLIGGDSDRLPFIGNHGSVGRHFGNQRRNISPNCILDGHRHNFL

SEQ ID NO: 12235 - protein, 221 aa, Zea mays subsp. mays
  peptide (1)..(221): Ceres Seq. ID no. 12342364
  misc_feature (78)..(120): Pfam Name: F-box domain Pfam Description: F-box domain
  misc_feature (1)..(120): Homolog of NCBI NO: 27311243 NR Description: Hypothetical protein [Oryza sativa (japonica
  misc_feature (1)..(207): Homolog of NCBI NO: 18395296 NR Description: expressed protein; protein id: At1g23780.1, by cDNA: gi_15146299 [Arabidopsis thaliana]
  misc_feature (1)..(119): Homolog of NCBI NO: 15220857 NR Description: unknown protein; protein id: At1g23770.1
  misc_feature (51)..(113): Homolog of NCBI NO: 15223132 NR Description: hypothetical protein; protein id: At1g70360.1
  misc_feature (50)..(124): Homolog of NCBI NO: 37530790 NR Description: unknown protein [Oryza sativa (japonica
MANFVMVYGYVPGAQSEVCRLCLELPGLEPLLYLDGDQLNGVHEKGVHDLWRVLKDEICLPLMISLCQLNGLRLPPCLMALPADLKTKVLGFLPGVDLAKVECTCKEMMNLASDDSIWKKLVSKFENYGEGSRLAGKNAKAIFVEAWQANKRRQKRPNPTFWNYGWGNSPYSRPLRLPLIGGDSDRLPFIGNHGSVGRHFGNQRRNISPNCILDGHRHNFL

SEQ ID NO: 12236 - protein, 216 aa, Zea mays subsp. mays
  peptide (1)..(216): Ceres Seq. ID no. 12342365
  misc_feature (73)..(115): Pfam Name: F-box domain Pfam Description: F-box domain
  misc_feature (1)..(115): Homolog of NCBI NO: 27311243 NR Description: Hypothetical protein [Oryza sativa (japonica
  misc_feature (1)..(202): Homolog of NCBI NO: 18395296 NR Description: expressed protein; protein id: At1g23780.1, by cDNA: gi_15146299 [Arabidopsis thaliana]
  misc_feature (1)..(114): Homolog of NCBI NO: 15220857 NR Description: unknown protein; protein id: At1g23770.1
  misc_feature (46)..(108): Homolog of NCBI NO: 15223132 NR Description: hypothetical protein; protein id: At1g70360.1
  misc_feature (45)..(119): Homolog of NCBI NO: 37530790 NR Description: unknown protein [Oryza sativa (japonica
MVYGYVPGAQSEVCRLCLELPGLEPLLYLDGDQLNGVHEKGVHDLWRVLKDEICLPLMISLCQLNGLRLPPCLMALPADLKTKVLGFLPGVDLAKVECTCKEMMNLASDDSIWKKLVSKFENYGEGSRLAGKNAKAIFVEAWQANKRRQKRPNPTFWNYGWGNSPYSRPLRLPLIGGDSDRLPFIGNHGSVGRHFGNQRRNISPNCILDGHRHNFL

SEQ ID NO: 12237 - DNA, 1191 bp, Zea mays subsp. mays
  misc_feature (1)..(1191): Ceres Seq. ID no. 12411600
  misc_feature: MA Experiment ID: 20000535 Result: Down-regulated in Transcription
  misc_feature: MA Experiment 20000535 PARAMETER Experiment Name: Zm_Hybrid_Seed_Dev_P Parameter: DAP Value: 30 vs. 12
  misc_feature: MA Experiment 20000535 PARAMETER Experiment Name: Zm_Hybrid_Seed_Dev_P Parameter: Organism Value: Zea mays
  misc_feature: MA Experiment 20000535 PARAMETER Experiment Name: Zm_Hybrid_Seed_Dev_P Parameter: Plant Line Value: 35A19
  misc_feature: MA Experiment 20000535 PARAMETER Experiment Name: Zm_Hybrid_Seed_Dev_P Parameter: Tissue Value: Embryo vs. Unfert Floret
gtccaaaaaggaggcgccgcgctcctcttcttctacgccgttcactctctctagtctctcccttcccttctccacgcctccgcccccactcgtgagactctacctagccctagcgccagcaccacccgcccaacctcccggagagagagagagagaggaggaggccttcgccgccgccgttgccgtcggccgagacgccaggatgttcgggtaccagaagggcctcgatgtcgaggcggggacatcgggcgccgccgccacgggcggcgcgcgccagctctacccggggatgcaggagagccccgagctgcgctgggcgctcatccgcaagatctacgtcattctctccctccagctgctcctcaccgccgtcgtcgccgcagtcgtcgtcaaggtccgcgccatcccgcacttcttcaccaccaccagcgccggcctcggcctctacatcttcctcatcatcctcccctttatcgtgctgtgcccgttgtacttctaccacgagaagcacccagtcaacctgatcctgctcggcctcttcaccgttgccatcagctttgctgtgggcatgacatgtgccttcaccagtggcaaggtcattctggagtctgcaattctgacaacagtggtcgtgctcagccttaccgcatacactttctgggccgtgaataggggcaaagacttcagcttcctgggtcctttcctgttcgccgccctcatagtgctgcttgtgttcgcactcatccagatcctgttcccactgggcaagctctcccagatgatctacggcgggctggcgtcgctcatcttcagcgggtacatcgtctacgacacaaacaacatcatcaggcgctacacgtacgaccagtacgtctgggccgcagtctccctgtacctggacgttatcaacctcttcctgtccctgatgaccctcttcagggcagccgactaggcgctctgctctcatcctgtctatctacgagtcggtgcctgaatgctcccgtggttaagctccggtacccagaattccagttccaagaatagagttgtatatagctacctgtgttgcctttctactagtatggttttattcgacttggctcggttcgatcagagtctttatacgtagttggatcgcgaacaaatgaacctgcatgggattatggagagccatctgctttatgatcctcg

SEQ ID NO: 12238 - protein, 316 aa, Zea mays subsp. mays
  peptide (1)..(316): Ceres Seq. ID no. 12411601
  misc_feature (100)..(316): Pfam Name: Uncharacterised protein family UPF0005 Pfam Description: Uncharacterised protein family UPF0005
  misc_feature (68)..(316): Homolog of NCBI NO: 34393841 NR Description: putative z-protein [Oryza sativa (japonica
  misc_feature (90)..(316): Homolog of NCBI NO: 14626300 NR Description: putative receptor-associated protein [Oryza
  misc_feature (71)..(316): Homolog of NCBI NO: 15218701 NR Description: putative glutamate/aspartate-binding peptide;
  misc_feature (93)..(316): Homolog of NCBI NO: 15229411 NR Description: putative protein; protein id: At3g63310.1
  misc_feature (71)..(314): Homolog of NCBI NO: 15235466 NR Description: putative glutamate-/aspartate-binding peptide; id: At4g02690.1 [Arabidopsis thaliana] >gi|7486855|pir||T01080
  misc_feature (69)..(316): Homolog of NCBI NO: 18414455 NR Description: Expressed protein; protein id: At4g15470.1, by cDNA: gi_15215826, supported by cDNA: gi_15810200, supported cDNA: gi_20453266 [Arabidopsis thaliana]
  misc_feature (97)..(316): Homolog of NCBI NO: 34393840 NR Description: putative z-protein [Oryza sativa (japonica
  misc_feature (69)..(277): Homolog of NCBI NO: 15810201 NR Description: AT4g15470/dl3775w [Arabidopsis thaliana]
  misc_feature (69)..(160): Homolog of NCBI NO: 7485070 NR Description: hypothetical protein - Arabidopsis thaliana hypothetical protein [Arabidopsis thaliana]
  misc_feature (197)..(268): Homolog of NCBI NO: 7485070 NR Description: hypothetical protein - Arabidopsis thaliana hypothetical protein [Arabidopsis thaliana]
SKKEAPRSSSSTPFTLSSLSLPFSTPPPPLVRLYLALAPAPPAQPPGEREREEEAFAAAVAVGRDARMFGYQKGLDVEAGTSGAAATGGARQLYPGMQESPELRWALIRKIYVILSLQLLLTAVVAAVVVKVRAIPHFFTTTSAGLGLYIFLIILPFIVLCPLYFYHEKHPVNLILLGLFTVAISFAVGMTCAFTSGKVILESAILTTVVVLSLTAYTFWAVNRGKDFSFLGPFLFAALIVLLVFALIQILFPLGKLSQMIYGGLASLIFSGYIVYDTNNIIRRYTYDQYVWAAVSLYLDVINLFLSLMTLFRAAD

SEQ ID NO: 12239 - protein, 249 aa, Zea mays subsp. mays
  peptide (1)..(249): Ceres Seq. ID no. 12411602
  misc_feature (33)..(249): Pfam Name: Uncharacterised protein family UPF0005 Pfam Description: Uncharacterised protein family UPF0005
  misc_feature (1)..(249): Homolog of NCBI NO: 34393841 NR Description: putative z-protein [Oryza sativa (japonica
  misc_feature (23)..(249): Homolog of NCBI NO: 14626300 NR Description: putative receptor-associated protein [Oryza
  misc_feature (4)..(249): Homolog of NCBI NO: 15218701 NR Description: putative glutamate/aspartate-binding peptide;
  misc_feature (26)..(249): Homolog of NCBI NO: 15229411 NR Description: putative protein; protein id: At3g63310.1
  misc_feature (4)..(247): Homolog of NCBI NO: 15235466 NR Description: putative glutamate-/aspartate-binding peptide; id: At4g02690.1 [Arabidopsis thaliana] >gi|7486855|pir||T01080
  misc_feature (2)..(249): Homolog of NCBI NO: 18414455 NR Description: Expressed protein; protein id: At4g15470.1, by cDNA: gi_15215826, supported by cDNA: gi_15810200, supported cDNA: gi_20453266 [Arabidopsis thaliana]
  misc_feature (30)..(249): Homolog of NCBI NO: 34393840 NR Description: putative z-protein [Oryza sativa (japonica
  misc_feature (2)..(210): Homolog of NCBI NO: 15810201 NR Description: AT4g15470/dl3775w [Arabidopsis thaliana]
  misc_feature (2)..(93): Homolog of NCBI NO: 7485070 NR Description: hypothetical protein - Arabidopsis thaliana hypothetical protein [Arabidopsis thaliana]
  misc_feature (130)..(201): Homolog of NCBI NO: 7485070 NR Description: hypothetical protein - Arabidopsis thaliana hypothetical protein [Arabidopsis thaliana]
MFGYQKGLDVEAGTSGAAATGGARQLYPGMQESPELRWALIRKIYVILSLQLLLTAVVAAVVVKVRAIPHFFTTTSAGLGLYIFLIILPFIVLCPLYFYHEKHPVNLILLGLFTVAISFAVGMTCAFTSGKVILESAILTTVVVLSLTAYTFWAVNRGKDFSFLGPFLFAALIVLLVFALIQILFPLGKLSQMIYGGLASLIFSGYIVYDTNNIIRRYTYDQYVWAAVSLYLDVINLFLSLMTLFRAAD

SEQ ID NO: 12240 - protein, 220 aa, Zea mays subsp. mays
  peptide (1)..(220): Ceres Seq. ID no. 12411603
  misc_feature (4)..(220): Pfam Name: Uncharacterised protein family UPF0005 Pfam Description: Uncharacterised protein family UPF0005
  misc_feature (1)..(220): Homolog of NCBI NO: 34393841 NR Description: putative z-protein [Oryza sativa (japonica
  misc_feature (1)..(220): Homolog of NCBI NO: 14626300 NR Description: putative receptor-associated protein [Oryza
  misc_feature (1)..(220): Homolog of NCBI NO: 15218701 NR Description: putative glutamate/aspartate-binding peptide;
  misc_feature (1)..(220): Homolog of NCBI NO: 15229411 NR Description: putative protein; protein id: At3g63310.1
  misc_feature (1)..(218): Homolog of NCBI NO: 15235466 NR Description: putative glutamate-/aspartate-binding peptide; id: At4g02690.1 [Arabidopsis thaliana] >gi|7486855|pir||T01080
  misc_feature (1)..(220): Homolog of NCBI NO: 18414455 NR Description: Expressed protein; protein id: At4g15470.1, by cDNA: gi_15215826, supported by cDNA: gi_15810200, supported cDNA: gi_20453266 [Arabidopsis thaliana]
  misc_feature (1)..(220): Homolog of NCBI NO: 34393840 NR Description: putative z-protein [Oryza sativa (japonica
  misc_feature (1)..(181): Homolog of NCBI NO: 15810201 NR Description: AT4g15470/dl3775w [Arabidopsis thaliana]
  misc_feature (1)..(64): Homolog of NCBI NO: 7485070 NR Description: hypothetical protein - Arabidopsis thaliana hypothetical protein [Arabidopsis thaliana]
  misc_feature (101)..(172): Homolog of NCBI NO: 7485070 NR Description: hypothetical protein - Arabidopsis thaliana hypothetical protein [Arabidopsis thaliana]
MQESPELRWALIRKIYVILSLQLLLTAVVAAVVVKVRAIPHFFTTTSAGLGLYIFLIILPFIVLCPLYFYHEKHPVNLILLGLFTVAISFAVGMTCAFTSGKVILESAILTTVVVLSLTAYTFWAVNRGKDFSFLGPFLFAALIVLLVFALIQILFPLGKLSQMIYGGLASLIFSGYIVYDTNNIIRRYTYDQYVWAAVSLYLDVINLFLSLMTLFRAAD

SEQ ID NO: 12241 - DNA, 1256 bp, Zea mays subsp. mays
  misc_feature (1)..(1256): Ceres Seq. ID no. 12411597
  misc_feature: MA Experiment ID: 108522 Result: Up-regulated in Transcription
  misc_feature: MA Experiment 108522 PARAMETER Experiment Name: Zm_42deg_Heat_P Parameter: Age (day) Value: 8
  misc_feature: MA Experiment 108522 PARAMETER Experiment Name: Zm_42deg_Heat_P Parameter: Organism Value: Zea mays
  misc_feature: MA Experiment 108522 PARAMETER Experiment Name: Zm_42deg_Heat_P Parameter: Plant Line Value: 35A19
  misc_feature: MA Experiment 108522 PARAMETER Experiment Name: Zm_42deg_Heat_P Parameter: Temperature (deg C) Value: 42 vs. 22
  misc_feature: MA Experiment 108522 PARAMETER Experiment Name: Zm_42deg_Heat_P Parameter: Timepoint (hr) Value: 1
  misc_feature: MA Experiment 108522 PARAMETER Experiment Name: Zm_42deg_Heat_P Parameter: Tissue Value: Aerial
  misc_feature: MA Experiment ID: 108527 Result: Down-regulated in Transcription
  misc_feature: MA Experiment 108527 PARAMETER Experiment Name: Zm_5mM_NO_P Parameter: Age (day) Value: 8
  misc_feature: MA Experiment 108527 PARAMETER Experiment Name: Zm_5mM_NO_P Parameter: Organism Value: Zea mays
  misc_feature: MA Experiment 108527 PARAMETER Experiment Name: Zm_5mM_NO_P Parameter: Plant Line Value: 35A19
  misc_feature: MA Experiment 108527 PARAMETER Experiment Name: Zm_5mM_NO_P Parameter: Timepoint (hr) Value: 6
  misc_feature: MA Experiment 108527 PARAMETER Experiment Name: Zm_5mM_NO_P Parameter: Tissue Value: Aerial
  misc_feature: MA Experiment 108527 PARAMETER Experiment Name: Zm_5mM_NO_P Parameter: Treatment Value: 5mM NO vs. No Treatment
  misc_feature: MA Experiment ID: 108528 Result: Down-regulated in Transcription
  misc_feature: MA Experiment 108528 PARAMETER Experiment Name: Zm_Imbibed_Seeds_P Parameter: Age (day) Value: 5 vs. 2
  misc_feature: MA Experiment 108528 PARAMETER Experiment Name: Zm_Imbibed_Seeds_P Parameter: Organism Value: Zea mays
  misc_feature: MA Experiment 108528 PARAMETER Experiment Name: Zm_Imbibed_Seeds_P Parameter: Plant Line Value: 35A19
  misc_feature: MA Experiment 108528 PARAMETER Experiment Name: Zm_Imbibed_Seeds_P Parameter: Tissue Value: Aerial vs. Embryo
  misc_feature: MA Experiment ID: 108530 Result: Down-regulated in Transcription
  misc_feature: MA Experiment 108530 PARAMETER Experiment Name: Zm_Imbibed_Seeds_P Parameter: Age (day) Value: 6 vs. 2
  misc_feature: MA Experiment 108530 PARAMETER Experiment Name: Zm_Imbibed_Seeds_P Parameter: Organism Value: Zea mays
  misc_feature: MA Experiment 108530 PARAMETER Experiment Name: Zm_Imbibed_Seeds_P Parameter: Plant Line Value: 35A19
  misc_feature: MA Experiment 108530 PARAMETER Experiment Name: Zm_Imbibed_Seeds_P Parameter: Tissue Value: Aerial vs. Embryo
  misc_feature: MA Experiment ID: 108535 Result: Down-regulated in Transcription
  misc_feature: MA Experiment 108535 PARAMETER Experiment Name: Zm_Meristem_P Parameter: Age (day) Value: 8
  misc_feature: MA Experiment 108535 PARAMETER Experiment Name: Zm_Meristem_P Parameter: Organism Value: Zea mays
  misc_feature: MA Experiment 108535 PARAMETER Experiment Name: Zm_Meristem_P Parameter: Plant Line Value: 35A19
  misc_feature: MA Experiment 108535 PARAMETER Experiment Name: Zm_Meristem_P Parameter: Tissue Value: Root Meristem vs. Above Root Meristem
  misc_feature: MA Experiment ID: 108536 Result: Down-regulated in Transcription
  misc_feature: MA Experiment 108536 PARAMETER Experiment Name: Zm_Meristem_P Parameter: Age (day) Value: 8
  misc_feature: MA Experiment 108536 PARAMETER Experiment Name: Zm_Meristem_P Parameter: Organism Value: Zea mays
  misc_feature: MA Experiment 108536 PARAMETER Experiment Name: Zm_Meristem_P Parameter: Plant Line Value: 35A19
  misc_feature: MA Experiment 108536 PARAMETER Experiment Name: Zm_Meristem_P Parameter: Tissue Value: Shoot Meristem vs. Above Shoot Meristem
  misc_feature: MA Experiment ID: 108543 Result: Up-regulated in Transcription
  misc_feature: MA Experiment ID: 108544 Result: Up-regulated in Transcription
  misc_feature: MA Experiment ID: 108545 Result: Down-regulated in Transcription
  misc_feature: MA Experiment 108545 PARAMETER Experiment Name: Zm_Imbibed_Seeds_P Parameter: Age (day) Value: 3 vs. 2
  misc_feature: MA Experiment 108545 PARAMETER Experiment Name: Zm_Imbibed_Seeds_P Parameter: Organism Value: Zea mays
  misc_feature: MA Experiment 108545 PARAMETER Experiment Name: Zm_Imbibed_Seeds_P Parameter: Plant Line Value: 35A19
  misc_feature: MA Experiment 108545 PARAMETER Experiment Name: Zm_Imbibed_Seeds_P Parameter: Tissue Value: Aerial vs. Embryo
  misc_feature: MA Experiment ID: 108547 Result: Down-regulated in Transcription
  misc_feature: MA Experiment 108547 PARAMETER Experiment Name: Zm_Imbibed_Seeds_P Parameter: Age (day) Value: 4 vs. 2
  misc_feature: MA Experiment 108547 PARAMETER Experiment Name: Zm_Imbibed_Seeds_P Parameter: Organism Value: Zea mays
  misc_feature: MA Experiment 108547 PARAMETER Experiment Name: Zm_Imbibed_Seeds_P Parameter: Plant Line Value: 35A19
  misc_feature: MA Experiment 108547 PARAMETER Experiment Name: Zm_Imbibed_Seeds_P Parameter: Tissue Value: Aerial vs. Embryo
  misc_feature: MA Experiment ID: 108687 Result: Down-regulated in Transcription
  misc_feature: MA Experiment 108687 PARAMETER Experiment Name: Zm_Embryos-Flowers__P Parameter: Tissue Value: Embryo vs. Aerial+
  misc_feature: MA Experiment ID: 20000492 Result: Down-regulated in Transcription
  misc_feature: MA Experiment 20000492 PARAMETER Experiment Name: Zm_Hybrid_Seed_Dev_P Parameter: DAP Value: 12
  misc_feature: MA Experiment 20000492 PARAMETER Experiment Name: Zm_Hybrid_Seed_Dev_P Parameter: Organism Value: Zea mays
  misc_feature: MA Experiment 20000492 PARAMETER Experiment Name: Zm_Hybrid_Seed_Dev_P Parameter: Plant Line Value: 35A19
  misc_feature: MA Experiment 20000492 PARAMETER Experiment Name: Zm_Hybrid_Seed_Dev_P Parameter: Tissue Value: Fert Kernel vs. Unfert Floret
atctccggcctcacaccgcaaccgcaagcaagcgaagcgcagagcctgcctgaccagagctagctgagctacagccaacagcagctggtctgactgacatggcgaaggacatcgaggcatcggggcccgaggcgggcgagttctcggccaaggactacaccgaccctccgccggcgccgctgatcgacgcggaggagctcacccagtggtcactgtaccgcgcggtcatcgccgagttcatcgccacgctgctcttcctctacatcaccgtggccaccgtgatcgggtacaagcaccagacggacgcgtcggcgtcgggccccgacgcggcgtgcggcggcgtcggcatcctcggcatcgcttgggccttcggcggcatgatcttcatcctcgtctactgcaccgccggcatctcaggtgggcacatcaacccggccgtgaccttcggcctgttcctggccaggaaggtgtccctcgtccgcgcgctgctctacatcatcgcgcagtgcctgggcgccatctgcggcgtgggcctcgtcaagggcttccagagcgcctactacgtgcgctacggcggcggcgccaacgagctcagcgacggctactccaagggcaccggcctcgccgccgagatcatcggcacgttcgtgctcgtctacaccgtcttctccgccaccgaccccaagcgcagtgcccgtgactcccacgttccggtgctagctcctctcccaattgggttcgccgtgttcatggtgcacctggccaccatccccatcaccggcaccggcatcaacccggcgaggagcctgggagccgcggtcatctacaacaaggacaaggcctgggacgaccaatggatcttctgggtgggcccactgattggcgccgccatcgccgccgcctaccaccagtacgtgctgagggccagcgccaccaagctcgggtcctaccggagcaacgcctaagttccgcccggacgcgccaggagctgggcaccgttccgattctgttcctccacatgacgccctgttctgtttccgtgtggccaggactccgctcgctcgctgctgttttctacttcggaccaaagtgtgacatatctttgctttctgtatatgtatgtaggaatgcatcatgtaaggagaatttggaatacaattgcgtgagtttttatccgatcacaatctattgagtagtggcatataaaaaatgtcctgccctttctttaaacgaatgaaagtaaagaaaagaacctc

SEQ ID NO: 12242 - protein, 288 aa, Zea mays subsp. mays
  peptide (1)..(288): Ceres Seq. ID no. 12411598
  misc_feature (33)..(270): Pfam Name: Major intrinsic protein Pfam Description: Major intrinsic protein
  misc_feature (1)..(288): Homolog of NCBI NO: 13447807 NR Description: plasma membrane integral protein ZmPIP2-4 [Zea
  misc_feature (1)..(288): Homolog of NCBI NO: 13447805 NR Description: plasma membrane integral protein ZmPIP2-3 [Zea
  misc_feature (1)..(287): Homolog of NCBI NO: 7441245 NR Description: plasma membrane intrinsic protein BPW1 - barley
  misc_feature (1)..(286): Homolog of NCBI NO: 4741931 NR Description: plasma membrane intrinsic protein [Zea mays]
  misc_feature (1)..(288): Homolog of NCBI NO: 13447801 NR Description: plasma membrane integral protein ZmPIP2-1 [Zea
  misc_feature (1)..(288): Homolog of NCBI NO: 29650727 NR Description: aquaporin [Zea mays]
  misc_feature (1)..(288): Homolog of NCBI NO: 34901270 NR Description: putative plasma membrane intrinsic protein [Oryza
  misc_feature (1)..(288): Homolog of NCBI NO: 13447803 NR Description: plasma membrane integral protein ZmPIP2-2 [Zea
  misc_feature (1)..(288): Homolog of NCBI NO: 7441249 NR Description: probable plasma membrane intrinsic protein - rice
  misc_feature (1)..(288): Homolog of NCBI NO: 13447809 NR Description: plasma membrane integral protein ZmPIP2-6 [Zea
MAKDIEASGPEAGEFSAKDYTDPPPAPLIDAEELTQWSLYRAVIAEFIATLLFLYITVATVIGYKHQTDASASGPDAACGGVGILGIAWAFGGMIFILVYCTAGISGGHINPAVTFGLFLARKVSLVRALLYIIAQCLGAICGVGLVKGFQSAYYVRYGGGANELSDGYSKGTGLAAEIIGTFVLVYTVFSATDPKRSARDSHVPVLAPLPIGFAVFMVHLATIPITGTGINPARSLGAAVIYNKDKAWDDQWIFWVGPLIGAAIAAAYHQYVLRASATKLGSYRSNA

SEQ ID NO: 12243 - protein, 195 aa, Zea mays subsp. mays
  peptide (1)..(195): Ceres Seq. ID no. 12411599
  misc_feature (1)..(177): Pfam Name: Major intrinsic protein Pfam Description: Major intrinsic protein
  misc_feature (1)..(195): Homolog of NCBI NO: 13447807 NR Description: plasma membrane integral protein ZmPIP2-4 [Zea
  misc_feature (1)..(195): Homolog of NCBI NO: 13447805 NR Description: plasma membrane integral protein ZmPIP2-3 [Zea
  misc_feature (1)..(194): Homolog of NCBI NO: 7441245 NR Description: plasma membrane intrinsic protein BPW1 - barley
  misc_feature (1)..(193): Homolog of NCBI NO: 4741931 NR Description: plasma membrane intrinsic protein [Zea mays]
  misc_feature (1)..(195): Homolog of NCBI NO: 13447801 NR Description: plasma membrane integral protein ZmPIP2-1 [Zea
  misc_feature (1)..(195): Homolog of NCBI NO: 29650727 NR Description: aquaporin [Zea mays]
  misc_feature (1)..(195): Homolog of NCBI NO: 34901270 NR Description: putative plasma membrane intrinsic protein [Oryza
  misc_feature (1)..(195): Homolog of NCBI NO: 13447803 NR Description: plasma membrane integral protein ZmPIP2-2 [Zea
  misc_feature (1)..(195): Homolog of NCBI NO: 7441249 NR Description: probable plasma membrane intrinsic protein - rice
  misc_feature (1)..(195): Homolog of NCBI NO: 13447809 NR Description: plasma membrane integral protein ZmPIP2-6 [Zea
MIFILVYCTAGISGGHINPAVTFGLFLARKVSLVRALLYIIAQCLGAICGVGLVKGFQSAYYVRYGGGANELSDGYSKGTGLAAEIIGTFVLVYTVFSATDPKRSARDSHVPVLAPLPIGFAVFMVHLATIPITGTGINPARSLGAAVIYNKDKAWDDQWIFWVGPLIGAAIAAAYHQYVLRASATKLGSYRSNA

SEQ ID NO: 12244 - DNA, 1305 bp, Zea mays subsp. mays
  misc_feature (1)..(1305): Ceres Seq. ID no. 12411593
  misc_feature: MA Experiment ID: 108543 Result: Up-regulated in Transcription
  misc_feature: MA Experiment ID: 108544 Result: Up-regulated in Transcription
  misc_feature: MA Experiment ID: 108687 Result: Down-regulated in Transcription
  misc_feature: MA Experiment 108687 PARAMETER Experiment Name: Zm_Embryos-Flowers__P Parameter: Tissue Value: Embryo vs. Aerial+
  misc_feature: MA Experiment ID: 20000535 Result: Down-regulated in Transcription
  misc_feature: MA Experiment 20000535 PARAMETER Experiment Name: Zm_Hybrid_Seed_Dev_P Parameter: DAP Value: 30 vs. 12
  misc_feature: MA Experiment 20000535 PARAMETER Experiment Name: Zm_Hybrid_Seed_Dev_P Parameter: Organism Value: Zea mays
  misc_feature: MA Experiment 20000535 PARAMETER Experiment Name: Zm_Hybrid_Seed_Dev_P Parameter: Plant Line Value: 35A19
  misc_feature: MA Experiment 20000535 PARAMETER Experiment Name: Zm_Hybrid_Seed_Dev_P Parameter: Tissue Value: Embryo vs. Unfert Floret
gtcatcgattcagagctcacgagtcacgatccaaatcccttttccactccgccggacgtcgagagaggcggtgggtgcgggacgcgaaggcgaagccctagccccctccctgccgcggacgccgatggacccacctcgcgccgtcgcctttcttctcatactcctgcccgtgctcgccccggtggcctccggtgtacctttcgtcgtcctacacgggattggcgacgagtgcgggaacgatgggctgtcatccttcaccaagatgcttggggagtggtcaggctccaagggttactgcattgaaattggaagaggagcatgggactcttggttaatgccacttcaagagcaggcaaatacggtttgtaagaaggtcaagaaaatgaaagagctcagtgaaggttacaatatagttggcctgtctcaggggaacttaattggcagggctgtaatcgagtactgtgattgtggacctccggtcaagaatttcatatcaattgggggtcctcatgctggtacagcttcagtgccactttgtggttctgggtttctttgtattcttattgatgatctgattaaatcagagatatattcagactatgtgcaggcgcatcttgcccctagtggttacctaaagatacccactgatatggaagattatttgaagggttgcaaatttcttccaaaacttaacaatgagatcccaagtgcaagaaatactacctataaagaaagattcagcagcttggaaaacttggtactgatcatgtttgaggacgatgcagtattaatacctcgggaaacagcgtggtttggttattaccctgatggagcctttagcccagtgctgccccctcaagagacgaagctgtatacagaagattggattggcttgaagaccctggacgaggctgggcgtgttaaattcgtgtctgtgccaggaggtcacctgcgtatcaccagaagcgacatgaagaagtacattgtgccttacttgacgccggaggcgtcatccaagaagaacatacacatacaccggatgctgtcgctttgagcgagtatctaacaaggtttgtatcggtggccattgtgccctgacacgtgggccatgtgttgacgccttgtaaatacgctgaacacgaagggaggaaatgatagctccttggaagagtggatccgaacttgtgaagtgaagcgtgtttggtcctttccgtttcctatctgacaaacaaatatgtccatgccgtggccacaacacgcataaatcattatgcacatttcctattgagtaaaatacaattccgg

SEQ ID NO: 12245 - protein, 350 aa, Zea mays subsp. mays
  peptide (1)..(350): Ceres Seq. ID no. 12411594
  misc_feature (62)..(314): Pfam Name: Palmitoyl protein thioesterase Pfam Description: Palmitoyl protein thioesterase
  misc_feature (48)..(314): Homolog of NCBI NO: 37536884 NR Description: putative palmitoyl-protein thioesterase [Oryza
  misc_feature (42)..(341): Homolog of NCBI NO: 15232301 NR Description: palmitoyl-protein thioesterase precursor - like; id: At3g60340.1, supported by cDNA: 38539., supported by cDNA:
  misc_feature (42)..(341): Homolog of NCBI NO: 14334718 NR Description: putative palmitoyl-protein thioesterase precursor
  misc_feature (42)..(341): Homolog of NCBI NO: 21593393 NR Description: palmitoyl-protein thioesterase precursor-like
  misc_feature (48)..(343): Homolog of NCBI NO: 15238063 NR Description: palmitoyl-protein thioesterase precursor-like;
  misc_feature (48)..(343): Homolog of NCBI NO: 28393539 NR Description: putative palmitoyl-protein thioesterase precursor
  misc_feature (51)..(344): Homolog of NCBI NO: 15236078 NR Description: putative protein; protein id: At4g17480.1, by cDNA: 253398. [Arabidopsis thaliana] unknown protein [Arabidopsis thaliana]
  misc_feature (51)..(344): Homolog of NCBI NO: 21554369 NR Description: palmitoyl-protein thioesterase precursor-like
  misc_feature (60)..(336): Homolog of NCBI NO: 15236077 NR Description: putative protein; protein id: At4g17470.1
  misc_feature (58)..(332): Homolog of NCBI NO: 15236079 NR Description: putative protein; protein id: At4g17483.1 thaliana] >gi|22136628|gb|AAM91633.1| unknown protein
SSIQSSRVTIQIPFPLRRTSREAVGAGREGEALAPSLPRTPMDPPRAVAFLLILLPVLAPVASGVPFVVLHGIGDECGNDGLSSFTKMLGEWSGSKGYCIEIGRGAWDSWLMPLQEQANTVCKKVKKMKELSEGYNIVGLSQGNLIGRAVIEYCDCGPPVKNFISIGGPHAGTASVPLCGSGFLCILIDDLIKSEIYSDYVQAHLAPSGYLKIPTDMEDYLKGCKFLPKLNNEIPSARNTTYKERFSSLENLVLIMFEDDAVLIPRETAWFGYYPDGAFSPVLPPQETKLYTEDWIGLKTLDEAGRVKFVSVPGGHLRITRSDMKKYIVPYLTPEASSKKNIHIHRMLSL

SEQ ID NO: 12246 - protein, 309 aa, Zea mays subsp. mays
  peptide (1)..(309): Ceres Seq. ID no. 12411595
  misc_feature (21)..(273): Pfam Name: Palmitoyl protein thioesterase Pfam Description: Palmitoyl protein thioesterase
  misc_feature (7)..(273): Homolog of NCBI NO: 37536884 NR Description: putative palmitoyl-protein thioesterase [Oryza
  misc_feature (1)..(300): Homolog of NCBI NO: 15232301 NR Description: palmitoyl-protein thioesterase precursor - like; id: At3g60340.1, supported by cDNA: 38539., supported by cDNA:
  misc_feature (1)..(300): Homolog of NCBI NO: 14334718 NR Description: putative palmitoyl-protein thioesterase precursor
  misc_feature (1)..(300): Homolog of NCBI NO: 21593393 NR Description: palmitoyl-protein thioesterase precursor-like
  misc_feature (7)..(302): Homolog of NCBI NO: 15238063 NR Description: palmitoyl-protein thioesterase precursor-like;
  misc_feature (7)..(302): Homolog of NCBI NO: 28393539 NR Description: putative palmitoyl-protein thioesterase precursor
  misc_feature (10)..(303): Homolog of NCBI NO: 15236078 NR Description: putative protein; protein id: At4g17480.1, by cDNA: 253398. [Arabidopsis thaliana] unknown protein [Arabidopsis thaliana]
  misc_feature (10)..(303): Homolog of NCBI NO: 21554369 NR Description: palmitoyl-protein thioesterase precursor-like
  misc_feature (19)..(295): Homolog of NCBI NO: 15236077 NR Description: putative protein; protein id: At4g17470.1
  misc_feature (17)..(291): Homolog of NCBI NO: 15236079 NR Description: putative protein; protein id: At4g17483.1 thaliana] >gi|22136628|gb|AAM91633.1| unknown protein
MDPPRAVAFLLILLPVLAPVASGVPFVVLHGIGDECGNDGLSSFTKMLGEWSGSKGYCIEIGRGAWDSWLMPLQEQANTVCKKVKKMKELSEGYNIVGLSQGNLIGRAVIEYCDCGPPVKNFISIGGPHAGTASVPLCGSGFLCILIDDLIKSEIYSDYVQAHLAPSGYLKIPTDMEDYLKGCKFLPKLNNEIPSARNTTYKERFSSLENLVLIMFEDDAVLIPRETAWFGYYPDGAFSPVLPPQETKLYTEDWIGLKTLDEAGRVKFVSVPGGHLRITRSDMKKYIVPYLTPEASSKKNIHIHRMLSL

SEQ ID NO: 12247 - protein, 263 aa, Zea mays subsp. mays
  peptide (1)..(263): Ceres Seq. ID no. 12411596
  misc_feature (1)..(227): Pfam Name: Palmitoyl protein thioesterase Pfam Description: Palmitoyl protein thioesterase
  misc_feature (1)..(227): Homolog of NCBI NO: 37536884 NR Description: putative palmitoyl-protein thioesterase [Oryza
  misc_feature (1)..(254): Homolog of NCBI NO: 15232301 NR Description: palmitoyl-protein thioesterase precursor - like; id: At3g60340.1, supported by cDNA: 38539., supported by cDNA:
  misc_feature (1)..(254): Homolog of NCBI NO: 14334718 NR Description: putative palmitoyl-protein thioesterase precursor
  misc_feature (1)..(254): Homolog of NCBI NO: 21593393 NR Description: palmitoyl-protein thioesterase precursor-like
  misc_feature (1)..(256): Homolog of NCBI NO: 15238063 NR Description: palmitoyl-protein thioesterase precursor-like;
  misc_feature (1)..(256): Homolog of NCBI NO: 28393539 NR Description: putative palmitoyl-protein thioesterase precursor
  misc_feature (1)..(257): Homolog of NCBI NO: 15236078 NR Description: putative protein; protein id: At4g17480.1, by cDNA: 253398. [Arabidopsis thaliana] unknown protein [Arabidopsis thaliana]
  misc_feature (1)..(257): Homolog of NCBI NO: 21554369 NR Description: palmitoyl-protein thioesterase precursor-like
  misc_feature (1)..(249): Homolog of NCBI NO: 15236077 NR Description: putative protein; protein id: At4g17470.1
  misc_feature (1)..(245): Homolog of NCBI NO: 15236079 NR Description: putative protein; protein id: At4g17483.1 thaliana] >gi|22136628|gb|AAM91633.1| unknown protein
MLGEWSGSKGYCIEIGRGAWDSWLMPLQEQANTVCKKVKKMKELSEGYNIVGLSQGNLIGRAVIEYCDCGPPVKNFISIGGPHAGTASVPLCGSGFLCILIDDLIKSEIYSDYVQAHLAPSGYLKIPTDMEDYLKGCKFLPKLNNEIPSARNTTYKERFSSLENLVLIMFEDDAVLIPRETAWFGYYPDGAFSPVLPPQETKLYTEDWIGLKTLDEAGRVKFVSVPGGHLRITRSDMKKYIVPYLTPEASSKKNIHIHRMLSL

SEQ ID NO: 12248 - DNA, 1666 bp, Zea mays subsp. mays
  misc_feature (1)..(1666): Ceres Seq. ID no. 12341194
  misc_feature: MA Experiment ID: 108504 Result: Up-regulated in Transcription
  misc_feature: MA Experiment 108504 PARAMETER Experiment Name: Zm_Drought_P Parameter: Age (day) Value: 8
  misc_feature: MA Experiment 108504 PARAMETER Experiment Name: Zm_Drought_P Parameter: Organism Value: Zea mays
  misc_feature: MA Experiment 108504 PARAMETER Experiment Name: Zm_Drought_P Parameter: Plant Line Value: 35A19
  misc_feature: MA Experiment 108504 PARAMETER Experiment Name: Zm_Drought_P Parameter: Timepoint (hr) Value: 12
  misc_feature: MA Experiment 108504 PARAMETER Experiment Name: Zm_Drought_P Parameter: Tissue Value: Aerial
  misc_feature: MA Experiment 108504 PARAMETER Experiment Name: Zm_Drought_P Parameter: Treatment Value: Drought vs. No Drought
  misc_feature: MA Experiment ID: 108523 Result: Down-regulated in Transcription
  misc_feature: MA Experiment 108523 PARAMETER Experiment Name: Zm_42deg_Heat_P Parameter: Age (day) Value: 8
  misc_feature: MA Experiment 108523 PARAMETER Experiment Name: Zm_42deg_Heat_P Parameter: Organism Value: Zea mays
  misc_feature: MA Experiment 108523 PARAMETER Experiment Name: Zm_42deg_Heat_P Parameter: Plant Line Value: 35A19
  misc_feature: MA Experiment 108523 PARAMETER Experiment Name: Zm_42deg_Heat_P Parameter: Temperature (deg C) Value: 42 vs. 22
  misc_feature: MA Experiment 108523 PARAMETER Experiment Name: Zm_42deg_Heat_P Parameter: Timepoint (hr) Value: 6
  misc_feature: MA Experiment 108523 PARAMETER Experiment Name: Zm_42deg_Heat_P Parameter: Tissue Value: Aerial
  misc_feature: MA Experiment ID: 108529 Result: Up-regulated in Transcription
  misc_feature: MA Experiment 108529 PARAMETER Experiment Name: Zm_Imbibed_Seeds_P Parameter: Age (day) Value: 5 vs. 2
  misc_feature: MA Experiment 108529 PARAMETER Experiment Name: Zm_Imbibed_Seeds_P Parameter: Organism Value: Zea mays
  misc_feature: MA Experiment 108529 PARAMETER Experiment Name: Zm_Imbibed_Seeds_P Parameter: Plant Line Value: 35A19
  misc_feature: MA Experiment 108529 PARAMETER Experiment Name: Zm_Imbibed_Seeds_P Parameter: Tissue Value: Roots vs. Embryo
  misc_feature: MA Experiment ID: 108530 Result: Up-regulated in Transcription
  misc_feature: MA Experiment 108530 PARAMETER Experiment Name: Zm_Imbibed_Seeds_P Parameter: Age (day) Value: 6 vs. 2
  misc_feature: MA Experiment 108530 PARAMETER Experiment Name: Zm_Imbibed_Seeds_P Parameter: Organism Value: Zea mays
  misc_feature: MA Experiment 108530 PARAMETER Experiment Name: Zm_Imbibed_Seeds_P Parameter: Plant Line Value: 35A19
  misc_feature: MA Experiment 108530 PARAMETER Experiment Name: Zm_Imbibed_Seeds_P Parameter: Tissue Value: Aerial vs. Embryo
  misc_feature: MA Experiment ID: 108535 Result: Down-regulated in Transcription
  misc_feature: MA Experiment 108535 PARAMETER Experiment Name: Zm_Meristem_P Parameter: Age (day) Value: 8
  misc_feature: MA Experiment 108535 PARAMETER Experiment Name: Zm_Meristem_P Parameter: Organism Value: Zea mays
  misc_feature: MA Experiment 108535 PARAMETER Experiment Name: Zm_Meristem_P Parameter: Plant Line Value: 35A19
  misc_feature: MA Experiment 108535 PARAMETER Experiment Name: Zm_Meristem_P Parameter: Tissue Value: Root Meristem vs. Above Root Meristem
  misc_feature: MA Experiment ID: 108545 Result: Up-regulated in Transcription
  misc_feature: MA Experiment 108545 PARAMETER Experiment Name: Zm_Imbibed_Seeds_P Parameter: Age (day) Value: 3 vs. 2
  misc_feature: MA Experiment 108545 PARAMETER Experiment Name: Zm_Imbibed_Seeds_P Parameter: Organism Value: Zea mays
  misc_feature: MA Experiment 108545 PARAMETER Experiment Name: Zm_Imbibed_Seeds_P Parameter: Plant Line Value: 35A19
  misc_feature: MA Experiment 108545 PARAMETER Experiment Name: Zm_Imbibed_Seeds_P Parameter: Tissue Value: Aerial vs. Embryo
  misc_feature: MA Experiment ID: 108547 Result: Up-regulated in Transcription
  misc_feature: MA Experiment 108547 PARAMETER Experiment Name: Zm_Imbibed_Seeds_P Parameter: Age (day) Value: 4 vs. 2
  misc_feature: MA Experiment 108547 PARAMETER Experiment Name: Zm_Imbibed_Seeds_P Parameter: Organism Value: Zea mays
  misc_feature: MA Experiment 108547 PARAMETER Experiment Name: Zm_Imbibed_Seeds_P Parameter: Plant Line Value: 35A19
  misc_feature: MA Experiment 108547 PARAMETER Experiment Name: Zm_Imbibed_Seeds_P Parameter: Tissue Value: Aerial vs. Embryo
  misc_feature: MA Experiment ID: 108559 Result: Down-regulated in Transcription
  misc_feature: MA Experiment 108559 PARAMETER Experiment Name: Zm_5mM_NO_P Parameter: Age (day) Value: 8
  misc_feature: MA Experiment 108559 PARAMETER Experiment Name: Zm_5mM_NO_P Parameter: Organism Value: Zea mays
  misc_feature: MA Experiment 108559 PARAMETER Experiment Name: Zm_5mM_NO_P Parameter: Plant Line Value: 35A19
  misc_feature: MA Experiment 108559 PARAMETER Experiment Name: Zm_5mM_NO_P Parameter: Timepoint (hr) Value: 12
  misc_feature: MA Experiment 108559 PARAMETER Experiment Name: Zm_5mM_NO_P Parameter: Tissue Value: Aerial
  misc_feature: MA Experiment 108559 PARAMETER Experiment Name: Zm_5mM_NO_P Parameter: Treatment Value: 5mM NO vs. No Treatment
  misc_feature: MA Experiment ID: 108688 Result: Down-regulated in Transcription
  misc_feature: MA Experiment 108688 PARAMETER Experiment Name: Zm_Embryos-Flowers__P Parameter: Tissue Value: Immature Flowers vs. Aerial+
gtccatccccgtcgccagcatcgcttccacttcggtctcagcgacggtcgccaccaccgctcccctccctctccccctcctcgcccagcggcaattaccacagcctccccagcaagccgggatggctgcactcaaggcatcgttccggggtgagctcagcgccgcttccttcctcgactccagcaggggacctctcgtccagcacaaagtggattttacgtttcaaaggaagggcaaacgagctatttcactgagaaggacatgctgttctatgcaacaggctccaccaccagcatggcctgggcgagctgttgctgagcctggccggaggtcatgggatggcccaaagcctatctcgattgttggttcaactggttccataggaacacagacattggacattgttgcggagaatcctgataagttcagagttgttgctcttgctgctggatccaatgtcacgcttctagctgatcaggtcaaaacattcaaacctaagttggttgctgtaagaaacgaatcattagttgatgaattgaaagaagccttggctgattgcgaagagaagccagaaattattcctggggagcaaggtgtcatagaagttgctcgccatccagatgcagttacagttgtcacagggatagtaggttgtgcagggctgaagcctacagttgctgcaattgaagctggtaaagacatagcattggcaaacaaagagacacttattgcaggtggtccttttgtgcttccccttgcacacaaacacaaagtgaaaattcttccagctgattctgagcactctgcaatatttcagtgtatacaaggcttgtccgaaggtgcacttcgtcgcattattctaactgcatcaggtggtgctttcagggactggccagttgacaggctgaaagatgtaaaagttgctgacgctttaaagcatccaaactggaatatgggaaggaagatcacagtagattctgctactttattcaacaagggtttagaagttattgaagcacattatttatttggtgctgaatatgatgacattgagattgtgattcacccacagtctatcatacactctatggttgaaacccaggattcatctgtcctagctcagttgggatggccagatatgcggttaccaatcttatacaccttatcatggccagatagaatctattgctctgaggtcacctggccccgtctggatctttgcaagttgggttcactgacattcagagctccagacaacgtaaaatacccatcaatggacctagcctatgcagctggccgcgctgggggcaccatgacaggagtcctgagcgctgctaatgagaaggccgtggagttgttcattgacgagaagattagctacctggacatattcaaggtggtggagcttacatgtaacgcgcatcggaacgagctggtaacaagcccgtcactggaggagatcgtccattacgatctgtgggcgaggagatatgcagccagtctacaaccatcttctggcctgagccctgtccctgcataataggtcgtcacgacaacgttgtacagcaggagttctaagatatgatgtgtttgtggctcctgtttccatgttcaattttcaggcctccacatgaataaaatgcatctattccatgtgatttctttt

SEQ ID NO: 12249 - protein, 512 aa, Zea mays subsp. mays
  peptide (1)..(512): Ceres Seq. ID no. 12341195
  misc_feature (118)..(498): Pfam Name: 1-deoxy-D-xylulose 5-phosphate reductoisomerase Pfam Description: 1-deoxy-D-xylulose 5-phosphate reductoisomerase
  misc_feature (41)..(512): Homolog of NCBI NO: 15241970 NR Description: 1-deoxy-D-xylulose 5-phosphate reductoisomerase protein id: At5g62790.1, supported by cDNA: 117626., supported by
  misc_feature (43)..(509): Homolog of NCBI NO: 7621710 NR Description: 1-deoxy-D-xylulose-5-phosphate reductoisomerase
  misc_feature (56)..(510): Homolog of NCBI NO: 22797429 NR Description: 1-deoxy-D-xylulose 5-phosphate reductoisomerase
  misc_feature (41)..(512): Homolog of NCBI NO: 9801280 NR Description: putative 1-deoxy-D-xylulose 5-phosphate
  misc_feature (43)..(512): Homolog of NCBI NO: 34996397 NR Description: putative 1-deoxy-D-xylulose 5-phosphate
  misc_feature (43)..(509): Homolog of NCBI NO: 15679908 NR Description: 1-deoxy-D-xylulose-5-phosphate reductoisomerase
  misc_feature (43)..(511): Homolog of NCBI NO: 17225989 NR Description: 1-deoxy-D-xylulose 5-phosphate reductoisomerase
  misc_feature (51)..(509): Homolog of NCBI NO: 9800656 NR Description: 1-deoxy-D-xylulose-5-phosphate reductoisomerase
  misc_feature (109)..(512): Homolog of NCBI NO: 25323805 NR Description: 1-deoxy-d-xylulose-5-phosphate reductoisomerase
  misc_feature (51)..(509): Homolog of NCBI NO: 8134417 NR Description: 1-deoxy-D-xylulose 5-phosphate reductoisomerase,
SIPVASIASTSVSATVATTAPLPLPLLAQRQLPQPPQQAGMAALKASFRGELSAASFLDSSRGPLVQHKVDFTFQRKGKRAISLRRTCCSMQQAPPPAWPGRAVAEPGRRSWDGPKPISIVGSTGSIGTQTLDIVAENPDKFRVVALAAGSNVTLLADQVKTFKPKLVAVRNESLVDELKEALADCEEKPEIIPGEQGVIEVARHPDAVTVVTGIVGCAGLKPTVAAIEAGKDIALANKETLIAGGPFVLPLAHKHKVKILPADSEHSAIFQCIQGLSEGALRRIILTASGGAFRDWPVDRLKDVKVADALKHPNWNMGRKITVDSATLFNKGLEVIEAHYLFGAEYDDIEIVIHPQSIIHSMVETQDSSVLAQLGWPDMRLPILYTLSWPDRIYCSEVTWPRLDLCKLGSLTFRAPDNVKYPSMDLAYAAGRAGGTMTGVLSAANEKAVELFIDEKISYLDIFKVVELTCNAHRNELVTSPSLEEIVHYDLWARRYAASLQPSSGLSPVPA

SEQ ID NO: 12250 - protein, 472 aa, Zea mays subsp. mays
  peptide (1)..(472): Ceres Seq. ID no. 12341196
  misc_feature (78)..(458): Pfam Name: 1-deoxy-D-xylulose 5-phosphate reductoisomerase Pfam Description: 1-deoxy-D-xylulose 5-phosphate reductoisomerase
  misc_feature (1)..(472): Homolog of NCBI NO: 9801280 NR Description: putative 1-deoxy-D-xylulose 5-phosphate
  misc_feature (3)..(471): Homolog of NCBI NO: 17225989 NR Description: 1-deoxy-D-xylulose 5-phosphate reductoisomerase
  misc_feature (3)..(472): Homolog of NCBI NO: 34996397 NR Description: putative 1-deoxy-D-xylulose 5-phosphate
  misc_feature (3)..(469): Homolog of NCBI NO: 15679908 NR Description: 1-deoxy-D-xylulose-5-phosphate reductoisomerase
  misc_feature (1)..(472): Homolog of NCBI NO: 15241970 NR Description: 1-deoxy-D-xylulose 5-phosphate reductoisomerase protein id: At5g62790.1, supported by cDNA: 117626., supported by
  misc_feature (3)..(469): Homolog of NCBI NO: 7621710 NR Description: 1-deoxy-D-xylulose-5-phosphate reductoisomerase
  misc_feature (16)..(470): Homolog of NCBI NO: 22797429 NR Description: 1-deoxy-D-xylulose 5-phosphate reductoisomerase
  misc_feature (11)..(469): Homolog of NCBI NO: 9800656 NR Description: 1-deoxy-D-xylulose-5-phosphate reductoisomerase
  misc_feature (69)..(472): Homolog of NCBI NO: 25323805 NR Description: 1-deoxy-d-xylulose-5-phosphate reductoisomerase
  misc_feature (11)..(469): Homolog of NCBI NO: 8134417 NR Description: 1-deoxy-D-xylulose 5-phosphate reductoisomerase,
MAALKASFRGELSAASFLDSSRGPLVQHKVDFTFQRKGKRAISLRRTCCSMQQAPPPAWPGRAVAEPGRRSWDGPKPISIVGSTGSIGTQTLDIVAENPDKFRVVALAAGSNVTLLADQVKTFKPKLVAVRNESLVDELKEALADCEEKPEIIPGEQGVIEVARHPDAVTVVTGIVGCAGLKPTVAAIEAGKDIALANKETLIAGGPFVLPLAHKHKVKILPADSEHSAIFQCIQGLSEGALRRIILTASGGAFRDWPVDRLKDVKVADALKHPNWNMGRKITVDSATLFNKGLEVIEAHYLFGAEYDDIEIVIHPQSIIHSMVETQDSSVLAQLGWPDMRLPILYTLSWPDRIYCSEVTWPRLDLCKLGSLTFRAPDNVKYPSMDLAYAAGRAGGTMTGVLSAANEKAVELFIDEKISYLDIFKVVELTCNAHRNELVTSPSLEEIVHYDLWARRYAASLQPSSGLSPVPA

SEQ ID NO: 12251 - protein, 422 aa, Zea mays subsp. mays
  peptide (1)..(422): Ceres Seq. ID no. 12341197
  misc_feature (28)..(408): Pfam Name: 1-deoxy-D-xylulose 5-phosphate reductoisomerase Pfam Description: 1-deoxy-D-xylulose 5-phosphate reductoisomerase
  misc_feature (1)..(422): Homolog of NCBI NO: 9801280 NR Description: putative 1-deoxy-D-xylulose 5-phosphate
  misc_feature (1)..(421): Homolog of NCBI NO: 17225989 NR Description: 1-deoxy-D-xylulose 5-phosphate reductoisomerase
  misc_feature (1)..(422): Homolog of NCBI NO: 34996397 NR Description: putative 1-deoxy-D-xylulose 5-phosphate
  misc_feature (1)..(419): Homolog of NCBI NO: 15679908 NR Description: 1-deoxy-D-xylulose-5-phosphate reductoisomerase
  misc_feature (1)..(422): Homolog of NCBI NO: 15241970 NR Description: 1-deoxy-D-xylulose 5-phosphate reductoisomerase protein id: At5g62790.1, supported by cDNA: 117626., supported by
  misc_feature (1)..(419): Homolog of NCBI NO: 7621710 NR Description: 1-deoxy-D-xylulose-5-phosphate reductoisomerase
  misc_feature (1)..(420): Homolog of NCBI NO: 22797429 NR Description: 1-deoxy-D-xylulose 5-phosphate reductoisomerase
  misc_feature (1)..(419): Homolog of NCBI NO: 9800656 NR Description: 1-deoxy-D-xylulose-5-phosphate reductoisomerase
  misc_feature (19)..(422): Homolog of NCBI NO: 25323805 NR Description: 1-deoxy-d-xylulose-5-phosphate reductoisomerase
  misc_feature (1)..(419): Homolog of NCBI NO: 8134417 NR Description: 1-deoxy-D-xylulose 5-phosphate reductoisomerase,
MQQAPPPAWPGRAVAEPGRRSWDGPKPISIVGSTGSIGTQTLDIVAENPDKFRVVALAAGSNVTLLADQVKTFKPKLVAVRNESLVDELKEALADCEEKPEIIPGEQGVIEVARHPDAVTVVTGIVGCAGLKPTVAAIEAGKDIALANKETLIAGGPFVLPLAHKHKVKILPADSEHSAIFQCIQGLSEGALRRIILTASGGAFRDWPVDRLKDVKVADALKHPNWNMGRKITVDSATLFNKGLEVIEAHYLFGAEYDDIEIVIHPQSIIHSMVETQDSSVLAQLGWPDMRLPILYTLSWPDRIYCSEVTWPRLDLCKLGSLTFRAPDNVKYPSMDLAYAAGRAGGTMTGVLSAANEKAVELFIDEKISYLDIFKVVELTCNAHRNELVTSPSLEEIVHYDLWARRYAASLQPSSGLSPVPA

SEQ ID NO: 12252 - DNA, 1347 bp, Zea mays subsp. mays
  misc_feature (1)..(1347): Ceres Seq. ID no. 12411590
  misc_feature: MA Experiment ID: 108527 Result: Down-regulated in Transcription
  misc_feature: MA Experiment 108527 PARAMETER Experiment Name: Zm_5mM_NO_P Parameter: Age (day) Value: 8
  misc_feature: MA Experiment 108527 PARAMETER Experiment Name: Zm_5mM_NO_P Parameter: Organism Value: Zea mays
  misc_feature: MA Experiment 108527 PARAMETER Experiment Name: Zm_5mM_NO_P Parameter: Plant Line Value: 35A19
  misc_feature: MA Experiment 108527 PARAMETER Experiment Name: Zm_5mM_NO_P Parameter: Timepoint (hr) Value: 6
  misc_feature: MA Experiment 108527 PARAMETER Experiment Name: Zm_5mM_NO_P Parameter: Tissue Value: Aerial
  misc_feature: MA Experiment 108527 PARAMETER Experiment Name: Zm_5mM_NO_P Parameter: Treatment Value: 5mM NO vs. No Treatment
  misc_feature: MA Experiment ID: 108528 Result: Down-regulated in Transcription
  misc_feature: MA Experiment 108528 PARAMETER Experiment Name: Zm_Imbibed_Seeds_P Parameter: Age (day) Value: 5 vs. 2
  misc_feature: MA Experiment 108528 PARAMETER Experiment Name: Zm_Imbibed_Seeds_P Parameter: Organism Value: Zea mays
  misc_feature: MA Experiment 108528 PARAMETER Experiment Name: Zm_Imbibed_Seeds_P Parameter: Plant Line Value: 35A19
  misc_feature: MA Experiment 108528 PARAMETER Experiment Name: Zm_Imbibed_Seeds_P Parameter: Tissue Value: Aerial vs. Embryo
  misc_feature: MA Experiment ID: 108530 Result: Down-regulated in Transcription
  misc_feature: MA Experiment 108530 PARAMETER Experiment Name: Zm_Imbibed_Seeds_P Parameter: Age (day) Value: 6 vs. 2
  misc_feature: MA Experiment 108530 PARAMETER Experiment Name: Zm_Imbibed_Seeds_P Parameter: Organism Value: Zea mays
  misc_feature: MA Experiment 108530 PARAMETER Experiment Name: Zm_Imbibed_Seeds_P Parameter: Plant Line Value: 35A19
  misc_feature: MA Experiment 108530 PARAMETER Experiment Name: Zm_Imbibed_Seeds_P Parameter: Tissue Value: Aerial vs. Embryo
  misc_feature: MA Experiment ID: 108543 Result: Up-regulated in Transcription
  misc_feature: MA Experiment ID: 108545 Result: Down-regulated in Transcription
  misc_feature: MA Experiment 108545 PARAMETER Experiment Name: Zm_Imbibed_Seeds_P Parameter: Age (day) Value: 3 vs. 2
  misc_feature: MA Experiment 108545 PARAMETER Experiment Name: Zm_Imbibed_Seeds_P Parameter: Organism Value: Zea mays
  misc_feature: MA Experiment 108545 PARAMETER Experiment Name: Zm_Imbibed_Seeds_P Parameter: Plant Line Value: 35A19
  misc_feature: MA Experiment 108545 PARAMETER Experiment Name: Zm_Imbibed_Seeds_P Parameter: Tissue Value: Aerial vs. Embryo
  misc_feature: MA Experiment ID: 108546 Result: Up-regulated in Transcription
  misc_feature: MA Experiment 108546 PARAMETER Experiment Name: Zm_Imbibed_Seeds_P Parameter: Age (day) Value: 3 vs. 2
  misc_feature: MA Experiment 108546 PARAMETER Experiment Name: Zm_Imbibed_Seeds_P Parameter: Organism Value: Zea mays
  misc_feature: MA Experiment 108546 PARAMETER Experiment Name: Zm_Imbibed_Seeds_P Parameter: Plant Line Value: 35A19
  misc_feature: MA Experiment 108546 PARAMETER Experiment Name: Zm_Imbibed_Seeds_P Parameter: Tissue Value: Roots vs. Embryo
  misc_feature: MA Experiment ID: 108547 Result: Down-regulated in Transcription
  misc_feature: MA Experiment 108547 PARAMETER Experiment Name: Zm_Imbibed_Seeds_P Parameter: Age (day) Value: 4 vs. 2
  misc_feature: MA Experiment 108547 PARAMETER Experiment Name: Zm_Imbibed_Seeds_P Parameter: Organism Value: Zea mays
  misc_feature: MA Experiment 108547 PARAMETER Experiment Name: Zm_Imbibed_Seeds_P Parameter: Plant Line Value: 35A19
  misc_feature: MA Experiment 108547 PARAMETER Experiment Name: Zm_Imbibed_Seeds_P Parameter: Tissue Value: Aerial vs. Embryo
  misc_feature: MA Experiment ID: 108559 Result: Down-regulated in Transcription
  misc_feature: MA Experiment 108559 PARAMETER Experiment Name: Zm_5mM_NO_P Parameter: Age (day) Value: 8
  misc_feature: MA Experiment 108559 PARAMETER Experiment Name: Zm_5mM_NO_P Parameter: Organism Value: Zea mays
  misc_feature: MA Experiment 108559 PARAMETER Experiment Name: Zm_5mM_NO_P Parameter: Plant Line Value: 35A19
  misc_feature: MA Experiment 108559 PARAMETER Experiment Name: Zm_5mM_NO_P Parameter: Timepoint (hr) Value: 12
  misc_feature: MA Experiment 108559 PARAMETER Experiment Name: Zm_5mM_NO_P Parameter: Tissue Value: Aerial
  misc_feature: MA Experiment 108559 PARAMETER Experiment Name: Zm_5mM_NO_P Parameter: Treatment Value: 5mM NO vs. No Treatment
  misc_feature: MA Experiment ID: 20000478 Result: Down-regulated in Transcription
  misc_feature: MA Experiment 20000478 PARAMETER Experiment Name: Zm_5mM_SA_P Parameter: Age (day) Value: 11
  misc_feature: MA Experiment 20000478 PARAMETER Experiment Name: Zm_5mM_SA_P Parameter: Organism Value: Zea mays
  misc_feature: MA Experiment 20000478 PARAMETER Experiment Name: Zm_5mM_SA_P Parameter: Plant Line Value: 35A19
  misc_feature: MA Experiment 20000478 PARAMETER Experiment Name: Zm_5mM_SA_P Parameter: Timepoint (hr) Value: 72
  misc_feature: MA Experiment 20000478 PARAMETER Experiment Name: Zm_5mM_SA_P Parameter: Tissue Value: Aerial
  misc_feature: MA Experiment 20000478 PARAMETER Experiment Name: Zm_5mM_SA_P Parameter: Treatment Value: 5mM SA vs. No Treatment
  misc_feature: MA Experiment ID: 20000479 Result: Down-regulated in Transcription
  misc_feature: MA Experiment 20000479 PARAMETER Experiment Name: Zm_Drought_P Parameter: Age (day) Value: 10
  misc_feature: MA Experiment 20000479 PARAMETER Experiment Name: Zm_Drought_P Parameter: Organism Value: Zea mays
  misc_feature: MA Experiment 20000479 PARAMETER Experiment Name: Zm_Drought_P Parameter: Plant Line Value: 35A19
  misc_feature: MA Experiment 20000479 PARAMETER Experiment Name: Zm_Drought_P Parameter: Timepoint (hr) Value: 48
  misc_feature: MA Experiment 20000479 PARAMETER Experiment Name: Zm_Drought_P Parameter: Tissue Value: Aerial
  misc_feature: MA Experiment 20000479 PARAMETER Experiment Name: Zm_Drought_P Parameter: Treatment Value: Drought vs. No Drought
  misc_feature: MA Experiment ID: 20000480 Result: Down-regulated in Transcription
  misc_feature: MA Experiment 20000480 PARAMETER Experiment Name: Zm_Drought_P Parameter: Age (day) Value: 11
  misc_feature: MA Experiment 20000480 PARAMETER Experiment Name: Zm_Drought_P Parameter: Organism Value: Zea mays
  misc_feature: MA Experiment 20000480 PARAMETER Experiment Name: Zm_Drought_P Parameter: Plant Line Value: 35A19
  misc_feature: MA Experiment 20000480 PARAMETER Experiment Name: Zm_Drought_P Parameter: Timepoint (hr) Value: 72
  misc_feature: MA Experiment 20000480 PARAMETER Experiment Name: Zm_Drought_P Parameter: Tissue Value: Aerial
  misc_feature: MA Experiment 20000480 PARAMETER Experiment Name: Zm_Drought_P Parameter: Treatment Value: Drought vs. No Drought
  misc_feature: MA Experiment ID: 20000492 Result: Down-regulated in Transcription
  misc_feature: MA Experiment 20000492 PARAMETER Experiment Name: Zm_Hybrid_Seed_Dev_P Parameter: DAP Value: 12
  misc_feature: MA Experiment 20000492 PARAMETER Experiment Name: Zm_Hybrid_Seed_Dev_P Parameter: Organism Value: Zea mays
  misc_feature: MA Experiment 20000492 PARAMETER Experiment Name: Zm_Hybrid_Seed_Dev_P Parameter: Plant Line Value: 35A19
  misc_feature: MA Experiment 20000492 PARAMETER Experiment Name: Zm_Hybrid_Seed_Dev_P Parameter: Tissue Value: Fert Kernel vs. Unfert Floret
  misc_feature: MA Experiment ID: 20000535 Result: Down-regulated in Transcription
  misc_feature: MA Experiment 20000535 PARAMETER Experiment Name: Zm_Hybrid_Seed_Dev_P Parameter: DAP Value: 30 vs. 12
  misc_feature: MA Experiment 20000535 PARAMETER Experiment Name: Zm_Hybrid_Seed_Dev_P Parameter: Organism Value: Zea mays
  misc_feature: MA Experiment 20000535 PARAMETER Experiment Name: Zm_Hybrid_Seed_Dev_P Parameter: Plant Line Value: 35A19
  misc_feature: MA Experiment 20000535 PARAMETER Experiment Name: Zm_Hybrid_Seed_Dev_P Parameter: Tissue Value: Embryo vs. Unfert Floret
  misc_feature: MA Experiment ID: 20001614 Result: Up-regulated in Transcription
  misc_feature: MA Experiment 20001614 PARAMETER Experiment Name: Zm_50ppm_KNO3_L-to-H_P Parameter: Age (day) Value: 21
  misc_feature: MA Experiment 20001614 PARAMETER Experiment Name: Zm_50ppm_KNO3_L-to-H_P Parameter: Organism Value: Zea mays
  misc_feature: MA Experiment 20001614 PARAMETER Experiment Name: Zm_50ppm_KNO3_L-to-H_P Parameter: Plant Line Value: 35A19
  misc_feature: MA Experiment 20001614 PARAMETER Experiment Name: Zm_50ppm_KNO3_L-to-H_P Parameter: Timepoint (hr) Value: 48
  misc_feature: MA Experiment 20001614 PARAMETER Experiment Name: Zm_50ppm_KNO3_L-to-H_P Parameter: Tissue Value: Roots
  misc_feature: MA Experiment 20001614 PARAMETER Experiment Name: Zm_50ppm_KNO3_L-to-H_P Parameter: Treatment Value: 50ppm KNO3 vs. 50ppm KCl
atcatagtgcctgttcctgagccagcagcatctgtctcttgcttcatcagctaggcgcccggccgcgcggaccaggctccaggagaccaaaaatgaagctctcggtggcagtcctctgcgcgcttctggctgtccaggcggcggtgctcctcgccaccgtgccgacgtcgcaggccagcgagctggaggtcgggtactacagcaagaaatgcaagggcgtggagaacgtggtgaagtggcacgtgatcaaggcgctcaaggccagccgccgcaccggcgccgctctcgtccgccttctcttccatgactgcttcgtcaggggatgcgatggttctgtcctcctggacgcttcctacgacaaccctcatccggagaaggaggcgccggtgaacatcggcctcgccgccttcgacctcctggaggagatcaaggccgctgtcgagaagaggtgccccggcgtcgtctcctgctcggacatcctcatctacgcggcccgcgacgcggccagcgtcctcagcaacggccacgtccacttcgccgtccccgccggccgcctggacggcttcgtctccaaggccgaggaggcccaggcggagctcccggactccaaccaagacgtgcagcagctcatcgacaacttcgccaggaagaacttcacggtggaggagctcgtcatcctcaccggggcgcactccatcggccagggccactgctcgtccttcaccggccgcctctccgagccatcgcagcagatcaccccggcgtaccgcgacctgctcaactacaagtgctcccaggggtccaacccgcccgtggacaacaacgtccgcgacgaggactacgacgtggtggcgaggttcatgccggggttcaccagccgggtgcgcaagatccccgacttcctggacaactccttctaccacaacaacctggccaagatcgtcaccttccactccgactggacgctgctcacgcacaaggaggcgttcggccacgtcgtggagtacgccgagaacgccacgctatgggacgaggacttctcggactcgctgctcaagctcagcaagctgcccatgcccaaaggaagcaagggagagatcaggaagaagtgcagcgtcgttaaccaccgcttatactaagcctgccagatgccgtggaaatcgaagaaagaggtcgtgccagcacaacacatatatatcaaccatcggagatcagaaagccataaggttgcgcttttttgtttcatccattcttttgattatcattcgtttgtgctacactcatctttttgtgtatttctcatgcatatctgtcaaactgcaataaaactttgttcctgatatgtgc

SEQ ID NO: 12253 - protein, 348 aa, Zea mays subsp. mays
  peptide (1)..(348): Ceres Seq. ID no. 12411591
  misc_feature (47)..(308): Pfam Name: Peroxidase Pfam Description: Peroxidase
  misc_feature (1)..(348): Homolog of NCBI NO: 34894404 NR Description: putative peroxidase [Oryza sativa (japonica >gi|9909174|dbj|BAB12033.1| putative peroxidase [Oryza sativa
  misc_feature (1)..(346): Homolog of NCBI NO: 34894394 NR Description: putative peroxidase [Oryza sativa (japonica >gi|9909169|dbj|BAB12028.1| putative peroxidase [Oryza sativa
  misc_feature (1)..(345): Homolog of NCBI NO: 34894402 NR Description: putative peroxidase [Oryza sativa (japonica >gi|9909173|dbj|BAB12032.1| putative peroxidase [Oryza sativa
  misc_feature (11)..(344): Homolog of NCBI NO: 34894398 NR Description: putative peroxidase [Oryza sativa (japonica >gi|9909171|dbj|BAB12030.1| putative peroxidase [Oryza sativa
  misc_feature (10)..(248): Homolog of NCBI NO: 27261094 NR Description: putative peroxidase [Oryza sativa (japonica
  misc_feature (268)..(344): Homolog of NCBI NO: 27261094 NR Description: putative peroxidase [Oryza sativa (japonica
  misc_feature (2)..(345): Homolog of NCBI NO: 34896944 NR Description: putative peroxidase [Oryza sativa]
  misc_feature (16)..(345): Homolog of NCBI NO: 12056450 NR Description: peroxidase [Zea mays]
  misc_feature (24)..(344): Homolog of NCBI NO: 27261097 NR Description: putative peroxidase [Oryza sativa (japonica
  misc_feature (24)..(249): Homolog of NCBI NO: 27261088 NR Description: putative peroxidase [Oryza sativa (japonica
MKLSVAVLCALLAVQAAVLLATVPTSQASELEVGYYSKKCKGVENVVKWHVIKALKASRRTGAALVRLLFHDCFVRGCDGSVLLDASYDNPHPEKEAPVNIGLAAFDLLEEIKAAVEKRCPGVVSCSDILIYAARDAASVLSNGHVHFAVPAGRLDGFVSKAEEAQAELPDSNQDVQQLIDNFARKNFTVEELVILTGAHSIGQGHCSSFTGRLSEPSQQITPAYRDLLNYKCSQGSNPPVDNNVRDEDYDVVARFMPGFTSRVRKIPDFLDNSFYHNNLAKIVTFHSDWTLLTHKEAFGHVVEYAENATLWDEDFSDSLLKLSKLPMPKGSKGEIRKKCSVVNHRLY

SEQ ID NO: 12254 - protein, 266 aa, Zea mays subsp. mays
  peptide (1)..(266): Ceres Seq. ID no. 12411592
MRWFCPPGRFLRQPSSGEGGAGEHRPRRLRPPGGDQGRCREEVPRRRLLLGHPHLRGPRRGQRPQQRPRPLRRPRRPPGRLRLQGRGGPGGAPGLQPRRAAAHRQLRQEELHGGGARHPHRGALHRPGPLLVLHRPPLRAIAADHPGVPRPAQLQVLPGVQPARGQQRPRRGLRRGGEVHAGVHQPGAQDPRLPGQLLLPQQPGQDRHLPLRLDAAHAQGGVRPRRGVRRERHAMGRGLLGLAAQAQQAAHAQRKQGRDQEEVQRR

SEQ ID NO: 12255 - DNA, 1620 bp, Zea mays subsp. mays
  misc_feature (1)..(1620): Ceres Seq. ID no. 12351756
  misc_feature: MA Experiment ID: 108522 Result: Up-regulated in Transcription
  misc_feature: MA Experiment 108522 PARAMETER Experiment Name: Zm_42deg_Heat_P Parameter: Age (day) Value: 8
  misc_feature: MA Experiment 108522 PARAMETER Experiment Name: Zm_42deg_Heat_P Parameter: Organism Value: Zea mays
  misc_feature: MA Experiment 108522 PARAMETER Experiment Name: Zm_42deg_Heat_P Parameter: Plant Line Value: 35A19
  misc_feature: MA Experiment 108522 PARAMETER Experiment Name: Zm_42deg_Heat_P Parameter: Temperature (deg C) Value: 42 vs. 22
  misc_feature: MA Experiment 108522 PARAMETER Experiment Name: Zm_42deg_Heat_P Parameter: Timepoint (hr) Value: 1
  misc_feature: MA Experiment 108522 PARAMETER Experiment Name: Zm_42deg_Heat_P Parameter: Tissue Value: Aerial
  misc_feature: MA Experiment ID: 108523 Result: Up-regulated in Transcription
  misc_feature: MA Experiment 108523 PARAMETER Experiment Name: Zm_42deg_Heat_P Parameter: Age (day) Value: 8
  misc_feature: MA Experiment 108523 PARAMETER Experiment Name: Zm_42deg_Heat_P Parameter: Organism Value: Zea mays
  misc_feature: MA Experiment 108523 PARAMETER Experiment Name: Zm_42deg_Heat_P Parameter: Plant Line Value: 35A19
  misc_feature: MA Experiment 108523 PARAMETER Experiment Name: Zm_42deg_Heat_P Parameter: Temperature (deg C) Value: 42 vs. 22
  misc_feature: MA Experiment 108523 PARAMETER Experiment Name: Zm_42deg_Heat_P Parameter: Timepoint (hr) Value: 6
  misc_feature: MA Experiment 108523 PARAMETER Experiment Name: Zm_42deg_Heat_P Parameter: Tissue Value: Aerial
  misc_feature: MA Experiment ID: 20000480 Result: Up-regulated in Transcription
  misc_feature: MA Experiment 20000480 PARAMETER Experiment Name: Zm_Drought_P Parameter: Age (day) Value: 11
  misc_feature: MA Experiment 20000480 PARAMETER Experiment Name: Zm_Drought_P Parameter: Organism Value: Zea mays
  misc_feature: MA Experiment 20000480 PARAMETER Experiment Name: Zm_Drought_P Parameter: Plant Line Value: 35A19
  misc_feature: MA Experiment 20000480 PARAMETER Experiment Name: Zm_Drought_P Parameter: Timepoint (hr) Value: 72
  misc_feature: MA Experiment 20000480 PARAMETER Experiment Name: Zm_Drought_P Parameter: Tissue Value: Aerial
  misc_feature: MA Experiment 20000480 PARAMETER Experiment Name: Zm_Drought_P Parameter: Treatment Value: Drought vs. No Drought
ctagactgtagcccttaatcgaaaccgtccccaacccttcttcctccacgctctcgtctccgccgcgctaggaacttccaactcccaagcccagccgcctgcctagggttaaggtcgcccctccgccccctcgctccgctcgtgaccggcagggttcgtcgccgccgttggatatgtcgcggacgctggtgcagccggtggggcagaagcgcctcaccaacgtggctgtggtgcggctgcgcaagcacggccagcgcttcgagatcgcctgcttcccaaacaaggtgctctcgtggcgctcccgcgtcgagaaggacatcgacgaggtgctccagtcccacaccgtctactccaacgtctccaagggcatcctcgccaactccaaggaactcgccaaggccttcggcaccgacgaccttacccaaatctgcatcgagattctggagaaaggggaactccaggtctccggcaaggagagggaggcgcagctctccagccagttccgcgacatcgcaactattgtcatggagaagaccatcaacccagagacccgccgcccctacaccatcaccatgatcgagcgcctcatgcacgagatacacttcgccgtcgacccaaacctcacctccaaggaacaggctctaaaagttatcaagaagctcacagagcatttccccataaagcgtgcaccgctaagggtgcggttcactgcaccaaaacccaattttccaggccttacggagaagattggcggatggaatgctaccataatttcaaaggatgaattgagcactcagccttctattgtatgcgagatcgagccatctcttctgcgctcatgtgaggagcggttgaaggatgtccaagggagggtcgaagtgctgtctgtctccacgcacgtagaaagtggcccatctgtggaacaacacaacagtgtggaagtgccacacgcggctcctgtaaaggaacctgatgctgttgctcagataagtgagaccatgcagaaacagagcatttctactgaaagccagggcaatgcacaaggcaagcaacagagaaggtgcaaggagtgtgatgtactcgtggaggacaagctttacagagagcactgcaagagtgggtggcacaaacacaactacacacgccacaagaatgggctcccgcctctcagccaagaggagtgtatggtggagatggaattggccgactccaagaaagaccttaaagactacgatttctgatgaggttacctggaagttcctttgacatgctatcttgtatttgggcactaatgttgtctgtctaatgcttttctaccacccaatcttatccaggatggttaacaaggggtgcacagggcatgaagttgtttccaatccgtttttattttaacgaggaagtgaggagtgaggcacatggtcgttttctgatgctgtataggaattattagaatgagatggtttagccacatctttgaactgagggtagaacctgtctgtctgtggattgctttggctttgtatcgtggacgagtgaacttggtagtggcattccaaattcgacattctatgcgggctagaaacttcgcttgttttaatacttatcggcatcctttctttt

SEQ ID NO: 12256 - protein, 355 aa, Zea mays subsp. mays
  peptide (1)..(355): Ceres Seq. ID no. 12351757
  misc_feature (6)..(244): Pfam Name: Uncharacterized protein family UPF0023 Pfam Description: Uncharacterized protein family UPF0023
  misc_feature (1)..(355): Homolog of NCBI NO: 21554225 NR Description: unknown [Arabidopsis thaliana]
  misc_feature (1)..(355): Homolog of NCBI NO: 18401084 NR Description: expressed protein; protein id: At1g43860.1, by cDNA: 21241., supported by cDNA: gi_15450897 [Arabidopsis >gi|25405150|pir||E96502 hypothetical protein F28H19.11
  misc_feature (4)..(246): Homolog of NCBI NO: 23956138 NR Description: RIKEN cDNA 4733401P19 [Mus musculus]
  misc_feature (4)..(246): Homolog of NCBI NO: 27664348 NR Description: similar to RIKEN cDNA 4733401P19 [Mus musculus]
  misc_feature (4)..(246): Homolog of NCBI NO: 28416940 NR Description: Shwachman-Bodian-Diamond syndrome protein [Homo
  misc_feature (4)..(246): Homolog of NCBI NO: 4929663 NR Description: CGI-97 protein [Homo sapiens]
  misc_feature (22)..(246): Homolog of NCBI NO: 29476858 NR Description: Unknown (protein for MGC:56700) [Danio rerio]
  misc_feature (4)..(251): Homolog of NCBI NO: 28828466 NR Description: similar to Homo sapiens (Human). Hypothetical
  misc_feature (1)..(244): Homolog of NCBI NO: 39586134 NR Description: Hypothetical protein CBG15250 [Caenorhabditis
  misc_feature (5)..(183): Homolog of NCBI NO: 29248137 NR Description: GLP_217_44273_45028 [Giardia lamblia ATCC 50803]
MSRTLVQPVGQKRLTNVAVVRLRKHGQRFEIACFPNKVLSWRSRVEKDIDEVLQSHTVYSNVSKGILANSKELAKAFGTDDLTQICIEILEKGELQVSGKEREAQLSSQFRDIATIVMEKTINPETRRPYTITMIERLMHEIHFAVDPNLTSKEQALKVIKKLTEHFPIKRAPLRVRFTAPKPNFPGLTEKIGGWNATIISKDELSTQPSIVCEIEPSLLRSCEERLKDVQGRVEVLSVSTHVESGPSVEQHNSVEVPHAAPVKEPDAVAQISETMQKQSISTESQGNAQGKQQRRCKECDVLVEDKLYREHCKSGWHKHNYTRHKNGLPPLSQEECMVEMELADSKKDLKDYDF

SEQ ID NO: 12257 - protein, 238 aa, Zea mays subsp. mays
  peptide (1)..(238): Ceres Seq. ID no. 12351758
  misc_feature (1)..(127): Pfam Name: Uncharacterized protein family UPF0023 Pfam Description: Uncharacterized protein family UPF0023
  misc_feature (1)..(238): Homolog of NCBI NO: 21554225 NR Description: unknown [Arabidopsis thaliana]
  misc_feature (1)..(238): Homolog of NCBI NO: 18401084 NR Description: expressed protein; protein id: At1g43860.1, by cDNA: 21241., supported by cDNA: gi_15450897 [Arabidopsis >gi|25405150|pir||E96502 hypothetical protein F28H19.11
  misc_feature (1)..(129): Homolog of NCBI NO: 23956138 NR Description: RIKEN cDNA 4733401P19 [Mus musculus]
  misc_feature (1)..(129): Homolog of NCBI NO: 27664348 NR Description: similar to RIKEN cDNA 4733401P19 [Mus musculus]
  misc_feature (1)..(129): Homolog of NCBI NO: 28416940 NR Description: Shwachman-Bodian-Diamond syndrome protein [Homo
  misc_feature (1)..(129): Homolog of NCBI NO: 4929663 NR Description: CGI-97 protein [Homo sapiens]
  misc_feature (1)..(129): Homolog of NCBI NO: 29476858 NR Description: Unknown (protein for MGC:56700) [Danio rerio]
  misc_feature (1)..(134): Homolog of NCBI NO: 28828466 NR Description: similar to Homo sapiens (Human). Hypothetical
  misc_feature (1)..(127): Homolog of NCBI NO: 39586134 NR Description: Hypothetical protein CBG15250 [Caenorhabditis
  misc_feature (1)..(66): Homolog of NCBI NO: 29248137 NR Description: GLP_217_44273_45028 [Giardia lamblia ATCC 50803]
MEKTINPETRRPYTITMIERLMHEIHFAVDPNLTSKEQALKVIKKLTEHFPIKRAPLRVRFTAPKPNFPGLTEKIGGWNATIISKDELSTQPSIVCEIEPSLLRSCEERLKDVQGRVEVLSVSTHVESGPSVEQHNSVEVPHAAPVKEPDAVAQISETMQKQSISTESQGNAQGKQQRRCKECDVLVEDKLYREHCKSGWHKHNYTRHKNGLPPLSQEECMVEMELADSKKDLKDYDF

SEQ ID NO: 12258 - protein, 222 aa, Zea mays subsp. mays
  peptide (1)..(222): Ceres Seq. ID no. 12351759
  misc_feature (1)..(111): Pfam Name: Uncharacterized protein family UPF0023 Pfam Description: Uncharacterized protein family UPF0023
  misc_feature (1)..(222): Homolog of NCBI NO: 21554225 NR Description: unknown [Arabidopsis thaliana]
  misc_feature (1)..(222): Homolog of NCBI NO: 18401084 NR Description: expressed protein; protein id: At1g43860.1, by cDNA: 21241., supported by cDNA: gi_15450897 [Arabidopsis >gi|25405150|pir||E96502 hypothetical protein F28H19.11
  misc_feature (1)..(113): Homolog of NCBI NO: 23956138 NR Description: RIKEN cDNA 4733401P19 [Mus musculus]
  misc_feature (1)..(113): Homolog of NCBI NO: 27664348 NR Description: similar to RIKEN cDNA 4733401P19 [Mus musculus]
  misc_feature (1)..(113): Homolog of NCBI NO: 28416940 NR Description: Shwachman-Bodian-Diamond syndrome protein [Homo
  misc_feature (1)..(113): Homolog of NCBI NO: 4929663 NR Description: CGI-97 protein [Homo sapiens]
  misc_feature (1)..(113): Homolog of NCBI NO: 29476858 NR Description: Unknown (protein for MGC:56700) [Danio rerio]
  misc_feature (1)..(118): Homolog of NCBI NO: 28828466 NR Description: similar to Homo sapiens (Human). Hypothetical
  misc_feature (1)..(111): Homolog of NCBI NO: 39586134 NR Description: Hypothetical protein CBG15250 [Caenorhabditis
  misc_feature (1)..(50): Homolog of NCBI NO: 29248137 NR Description: GLP_217_44273_45028 [Giardia lamblia ATCC 50803]
MIERLMHEIHFAVDPNLTSKEQALKVIKKLTEHFPIKRAPLRVRFTAPKPNFPGLTEKIGGWNATIISKDELSTQPSIVCEIEPSLLRSCEERLKDVQGRVEVLSVSTHVESGPSVEQHNSVEVPHAAPVKEPDAVAQISETMQKQSISTESQGNAQGKQQRRCKECDVLVEDKLYREHCKSGWHKHNYTRHKNGLPPLSQEECMVEMELADSKKDLKDYDF

SEQ ID NO: 12259 - DNA, 1417 bp, Zea mays subsp. mays
  misc_feature (1)..(1417): Ceres Seq. ID no. 12411579
  misc_feature: MA Experiment ID: 108522 Result: Up-regulated in Transcription
  misc_feature: MA Experiment 108522 PARAMETER Experiment Name: Zm_42deg_Heat_P Parameter: Age (day) Value: 8
  misc_feature: MA Experiment 108522 PARAMETER Experiment Name: Zm_42deg_Heat_P Parameter: Organism Value: Zea mays
  misc_feature: MA Experiment 108522 PARAMETER Experiment Name: Zm_42deg_Heat_P Parameter: Plant Line Value: 35A19
  misc_feature: MA Experiment 108522 PARAMETER Experiment Name: Zm_42deg_Heat_P Parameter: Temperature (deg C) Value: 42 vs. 22
  misc_feature: MA Experiment 108522 PARAMETER Experiment Name: Zm_42deg_Heat_P Parameter: Timepoint (hr) Value: 1
  misc_feature: MA Experiment 108522 PARAMETER Experiment Name: Zm_42deg_Heat_P Parameter: Tissue Value: Aerial
  misc_feature: MA Experiment ID: 108535 Result: Up-regulated in Transcription
  misc_feature: MA Experiment 108535 PARAMETER Experiment Name: Zm_Meristem_P Parameter: Age (day) Value: 8
  misc_feature: MA Experiment 108535 PARAMETER Experiment Name: Zm_Meristem_P Parameter: Organism Value: Zea mays
  misc_feature: MA Experiment 108535 PARAMETER Experiment Name: Zm_Meristem_P Parameter: Plant Line Value: 35A19
  misc_feature: MA Experiment 108535 PARAMETER Experiment Name: Zm_Meristem_P Parameter: Tissue Value: Root Meristem vs. Above Root Meristem
  misc_feature: MA Experiment ID: 108544 Result: Down-regulated in Transcription
  misc_feature: MA Experiment ID: 20000479 Result: Down-regulated in Transcription
  misc_feature: MA Experiment 20000479 PARAMETER Experiment Name: Zm_Drought_P Parameter: Age (day) Value: 10
  misc_feature: MA Experiment 20000479 PARAMETER Experiment Name: Zm_Drought_P Parameter: Organism Value: Zea mays
  misc_feature: MA Experiment 20000479 PARAMETER Experiment Name: Zm_Drought_P Parameter: Plant Line Value: 35A19
  misc_feature: MA Experiment 20000479 PARAMETER Experiment Name: Zm_Drought_P Parameter: Timepoint (hr) Value: 48
  misc_feature: MA Experiment 20000479 PARAMETER Experiment Name: Zm_Drought_P Parameter: Tissue Value: Aerial
  misc_feature: MA Experiment 20000479 PARAMETER Experiment Name: Zm_Drought_P Parameter: Treatment Value: Drought vs. No Drought
  misc_feature: MA Experiment ID: 20000480 Result: Down-regulated in Transcription
  misc_feature: MA Experiment 20000480 PARAMETER Experiment Name: Zm_Drought_P Parameter: Age (day) Value: 11
  misc_feature: MA Experiment 20000480 PARAMETER Experiment Name: Zm_Drought_P Parameter: Organism Value: Zea mays
  misc_feature: MA Experiment 20000480 PARAMETER Experiment Name: Zm_Drought_P Parameter: Plant Line Value: 35A19
  misc_feature: MA Experiment 20000480 PARAMETER Experiment Name: Zm_Drought_P Parameter: Timepoint (hr) Value: 72
  misc_feature: MA Experiment 20000480 PARAMETER Experiment Name: Zm_Drought_P Parameter: Tissue Value: Aerial
  misc_feature: MA Experiment 20000480 PARAMETER Experiment Name: Zm_Drought_P Parameter: Treatment Value: Drought vs. No Drought
gaccgcatcgcgttctacgttctccgccctctccgctccccctactctgcttggtttcccagaagatttgattggtttccccaaatccggtgactccattcctgttgttcttcacgtcgaccccgggaacctcccagaaggctctagcgaccccggccgcccggcgctctgagggctgtgctgccggcggcgagatccaggagctgcctgccatggtgaaggacagcgcctactacgacgtcctaggggtcagcgtcgacgcgtcctccgccgagatcaagaaggcgtattacatcaaggcgaagctggtgcatccggacaagaatcccgggaaccctgacgccgcactcaagttccaggaacttggagaggcctatcaagttcttagtgatcctgggaaaaaggaggcttatgataagtatggaaaggagggtattccccaggataacatggtggatcctgctgctgtctttgggatgatttttggaagtgactattttgaagattacgttggccagcttgctctagcatctatagcctcagtagaggttgatgaaaactcaaacagtcaagaagcaagagcaaaggttcaagaaaagataaaagagttacaaagagagagagaacaaaagcttacccagagcctgaaagaccgacttcaaccatatgtagatgagagaaaggatgaatttgtgagctacgcaagcacagaagctaggcgtttatctgaagcagcatttggtgaggctatgcttcacactattgggtatatttacgtgcggcaagcagcaagagaacttgggaaaagtagaatttatatgggtgtaccgtttatagctgagtgggttagagacaaaggacaccacattaaatcgcaggttaatgctgcttcaggtgctatttctctaatacaacttcaagaagggatgaaaaagatggaaggaagcgagaacagtgaagagcaacttatgaagagttttgaggagaaaaaagatgccatgcttagctcgctatggaaaattaatgtggtcgatattgagtcaacactttcacgtgtctgccaagcagttctgagagataacacggtctccaaagatgtcctgaagctgcgagcgaaagcgttgaaaaagctcggaacgatattccaaggcgcaaaatctatgtaccgtcgtgaaaacagcctgcgcgttgaaaacgagcacaaatcagcaagctaacccgtcacactgaagcccatggaccaccgtgtagcaagggatcggatttggtgatttttttgtggttttggcctttgttaatttgtttgtctgctaacgatagcattcggaaaatgcaaatccggtctacactagtacccctctattaattttctgtagatgtgagcatttaacacgaagctgtgatttgcgcttgatgc

SEQ ID NO: 12260 - protein, 334 aa, Zea mays subsp. mays
  peptide (1)..(334): Ceres Seq. ID no. 12411580
  misc_feature (6)..(71): Pfam Name: DnaJ domain Pfam Description: DnaJ domain
  misc_feature (1)..(201): Homolog of NCBI NO: 25458468 NR Description: dnaJ-like protein [imported] - rice
  misc_feature (229)..(312): Homolog of NCBI NO: 25458468 NR Description: dnaJ-like protein [imported] - rice
  misc_feature (1)..(329): Homolog of NCBI NO: 15234962 NR Description: dnaJ-like protein; protein id: At4g39150.1, by cDNA: gi_18086430, supported by cDNA: gi_20147306 [Arabidopsis
  misc_feature (1)..(327): Homolog of NCBI NO: 15226572 NR Description: putative DnaJ protein; protein id: At2g21510.1, by cDNA: 151802. [Arabidopsis thaliana] >gi|25412044|pir||B84602
  misc_feature (1)..(316): Homolog of NCBI NO: 15223142 NR Description: putative DnaJ protein; protein id: At1g76700.1
  misc_feature (1)..(331): Homolog of NCBI NO: 18394951 NR Description: expressed protein; protein id: At1g21080.1, by cDNA: gi_15028270 [Arabidopsis thaliana]
  misc_feature (1)..(316): Homolog of NCBI NO: 26449747 NR Description: putative DnaJ protein [Arabidopsis thaliana]
  misc_feature (133)..(315): Homolog of NCBI NO: 27817868 NR Description: OJ1081_B12.17 [Oryza sativa (japonica
  misc_feature (1)..(127): Homolog of NCBI NO: 27817868 NR Description: OJ1081_B12.17 [Oryza sativa (japonica
  misc_feature (1)..(334): Homolog of NCBI NO: 30699227 NR Description: DnaJ protein family [Arabidopsis thaliana]
MVKDSAYYDVLGVSVDASSAEIKKAYYIKAKLVHPDKNPGNPDAALKFQELGEAYQVLSDPGKKEAYDKYGKEGIPQDNMVDPAAVFGMIFGSDYFEDYVGQLALASIASVEVDENSNSQEARAKVQEKIKELQREREQKLTQSLKDRLQPYVDERKDEFVSYASTEARRLSEAAFGEAMLHTIGYIYVRQAARELGKSRIYMGVPFIAEWVRDKGHHIKSQVNAASGAISLIQLQEGMKKMEGSENSEEQLMKSFEEKKDAMLSSLWKINVVDIESTLSRVCQAVLRDNTVSKDVLKLRAKALKKLGTIFQGAKSMYRRENSLRVENEHKSAS

SEQ ID NO: 12261 - protein, 255 aa, Zea mays subsp. mays
  peptide (1)..(255): Ceres Seq. ID no. 12411581
  misc_feature (1)..(122): Homolog of NCBI NO: 25458468 NR Description: dnaJ-like protein [imported] - rice
  misc_feature (150)..(233): Homolog of NCBI NO: 25458468 NR Description: dnaJ-like protein [imported] - rice
  misc_feature (1)..(250): Homolog of NCBI NO: 15234962 NR Description: dnaJ-like protein; protein id: At4g39150.1, by cDNA: gi_18086430, supported by cDNA: gi_20147306 [Arabidopsis
  misc_feature (1)..(248): Homolog of NCBI NO: 15226572 NR Description: putative DnaJ protein; protein id: At2g21510.1, by cDNA: 151802. [Arabidopsis thaliana] >gi|25412044|pir||B84602
  misc_feature (1)..(237): Homolog of NCBI NO: 15223142 NR Description: putative DnaJ protein; protein id: At1g76700.1
  misc_feature (1)..(252): Homolog of NCBI NO: 18394951 NR Description: expressed protein; protein id: At1g21080.1, by cDNA: gi_15028270 [Arabidopsis thaliana]
  misc_feature (1)..(237): Homolog of NCBI NO: 26449747 NR Description: putative DnaJ protein [Arabidopsis thaliana]
  misc_feature (54)..(236): Homolog of NCBI NO: 27817868 NR Description: OJ1081_B12.17 [Oryza sativa (japonica
  misc_feature (1)..(48): Homolog of NCBI NO: 27817868 NR Description: OJ1081_B12.17 [Oryza sativa (japonica
  misc_feature (1)..(255): Homolog of NCBI NO: 30699227 NR Description: DnaJ protein family [Arabidopsis thaliana]
MVDPAAVFGMIFGSDYFEDYVGQLALASIASVEVDENSNSQEARAKVQEKIKELQREREQKLTQSLKDRLQPYVDERKDEFVSYASTEARRLSEAAFGEAMLHTIGYIYVRQAARELGKSRIYMGVPFIAEWVRDKGHHIKSQVNAASGAISLIQLQEGMKKMEGSENSEEQLMKSFEEKKDAMLSSLWKINVVDIESTLSRVCQAVLRDNTVSKDVLKLRAKALKKLGTIFQGAKSMYRRENSLRVENEHKSAS

SEQ ID NO: 12262 - protein, 246 aa, Zea mays subsp. mays
  peptide (1)..(246): Ceres Seq. ID no. 12411582
  misc_feature (1)..(113): Homolog of NCBI NO: 25458468 NR Description: dnaJ-like protein [imported] - rice
  misc_feature (141)..(224): Homolog of NCBI NO: 25458468 NR Description: dnaJ-like protein [imported] - rice
  misc_feature (1)..(241): Homolog of NCBI NO: 15234962 NR Description: dnaJ-like protein; protein id: At4g39150.1, by cDNA: gi_18086430, supported by cDNA: gi_20147306 [Arabidopsis
  misc_feature (1)..(239): Homolog of NCBI NO: 15226572 NR Description: putative DnaJ protein; protein id: At2g21510.1, by cDNA: 151802. [Arabidopsis thaliana] >gi|25412044|pir||B84602
  misc_feature (1)..(228): Homolog of NCBI NO: 15223142 NR Description: putative DnaJ protein; protein id: At1g76700.1
  misc_feature (1)..(243): Homolog of NCBI NO: 18394951 NR Description: expressed protein; protein id: At1g21080.1, by cDNA: gi_15028270 [Arabidopsis thaliana]
  misc_feature (1)..(228): Homolog of NCBI NO: 26449747 NR Description: putative DnaJ protein [Arabidopsis thaliana]
  misc_feature (45)..(227): Homolog of NCBI NO: 27817868 NR Description: OJ1081_B12.17 [Oryza sativa (japonica
  misc_feature (1)..(39): Homolog of NCBI NO: 27817868 NR Description: OJ1081_B12.17 [Oryza sativa (japonica
  misc_feature (1)..(246): Homolog of NCBI NO: 30699227 NR Description: DnaJ protein family [Arabidopsis thaliana]
MIFGSDYFEDYVGQLALASIASVEVDENSNSQEARAKVQEKIKELQREREQKLTQSLKDRLQPYVDERKDEFVSYASTEARRLSEAAFGEAMLHTIGYIYVRQAARELGKSRIYMGVPFIAEWVRDKGHHIKSQVNAASGAISLIQLQEGMKKMEGSENSEEQLMKSFEEKKDAMLSSLWKINVVDIESTLSRVCQAVLRDNTVSKDVLKLRAKALKKLGTIFQGAKSMYRRENSLRVENEHKSAS

SEQ ID NO: 12263 - DNA, 1757 bp, Zea mays subsp. mays
  misc_feature (1)..(1757): Ceres Seq. ID no. 12345695
  misc_feature: MA Experiment ID: 108529 Result: Up-regulated in Transcription
  misc_feature: MA Experiment 108529 PARAMETER Experiment Name: Zm_Imbibed_Seeds_P Parameter: Age (day) Value: 5 vs. 2
  misc_feature: MA Experiment 108529 PARAMETER Experiment Name: Zm_Imbibed_Seeds_P Parameter: Organism Value: Zea mays
  misc_feature: MA Experiment 108529 PARAMETER Experiment Name: Zm_Imbibed_Seeds_P Parameter: Plant Line Value: 35A19
  misc_feature: MA Experiment 108529 PARAMETER Experiment Name: Zm_Imbibed_Seeds_P Parameter: Tissue Value: Roots vs. Embryo
  misc_feature: MA Experiment ID: 108530 Result: Up-regulated in Transcription
  misc_feature: MA Experiment 108530 PARAMETER Experiment Name: Zm_Imbibed_Seeds_P Parameter: Age (day) Value: 6 vs. 2
  misc_feature: MA Experiment 108530 PARAMETER Experiment Name: Zm_Imbibed_Seeds_P Parameter: Organism Value: Zea mays
  misc_feature: MA Experiment 108530 PARAMETER Experiment Name: Zm_Imbibed_Seeds_P Parameter: Plant Line Value: 35A19
  misc_feature: MA Experiment 108530 PARAMETER Experiment Name: Zm_Imbibed_Seeds_P Parameter: Tissue Value: Aerial vs. Embryo
  misc_feature: MA Experiment ID: 108535 Result: Down-regulated in Transcription
  misc_feature: MA Experiment 108535 PARAMETER Experiment Name: Zm_Meristem_P Parameter: Age (day) Value: 8
  misc_feature: MA Experiment 108535 PARAMETER Experiment Name: Zm_Meristem_P Parameter: Organism Value: Zea mays
  misc_feature: MA Experiment 108535 PARAMETER Experiment Name: Zm_Meristem_P Parameter: Plant Line Value: 35A19
  misc_feature: MA Experiment 108535 PARAMETER Experiment Name: Zm_Meristem_P Parameter: Tissue Value: Root Meristem vs. Above Root Meristem
  misc_feature: MA Experiment ID: 20000535 Result: Down-regulated in Transcription
  misc_feature: MA Experiment 20000535 PARAMETER Experiment Name: Zm_Hybrid_Seed_Dev_P Parameter: DAP Value: 30 vs. 12
  misc_feature: MA Experiment 20000535 PARAMETER Experiment Name: Zm_Hybrid_Seed_Dev_P Parameter: Organism Value: Zea mays
  misc_feature: MA Experiment 20000535 PARAMETER Experiment Name: Zm_Hybrid_Seed_Dev_P Parameter: Plant Line Value: 35A19
  misc_feature: MA Experiment 20000535 PARAMETER Experiment Name: Zm_Hybrid_Seed_Dev_P Parameter: Tissue Value: Embryo vs. Unfert Floret
gctgataacaacatcctatcgttcctgtagcccctttccgtgaccttgccaaagaatttgctcttctctgtgcgtgtgcaatttcttccgctacagctcaaggatccgctactgctgctgttttgggagattcgccatgggcggcggggccgttaacgaccacttcccgggggccagcgacccgctgctccccacgaagcgggatggggacggggacgaggacgacgcaggtgcctccgcgttccacgagttcgacggcgcctccttcgccggcgcggtgttcaacctctccaccaccatcgtcggcgcgggcatcatggccgctaccggccaccatgaaggtgctcggtctcgtccctgggctcgtcatgatagtgctcgccgcgctcctcaccgacgcctccatcgagctgctcgtgcggttcagccgggccgcgggcgcgcgctcctacagcgcggccatggccgacgccttcggatggtggggtaggaggctgctccaggtctgcgtcgtcatcaacaacgtcggcgtcatgattgtgtacatgatcattataggcgatgtgctttctggatccacttctggtggtgagcatcactatggtgtgttagaaggatggtttggaatacactggtggaatgggcgtttatttgttctccttgtcacaaccctttgtgtgttcactccactagcatgcttgaagcgtattgattcactaagctatacatccacaatatctgttgctttggcggttgtattcgttattattactgcaggaattgctgtcatcaagttgataggtggacaaattccaatgcccaagttgtttcccactgtttctgatttggcatctgtttgggaactttttacagcagtgccggttcttgtcactgcttacgtttgccattacaatgttcacccaattcataatgagctaaaggactctacccagattaagccaatagtacacacatcattgacactatgctcgaccatctacatcacaacaagtttctttggatatctcctctttggtgaatctacactctctgatgtgctctccaactttgattcaaatcttgggatcccatacagttcagtcctcaatgatgctgtcagagtgagctatgctgttcacctgatgcttgtgttccccatgatattccatgcattgaggcttaatttggatgggctcctcttcgcctctgcaaggcctctgtcttctgacaacagaagattcggcataattacagcatcgctcctcctagtgatttttgggtctgcaatcttcattcctagtatttgggatgcctttcagtttactggggcaactgctgctgtctgtatcgcctttattttcccagctgcgatcactttaagggattcacaaggtattgccaagaagtgggacaaaattctggcgatcttcatgattgttcttgctgttgtatcaaatgtagtagcggtctacagcgatgcctacaaaatattcaacaaggaaagtgctccttctaatgcctggatcggggagtcaactgaaaatagatcttcgtggtggcttgtacgttagttggccaataaaatattcatagttcatttaggctttgtttttggtgatttgttccacgggccatggtctgctcaaatctcattgagttttgtgtgtatatctacgataggtatgaaaatttgcacaaaccgaagtgctccggtaccataaaaataattgtgtcaaatctgaaattacagagttacg

SEQ ID NO: 12264 - protein, 455 aa, Zea mays subsp. mays
  peptide (1)..(455): Ceres Seq. ID no. 12345696
  misc_feature (41)..(439): Homolog of NCBI NO: 34898706 NR Description: hypothetical protein [Oryza sativa (japonica group)] >gi|11862972|dbj|BAB19353.1| hypothetical protein [Oryza
  misc_feature (41)..(436): Homolog of NCBI NO: 18406463 NR Description: expressed protein; protein id: At3g30390.1, by cDNA: gi_15529154, supported by cDNA: gi_16226266 [Arabidopsis >gi|9294342|dbj|BAB02239.1|
  misc_feature (41)..(434): Homolog of NCBI NO: 9758059 NR Description: amino acid transporter-like protein [Arabidopsis
  misc_feature (41)..(434): Homolog of NCBI NO: 15241555 NR Description: transporter -like protein; protein id:
  misc_feature (41)..(429): Homolog of NCBI NO: 15228851 NR Description: putative protein; protein id: At3g56200.1, by cDNA: gi_20453044 [Arabidopsis thaliana]
  misc_feature (41)..(393): Homolog of NCBI NO: 34907894 NR Description: P0439E11.11 [Oryza sativa (japonica
  misc_feature (41)..(427): Homolog of NCBI NO: 30688270 NR Description: amino acid transporter family [Arabidopsis
  misc_feature (41)..(432): Homolog of NCBI NO: 18412864 NR Description: expressed protein; protein id: At1g80510.1, by cDNA: gi_16226718 [Arabidopsis thaliana]
  misc_feature (41)..(308): Homolog of NCBI NO: 24461850 NR Description: CTV.3 [Poncirus trifoliata]
  misc_feature (328)..(432): Homolog of NCBI NO: 24461850 NR Description: CTV.3 [Poncirus trifoliata]
MGTGTRTTQVPPRSTSSTAPPSPARCSTSPPPSSARASWPLPATMKVLGLVPGLVMIVLAALLTDASIELLVRFSRAAGARSYSAAMADAFGWWGRRLLQVCVVINNVGVMIVYMIIIGDVLSGSTSGGEHHYGVLEGWFGIHWWNGRLFVLLVTTLCVFTPLACLKRIDSLSYTSTISVALAVVFVIITAGIAVIKLIGGQIPMPKLFPTVSDLASVWELFTAVPVLVTAYVCHYNVHPIHNELKDSTQIKPIVHTSLTLCSTIYITTSFFGYLLFGESTLSDVLSNFDSNLGIPYSSVLNDAVRVSYAVHLMLVFPMIFHALRLNLDGLLFASARPLSSDNRRFGIITASLLLVIFGSAIFIPSIWDAFQFTGATAAVCIAFIFPAAITLRDSQGIAKKWDKILAIFMIVLAVVSNVVAVYSDAYKIFNKESAPSNAWIGESTENRSSWWLVR

SEQ ID NO: 12265 - protein, 411 aa, Zea mays subsp. mays
  peptide (1)..(411): Ceres Seq. ID no. 12345697
  misc_feature (1)..(395): Homolog of NCBI NO: 34898706 NR Description: hypothetical protein [Oryza sativa (japonica group)] >gi|11862972|dbj|BAB19353.1| hypothetical protein [Oryza
  misc_feature (1)..(392): Homolog of NCBI NO: 18406463 NR Description: expressed protein; protein id: At3g30390.1, by cDNA: gi_15529154, supported by cDNA: gi_16226266 [Arabidopsis >gi|9294342|dbj|BAB02239.1|
  misc_feature (1)..(390): Homolog of NCBI NO: 9758059 NR Description: amino acid transporter-like protein [Arabidopsis
  misc_feature (1)..(390): Homolog of NCBI NO: 15241555 NR Description: transporter -like protein; protein id:
  misc_feature (1)..(385): Homolog of NCBI NO: 15228851 NR Description: putative protein; protein id: At3g56200.1, by cDNA: gi_20453044 [Arabidopsis thaliana]
  misc_feature (1)..(349): Homolog of NCBI NO: 34907894 NR Description: P0439E11.11 [Oryza sativa (japonica
  misc_feature (1)..(383): Homolog of NCBI NO: 30688270 NR Description: amino acid transporter family [Arabidopsis
  misc_feature (1)..(388): Homolog of NCBI NO: 18412864 NR Description: expressed protein; protein id: At1g80510.1, by cDNA: gi_16226718 [Arabidopsis thaliana]
  misc_feature (1)..(264): Homolog of NCBI NO: 24461850 NR Description: CTV.3 [Poncirus trifoliata]
  misc_feature (284)..(388): Homolog of NCBI NO: 24461850 NR Description: CTV.3 [Poncirus trifoliata]
MKVLGLVPGLVMIVLAALLTDASIELLVRFSRAAGARSYSAAMADAFGWWGRRLLQVCVVINNVGVMIVYMIIIGDVLSGSTSGGEHHYGVLEGWFGIHWWNGRLFVLLVTTLCVFTPLACLKRIDSLSYTSTISVALAVVFVIITAGIAVIKLIGGQIPMPKLFPTVSDLASVWELFTAVPVLVTAYVCHYNVHPIHNELKDSTQIKPIVHTSLTLCSTIYITTSFFGYLLFGESTLSDVLSNFDSNLGIPYSSVLNDAVRVSYAVHLMLVFPMIFHALRLNLDGLLFASARPLSSDNRRFGIITASLLLVIFGSAIFIPSIWDAFQFTGATAAVCIAFIFPAAITLRDSQGIAKKWDKILAIFMIVLAVVSNVVAVYSDAYKIFNKESAPSNAWIGESTENRSSWWLVR

SEQ ID NO: 12266 - protein, 400 aa, Zea mays subsp. mays
  peptide (1)..(400): Ceres Seq. ID no. 12345698
  misc_feature (1)..(381): Homolog of NCBI NO: 18406463 NR Description: expressed protein; protein id: At3g30390.1, by cDNA: gi_15529154, supported by cDNA: gi_16226266 [Arabidopsis >gi|9294342|dbj|BAB02239.1|
  misc_feature (1)..(379): Homolog of NCBI NO: 9758059 NR Description: amino acid transporter-like protein [Arabidopsis
  misc_feature (1)..(379): Homolog of NCBI NO: 15241555 NR Description: transporter -like protein; protein id:
  misc_feature (1)..(374): Homolog of NCBI NO: 15228851 NR Description: putative protein; protein id: At3g56200.1, by cDNA: gi_20453044 [Arabidopsis thaliana]
  misc_feature (1)..(338): Homolog of NCBI NO: 34907894 NR Description: P0439E11.11 [Oryza sativa (japonica
  misc_feature (1)..(372): Homolog of NCBI NO: 30688270 NR Description: amino acid transporter family [Arabidopsis
  misc_feature (1)..(377): Homolog of NCBI NO: 18412864 NR Description: expressed protein; protein id: At1g80510.1, by cDNA: gi_16226718 [Arabidopsis thaliana]
  misc_feature (1)..(253): Homolog of NCBI NO: 24461850 NR Description: CTV.3 [Poncirus trifoliata]
  misc_feature (273)..(377): Homolog of NCBI NO: 24461850 NR Description: CTV.3 [Poncirus trifoliata]
  misc_feature (1)..(384): Homolog of NCBI NO: 34898706 NR Description: hypothetical protein [Oryza sativa (japonica group)] >gi|11862972|dbj|BAB19353.1| hypothetical protein [Oryza
MIVLAALLTDASIELLVRFSRAAGARSYSAAMADAFGWWGRRLLQVCVVINNVGVMIVYMIIIGDVLSGSTSGGEHHYGVLEGWFGIHWWNGRLFVLLVTTLCVFTPLACLKRIDSLSYTSTISVALAVVFVIITAGIAVIKLIGGQIPMPKLFPTVSDLASVWELFTAVPVLVTAYVCHYNVHPIHNELKDSTQIKPIVHTSLTLCSTIYITTSFFGYLLFGESTLSDVLSNFDSNLGIPYSSVLNDAVRVSYAVHLMLVFPMIFHALRLNLDGLLFASARPLSSDNRRFGIITASLLLVIFGSAIFIPSIWDAFQFTGATAAVCIAFIFPAAITLRDSQGIAKKWDKILAIFMIVLAVVSNVVAVYSDAYKIFNKESAPSNAWIGESTENRSSWWLVR

SEQ ID NO: 12267 - DNA, 1744 bp, Zea mays subsp. mays
  misc_feature (1)..(1744): Ceres Seq. ID no. 12348828
  misc_feature: MA Experiment ID: 108504 Result: Up-regulated in Transcription
  misc_feature: MA Experiment 108504 PARAMETER Experiment Name: Zm_Drought_P Parameter: Age (day) Value: 8
  misc_feature: MA Experiment 108504 PARAMETER Experiment Name: Zm_Drought_P Parameter: Organism Value: Zea mays
  misc_feature: MA Experiment 108504 PARAMETER Experiment Name: Zm_Drought_P Parameter: Plant Line Value: 35A19
  misc_feature: MA Experiment 108504 PARAMETER Experiment Name: Zm_Drought_P Parameter: Timepoint (hr) Value: 12
  misc_feature: MA Experiment 108504 PARAMETER Experiment Name: Zm_Drought_P Parameter: Tissue Value: Aerial
  misc_feature: MA Experiment 108504 PARAMETER Experiment Name: Zm_Drought_P Parameter: Treatment Value: Drought vs. No Drought
  misc_feature: MA Experiment ID: 108535 Result: Down-regulated in Transcription
  misc_feature: MA Experiment 108535 PARAMETER Experiment Name: Zm_Meristem_P Parameter: Age (day) Value: 8
  misc_feature: MA Experiment 108535 PARAMETER Experiment Name: Zm_Meristem_P Parameter: Organism Value: Zea mays
  misc_feature: MA Experiment 108535 PARAMETER Experiment Name: Zm_Meristem_P Parameter: Plant Line Value: 35A19
  misc_feature: MA Experiment 108535 PARAMETER Experiment Name: Zm_Meristem_P Parameter: Tissue Value: Root Meristem vs. Above Root Meristem
  misc_feature: MA Experiment ID: 108543 Result: Down-regulated in Transcription
  misc_feature: MA Experiment ID: 108544 Result: Up-regulated in Transcription
  misc_feature: MA Experiment ID: 108556 Result: Up-regulated in Transcription
  misc_feature: MA Experiment 108556 PARAMETER Experiment Name: Zm_Drought_P Parameter: Age (day) Value: 9
  misc_feature: MA Experiment 108556 PARAMETER Experiment Name: Zm_Drought_P Parameter: Organism Value: Zea mays
  misc_feature: MA Experiment 108556 PARAMETER Experiment Name: Zm_Drought_P Parameter: Plant Line Value: 35A19
  misc_feature: MA Experiment 108556 PARAMETER Experiment Name: Zm_Drought_P Parameter: Timepoint (hr) Value: 24
  misc_feature: MA Experiment 108556 PARAMETER Experiment Name: Zm_Drought_P Parameter: Tissue Value: Aerial
  misc_feature: MA Experiment 108556 PARAMETER Experiment Name: Zm_Drought_P Parameter: Treatment Value: Drought vs. No Drought
  misc_feature: MA Experiment ID: 108597 Result: Up-regulated in Transcription
  misc_feature: MA Experiment 108597 PARAMETER Experiment Name: Zm_100uM_ABA_P Parameter: Age (day) Value: 9
  misc_feature: MA Experiment 108597 PARAMETER Experiment Name: Zm_100uM_ABA_P Parameter: Organism Value: Zea mays
  misc_feature: MA Experiment 108597 PARAMETER Experiment Name: Zm_100uM_ABA_P Parameter: Plant Line Value: 35A19
  misc_feature: MA Experiment 108597 PARAMETER Experiment Name: Zm_100uM_ABA_P Parameter: Timepoint (hr) Value: 24
  misc_feature: MA Experiment 108597 PARAMETER Experiment Name: Zm_100uM_ABA_P Parameter: Tissue Value: Aerial
  misc_feature: MA Experiment 108597 PARAMETER Experiment Name: Zm_100uM_ABA_P Parameter: Treatment Value: 100uM ABA vs. No Treatment
  misc_feature: MA Experiment ID: 20000477 Result: Up-regulated in Transcription
  misc_feature: MA Experiment 20000477 PARAMETER Experiment Name: Zm_5mM_SA_P Parameter: Age (day) Value: 10
  misc_feature: MA Experiment 20000477 PARAMETER Experiment Name: Zm_5mM_SA_P Parameter: Organism Value: Zea mays
  misc_feature: MA Experiment 20000477 PARAMETER Experiment Name: Zm_5mM_SA_P Parameter: Plant Line Value: 35A19
  misc_feature: MA Experiment 20000477 PARAMETER Experiment Name: Zm_5mM_SA_P Parameter: Timepoint (hr) Value: 48
  misc_feature: MA Experiment 20000477 PARAMETER Experiment Name: Zm_5mM_SA_P Parameter: Tissue Value: Aerial
  misc_feature: MA Experiment 20000477 PARAMETER Experiment Name: Zm_5mM_SA_P Parameter: Treatment Value: 5mM SA vs. No Treatment
  misc_feature: MA Experiment ID: 20000478 Result: Up-regulated in Transcription
  misc_feature: MA Experiment 20000478 PARAMETER Experiment Name: Zm_5mM_SA_P Parameter: Age (day) Value: 11
  misc_feature: MA Experiment 20000478 PARAMETER Experiment Name: Zm_5mM_SA_P Parameter: Organism Value: Zea mays
  misc_feature: MA Experiment 20000478 PARAMETER Experiment Name: Zm_5mM_SA_P Parameter: Plant Line Value: 35A19
  misc_feature: MA Experiment 20000478 PARAMETER Experiment Name: Zm_5mM_SA_P Parameter: Timepoint (hr) Value: 72
  misc_feature: MA Experiment 20000478 PARAMETER Experiment Name: Zm_5mM_SA_P Parameter: Tissue Value: Aerial
  misc_feature: MA Experiment 20000478 PARAMETER Experiment Name: Zm_5mM_SA_P Parameter: Treatment Value: 5mM SA vs. No Treatment
  misc_feature: MA Experiment ID: 20000480 Result: Up-regulated in Transcription
  misc_feature: MA Experiment 20000480 PARAMETER Experiment Name: Zm_Drought_P Parameter: Age (day) Value: 11
  misc_feature: MA Experiment 20000480 PARAMETER Experiment Name: Zm_Drought_P Parameter: Organism Value: Zea mays
  misc_feature: MA Experiment 20000480 PARAMETER Experiment Name: Zm_Drought_P Parameter: Plant Line Value: 35A19
  misc_feature: MA Experiment 20000480 PARAMETER Experiment Name: Zm_Drought_P Parameter: Timepoint (hr) Value: 72
  misc_feature: MA Experiment 20000480 PARAMETER Experiment Name: Zm_Drought_P Parameter: Tissue Value: Aerial
  misc_feature: MA Experiment 20000480 PARAMETER Experiment Name: Zm_Drought_P Parameter: Treatment Value: Drought vs. No Drought
  misc_feature: MA Experiment ID: 20000488 Result: Down-regulated in Transcription
  misc_feature: MA Experiment 20000488 PARAMETER Experiment Name: Zm_50mM_NH4NO3_L_to_H_P Parameter: Organism Value: Zea mays
  misc_feature: MA Experiment 20000488 PARAMETER Experiment Name: Zm_50mM_NH4NO3_L_to_H_P Parameter: Timepoint (hr) Value: 8
  misc_feature: MA Experiment 20000488 PARAMETER Experiment Name: Zm_50mM_NH4NO3_L_to_H_P Parameter: Tissue Value: Leaves
  misc_feature: MA Experiment 20000488 PARAMETER Experiment Name: Zm_50mM_NH4NO3_L_to_H_P Parameter: Treatment Value: 50mM NH4NO3 vs. 100mM Mannitol
ctccggcctttgccgcttccacagggagtccggggccatgcagagctccgtaaagctcgcggtgcttgctctactgctagcggcagcagctcaccacggtctgctgccgctgccgacggcgcgatgctactggctcaacccggagatctacgacgccggcgggctgagccgccgcgcgttcccggacggcttcgtcttcgggacggccgcgtcggcgtaccaggtcgaggggatggccaagcacggcgggcggggccccagcatctgggacgccttcatagaggttcctgggaccatccctaacaatgccaccgctgacgtgacggtcgacgagtatcatcggtacaaggaagatgtgaacataatgaagaacatgggctttgatgcgtaccggttttcgatctcttggtcgaggattttcccagatggaactggcaaggtgaaccaggaaggagtggattactacaacaggctcatagattacatgctccagcaaggtatcgcgccgtatgcaaatctctaccattatgacctcccattggcactccatgaacagtacctgggctggcttagcccaaagattgtggaggcgtttgcagactacgccgagttctgcttccacgcgttcggagacagggtgaagaactggtttaccttcaacgagccgaggtgcgtcgctgctctgggctacgacaatggcttgcacgcaccgggaaggtgttccgggtgccccgccggaggcaactccaccacggagccgtaccttgtcgcacaccatctcatcctttctcatgcagctgcggtcaggcgataccgcgacaagtatcagcttcaccagaaggggaagattggaattctcctggatttcgtgtggtacgaacctttcagcgacagcaatgcggaccaggctgcagcacagcgagccagggacttccacctaggctggttccttgaccccattgtacatggacggtacccgtactcgatgcaagagattgccaaagacaggctaccgttgttcagcgatgaagaagccaggatggtgaaaggctctatagactatgttggcatcaaccactacacttctttctacatgaaggaccctgggacatggaacctgacgccagtcagctaccaggatgattggcatgttggttttgtctacgaacgaaatggagttcctattggcgctcacgcaaactcctactggctgtacattgtgccgtggggcatcaacaaggctgtcagctatgtcaaggaaacttacaaaaatcttacaatgatccttgctgaaaacggaatggaccaacctggtgatgtcagtattactcagggtgtgcatgacacagtaagaatccgttattacagagactacataactgagctcaagaaagcaatagatgatggtgccagagtcattgggtactttgcgtggtcgctgcttgacaacttcgagtggaggcttgggtacacttcgcggtttggcttggtgtacgtggactacaagactctgaagaggtaccccaaggactcagctttctggttcaagcatatgctgtccaagaaaaggagctagagaattgcagacaagaggaccactggcttcaggtgtcatacaaaagttcactctgcaaatcctcttagtatgtcagatttagcttaagaaaccgtgcagacaattgagtctcaaggctcgacatctctagcttcgttaattgttgcaaggcaataaattggtatcttc

SEQ ID NO: 12268 - protein, 524 aa, Zea mays subsp. mays
  peptide (1)..(524): Ceres Seq. ID no. 12348829
  misc_feature (56)..(523): Pfam Name: Glycosyl hydrolase family 1 Pfam Description: Glycosyl hydrolase family 1
  misc_feature (19)..(523): Homolog of NCBI NO: 34899014 NR Description: putative non-cyanogenic beta-glucosidase
  misc_feature (13)..(524): Homolog of NCBI NO: 1362162 NR Description: beta-glucosidase BGQ60 precursor - barley
  misc_feature (45)..(523): Homolog of NCBI NO: 17226270 NR Description: beta-mannosidase enzyme [Lycopersicon esculentum]
  misc_feature (53)..(521): Homolog of NCBI NO: 15229584 NR Description: glycosyl hydrolase family 1; protein id: supported by cDNA: 11984. [Arabidopsis thaliana]
  misc_feature (21)..(519): Homolog of NCBI NO: 18875458 NR Description: beta-glucosidase [Oryza sativa]
  misc_feature (53)..(521): Homolog of NCBI NO: 22331147 NR Description: glycosyl hydrolase family 1; protein id:
  misc_feature (53)..(521): Homolog of NCBI NO: 9294062 NR Description: beta-glucosidase [Arabidopsis thaliana]
  misc_feature (53)..(519): Homolog of NCBI NO: 22658440 NR Description: beta-glucosidase [Oryza sativa (japonica
  misc_feature (12)..(519): Homolog of NCBI NO: 6979913 NR Description: prunasin hydrolase isoform PHA precursor [Prunus
  misc_feature (247)..(524): Homolog of NCBI NO: 6103585 NR Description: raucaffricine-O-beta-D-glucosidase [Rauvolfia
SGLCRFHRESGAMQSSVKLAVLALLLAAAAHHGLLPLPTARCYWLNPEIYDAGGLSRRAFPDGFVFGTAASAYQVEGMAKHGGRGPSIWDAFIEVPGTIPNNATADVTVDEYHRYKEDVNIMKNMGFDAYRFSISWSRIFPDGTGKVNQEGVDYYNRLIDYMLQQGIAPYANLYHYDLPLALHEQYLGWLSPKIVEAFADYAEFCFHAFGDRVKNWFTFNEPRCVAALGYDNGLHAPGRCSGCPAGGNSTTEPYLVAHHLILSHAAAVRRYRDKYQLHQKGKIGILLDFVWYEPFSDSNADQAAAQRARDFHLGWFLDPIVHGRYPYSMQEIAKDRLPLFSDEEARMVKGSIDYVGINHYTSFYMKDPGTWNLTPVSYQDDWHVGFVYERNGVPIGAHANSYWLYIVPWGINKAVSYVKETYKNLTMILAENGMDQPGDVSITQGVHDTVRIRYYRDYITELKKAIDDGARVIGYFAWSLLDNFEWRLGYTSRFGLVYVDYKTLKRYPKDSAFWFKHMLSKKRS

SEQ ID NO: 12269 - protein, 512 aa, Zea mays subsp. mays
  peptide (1)..(512): Ceres Seq. ID no. 12348830
  misc_feature (44)..(511): Pfam Name: Glycosyl hydrolase family 1 Pfam Description: Glycosyl hydrolase family 1
  misc_feature (7)..(511): Homolog of NCBI NO: 34899014 NR Description: putative non-cyanogenic beta-glucosidase
  misc_feature (1)..(512): Homolog of NCBI NO: 1362162 NR Description: beta-glucosidase BGQ60 precursor - barley
  misc_feature (33)..(511): Homolog of NCBI NO: 17226270 NR Description: beta-mannosidase enzyme [Lycopersicon esculentum]
  misc_feature (41)..(509): Homolog of NCBI NO: 15229584 NR Description: glycosyl hydrolase family 1; protein id: supported by cDNA: 11984. [Arabidopsis thaliana]
  misc_feature (9)..(507): Homolog of NCBI NO: 18875458 NR Description: beta-glucosidase [Oryza sativa]
  misc_feature (41)..(509): Homolog of NCBI NO: 22331147 NR Description: glycosyl hydrolase family 1; protein id:
  misc_feature (41)..(509): Homolog of NCBI NO: 9294062 NR Description: beta-glucosidase [Arabidopsis thaliana]
  misc_feature (41)..(507): Homolog of NCBI NO: 22658440 NR Description: beta-glucosidase [Oryza sativa (japonica
  misc_feature (1)..(507): Homolog of NCBI NO: 6979913 NR Description: prunasin hydrolase isoform PHA precursor [Prunus
  misc_feature (235)..(512): Homolog of NCBI NO: 6103585 NR Description: raucaffricine-O-beta-D-glucosidase [Rauvolfia
MQSSVKLAVLALLLAAAAHHGLLPLPTARCYWLNPEIYDAGGLSRRAFPDGFVFGTAASAYQVEGMAKHGGRGPSIWDAFIEVPGTIPNNATADVTVDEYHRYKEDVNIMKNMGFDAYRFSISWSRIFPDGTGKVNQEGVDYYNRLIDYMLQQGIAPYANLYHYDLPLALHEQYLGWLSPKIVEAFADYAEFCFHAFGDRVKNWFTFNEPRCVAALGYDNGLHAPGRCSGCPAGGNSTTEPYLVAHHLILSHAAAVRRYRDKYQLHQKGKIGILLDFVWYEPFSDSNADQAAAQRARDFHLGWFLDPIVHGRYPYSMQEIAKDRLPLFSDEEARMVKGSIDYVGINHYTSFYMKDPGTWNLTPVSYQDDWHVGFVYERNGVPIGAHANSYWLYIVPWGINKAVSYVKETYKNLTMILAENGMDQPGDVSITQGVHDTVRIRYYRDYITELKKAIDDGARVIGYFAWSLLDNFEWRLGYTSRFGLVYVDYKTLKRYPKDSAFWFKHMLSKKRS

SEQ ID NO: 12270 - protein, 447 aa, Zea mays subsp. mays
  peptide (1)..(447): Ceres Seq. ID no. 12348831
  misc_feature (1)..(446): Pfam Name: Glycosyl hydrolase family 1 Pfam Description: Glycosyl hydrolase family 1
  misc_feature (1)..(446): Homolog of NCBI NO: 34899014 NR Description: putative non-cyanogenic beta-glucosidase
  misc_feature (1)..(447): Homolog of NCBI NO: 1362162 NR Description: beta-glucosidase BGQ60 precursor - barley
  misc_feature (1)..(446): Homolog of NCBI NO: 17226270 NR Description: beta-mannosidase enzyme [Lycopersicon esculentum]
  misc_feature (1)..(444): Homolog of NCBI NO: 15229584 NR Description: glycosyl hydrolase family 1; protein id: supported by cDNA: 11984. [Arabidopsis thaliana]
  misc_feature (1)..(442): Homolog of NCBI NO: 18875458 NR Description: beta-glucosidase [Oryza sativa]
  misc_feature (1)..(444): Homolog of NCBI NO: 22331147 NR Description: glycosyl hydrolase family 1; protein id:
  misc_feature (1)..(444): Homolog of NCBI NO: 9294062 NR Description: beta-glucosidase [Arabidopsis thaliana]
  misc_feature (1)..(442): Homolog of NCBI NO: 22658440 NR Description: beta-glucosidase [Oryza sativa (japonica
  misc_feature (1)..(442): Homolog of NCBI NO: 6979913 NR Description: prunasin hydrolase isoform PHA precursor [Prunus
  misc_feature (170)..(447): Homolog of NCBI NO: 6103585 NR Description: raucaffricine-O-beta-D-glucosidase [Rauvolfia
MAKHGGRGPSIWDAFIEVPGTIPNNATADVTVDEYHRYKEDVNIMKNMGFDAYRFSISWSRIFPDGTGKVNQEGVDYYNRLIDYMLQQGIAPYANLYHYDLPLALHEQYLGWLSPKIVEAFADYAEFCFHAFGDRVKNWFTFNEPRCVAALGYDNGLHAPGRCSGCPAGGNSTTEPYLVAHHLILSHAAAVRRYRDKYQLHQKGKIGILLDFVWYEPFSDSNADQAAAQRARDFHLGWFLDPIVHGRYPYSMQEIAKDRLPLFSDEEARMVKGSIDYVGINHYTSFYMKDPGTWNLTPVSYQDDWHVGFVYERNGVPIGAHANSYWLYIVPWGINKAVSYVKETYKNLTMILAENGMDQPGDVSITQGVHDTVRIRYYRDYITELKKAIDDGARVIGYFAWSLLDNFEWRLGYTSRFGLVYVDYKTLKRYPKDSAFWFKHMLSKKRS

SEQ ID NO: 12271 - DNA, 1906 bp, Zea mays subsp. mays
  misc_feature (1)..(1906): Ceres Seq. ID no. 12345740
  misc_feature: MA Experiment ID: 108523 Result: Down-regulated in Transcription
  misc_feature: MA Experiment 108523 PARAMETER Experiment Name: Zm_42deg_Heat_P Parameter: Age (day) Value: 8
  misc_feature: MA Experiment 108523 PARAMETER Experiment Name: Zm_42deg_Heat_P Parameter: Organism Value: Zea mays
  misc_feature: MA Experiment 108523 PARAMETER Experiment Name: Zm_42deg_Heat_P Parameter: Plant Line Value: 35A19
  misc_feature: MA Experiment 108523 PARAMETER Experiment Name: Zm_42deg_Heat_P Parameter: Temperature (deg C) Value: 42 vs. 22
  misc_feature: MA Experiment 108523 PARAMETER Experiment Name: Zm_42deg_Heat_P Parameter: Timepoint (hr) Value: 6
  misc_feature: MA Experiment 108523 PARAMETER Experiment Name: Zm_42deg_Heat_P Parameter: Tissue Value: Aerial
  misc_feature: MA Experiment ID: 108535 Result: Down-regulated in Transcription
  misc_feature: MA Experiment 108535 PARAMETER Experiment Name: Zm_Meristem_P Parameter: Age (day) Value: 8
  misc_feature: MA Experiment 108535 PARAMETER Experiment Name: Zm_Meristem_P Parameter: Organism Value: Zea mays
  misc_feature: MA Experiment 108535 PARAMETER Experiment Name: Zm_Meristem_P Parameter: Plant Line Value: 35A19
  misc_feature: MA Experiment 108535 PARAMETER Experiment Name: Zm_Meristem_P Parameter: Tissue Value: Root Meristem vs. Above Root Meristem
  misc_feature: MA Experiment ID: 108536 Result: Down-regulated in Transcription
  misc_feature: MA Experiment 108536 PARAMETER Experiment Name: Zm_Meristem_P Parameter: Age (day) Value: 8
  misc_feature: MA Experiment 108536 PARAMETER Experiment Name: Zm_Meristem_P Parameter: Organism Value: Zea mays
  misc_feature: MA Experiment 108536 PARAMETER Experiment Name: Zm_Meristem_P Parameter: Plant Line Value: 35A19
  misc_feature: MA Experiment 108536 PARAMETER Experiment Name: Zm_Meristem_P Parameter: Tissue Value: Shoot Meristem vs. Above Shoot Meristem
  misc_feature: MA Experiment ID: 108545 Result: Up-regulated in Transcription
  misc_feature: MA Experiment 108545 PARAMETER Experiment Name: Zm_Imbibed_Seeds_P Parameter: Age (day) Value: 3 vs. 2
  misc_feature: MA Experiment 108545 PARAMETER Experiment Name: Zm_Imbibed_Seeds_P Parameter: Organism Value: Zea mays
  misc_feature: MA Experiment 108545 PARAMETER Experiment Name: Zm_Imbibed_Seeds_P Parameter: Plant Line Value: 35A19
  misc_feature: MA Experiment 108545 PARAMETER Experiment Name: Zm_Imbibed_Seeds_P Parameter: Tissue Value: Aerial vs. Embryo
  misc_feature: MA Experiment ID: 108547 Result: Up-regulated in Transcription
  misc_feature: MA Experiment 108547 PARAMETER Experiment Name: Zm_Imbibed_Seeds_P Parameter: Age (day) Value: 4 vs. 2
  misc_feature: MA Experiment 108547 PARAMETER Experiment Name: Zm_Imbibed_Seeds_P Parameter: Organism Value: Zea mays
  misc_feature: MA Experiment 108547 PARAMETER Experiment Name: Zm_Imbibed_Seeds_P Parameter: Plant Line Value: 35A19
  misc_feature: MA Experiment 108547 PARAMETER Experiment Name: Zm_Imbibed_Seeds_P Parameter: Tissue Value: Aerial vs. Embryo
  misc_feature: MA Experiment ID: 108689 Result: Up-regulated in Transcription
  misc_feature: MA Experiment 108689 PARAMETER Experiment Name: Zm_Drought_Roots_P Parameter: Age (day) Value: 9
  misc_feature: MA Experiment 108689 PARAMETER Experiment Name: Zm_Drought_Roots_P Parameter: Organism Value: Zea mays
  misc_feature: MA Experiment 108689 PARAMETER Experiment Name: Zm_Drought_Roots_P Parameter: Plant Line Value: 35A19
  misc_feature: MA Experiment 108689 PARAMETER Experiment Name: Zm_Drought_Roots_P Parameter: Timepoint (hr) Value: 24
  misc_feature: MA Experiment 108689 PARAMETER Experiment Name: Zm_Drought_Roots_P Parameter: Tissue Value: Roots
  misc_feature: MA Experiment 108689 PARAMETER Experiment Name: Zm_Drought_Roots_P Parameter: Treatment Value: Drought vs. No Drought
acttcacctcttctgcttccttctccccagcatacagtgccagacaggatacccacacattcatggaggtggttcaagaagtccttaggcatggctcagcagatagtgtccgtgctgtcataagagctaacaaaaagagctacagccttgtccagctcattgcagcctcttttgatgtctacaacattttgtgcagcaaaaatatgacaccaaatgggatgcaagattcttcttccaaaggaagaaatggaacaggattccttcatggagctcgtgttggcattgtggctaaaccctctcctgaatttgttgctggggtatttggaacctggctttctggtggagttgcagtaccccttgcccttagctatccagaagctgagcttcttcatgtcatgaatgactcagatatttcaatggttttaagcaccaaggagcatcacgaaatcatggagaacctttctatcaagtgttctgcttattgttctattcttccatctgtcactagtataccttcagaaatcaatcctcaagaaccttcaagcaatgaggcgatttcatcagtctctactttaataactgagaccaacagttcaaagaaaatcaaaggcgatgaccctgctcttatcctttacacaagtggcacaactggtaaacctaaaggagtagttcacacccatgagggcattctttctcaggttcagattctatctgaagcgtggggatatcgaagtgaagaccaatttctgcactgtctcccgctgcaccatgtgcatgggcttttcaatgctctatttgcgcccctttattcaggatcagtggttgagtttataccaaaattcagtgtaagcgggatatggcagagatggcgagaatcatatcccaacgatgcgagtaaaagtacagaggccattacagtatttactggagttccaaccatgtatacacgtctgctgcaagggtatgatagtatggatcctgatcaaaagtcggcctcttcttacgctgcaaagcatctgaggttaatgatgtgtggatcatcagctcttccttccccacttatgaagaggtgggaggaagtgacaggccatcgtcttttggaacgctatggtatgactgagtttgtcatggcactgtctaatccattgcatggtatccgaaaagaaggtacagttggtaaacctcttccacgcattgaggccaagatcattatggaggacggggctgaaactacaactggagttggcgagctctgcattagaagtccatctcttttcaaggagtattggaaaagaccagaggtcaccgcagaatctttcattgatggaggattcttcaagacaggtgatacagtaactgtagatgaggaaggatacttcataattttgggacgcacaaatgccgacattatgaaatttggcggttacaagctgtcagcattagaaattgaggcagtactgttagagcatgatgctgtactggaatgtgctgtccttggcttgcctgatgaagcctatggggaggttatatgtgcaataattgtgcctaaggaggatgcaaagaaaaaggctggacaggactcaaagccagcgctaaccttggaagcattaacaagttggtcgaaagataagcttgctccatacaagattccaacaagactatacttgtgggattctcttcctcggaatgccatgggaaaggttaacaagaaggagctgaagaaattgttaggagcttagccatgtgtatagatgtatttatctcttcatttccttcttaaagtttagcaagtcgggctcattatattgattagcgaataagtgctttcgttaccatggaccaataatcttcgaaacggcccgagttatactgcgcacacatttatttatcagaaaagtttctagtc

SEQ ID NO: 12272 - protein, 578 aa, Zea mays subsp. mays
  peptide (1)..(578): Ceres Seq. ID no. 12345741
  misc_feature (89)..(497): Pfam Name: AMP-binding enzyme Pfam Description: AMP-binding enzyme
  misc_feature (21)..(576): Homolog of NCBI NO: 21536867 NR Description: putative long-chain acyl-CoA synthetase
  misc_feature (3)..(576): Homolog of NCBI NO: 9294464 NR Description: long-chain-fatty-acid-CoA ligase-like protein
  misc_feature (21)..(576): Homolog of NCBI NO: 18401035 NR Description: putative long-chain acyl-CoA synthetase; protein
  misc_feature (6)..(233): Homolog of NCBI NO: 34909750 NR Description: hypothetical protein~similar to Arabidopsis
  misc_feature (434)..(578): Homolog of NCBI NO: 34909750 NR Description: hypothetical protein~similar to Arabidopsis
  misc_feature (207)..(578): Homolog of NCBI NO: 23127962 NR Description: hypothetical protein [Nostoc punctiforme]
  misc_feature (87)..(176): Homolog of NCBI NO: 23127962 NR Description: hypothetical protein [Nostoc punctiforme]
  misc_feature (162)..(578): Homolog of NCBI NO: 37520691 NR Description: probable long chain fatty acid CoA ligase violaceus] >gi|35211686|dbj|BAC89063.1| glr1122 [Gloeobacter
  misc_feature (82)..(154): Homolog of NCBI NO: 37520691 NR Description: probable long chain fatty acid CoA ligase violaceus] >gi|35211686|dbj|BAC89063.1| glr1122 [Gloeobacter
  misc_feature (85)..(406): Homolog of NCBI NO: 28372537 NR Description: hypothetical protein LOC197322 [Homo sapiens]
FTSSASFSPAYSARQDTHTFMEVVQEVLRHGSADSVRAVIRANKKSYSLVQLIAASFDVYNILCSKNMTPNGMQDSSSKGRNGTGFLHGARVGIVAKPSPEFVAGVFGTWLSGGVAVPLALSYPEAELLHVMNDSDISMVLSTKEHHEIMENLSIKCSAYCSILPSVTSIPSEINPQEPSSNEAISSVSTLITETNSSKKIKGDDPALILYTSGTTGKPKGVVHTHEGILSQVQILSEAWGYRSEDQFLHCLPLHHVHGLFNALFAPLYSGSVVEFIPKFSVSGIWQRWRESYPNDASKSTEAITVFTGVPTMYTRLLQGYDSMDPDQKSASSYAAKHLRLMMCGSSALPSPLMKRWEEVTGHRLLERYGMTEFVMALSNPLHGIRKEGTVGKPLPRIEAKIIMEDGAETTTGVGELCIRSPSLFKEYWKRPEVTAESFIDGGFFKTGDTVTVDEEGYFIILGRTNADIMKFGGYKLSALEIEAVLLEHDAVLECAVLGLPDEAYGEVICAIIVPKEDAKKKAGQDSKPALTLEALTSWSKDKLAPYKIPTRLYLWDSLPRNAMGKVNKKELKKLLGA

SEQ ID NO: 12273 - protein, 558 aa, Zea mays subsp. mays
  peptide (1)..(558): Ceres Seq. ID no. 12345742
  misc_feature (69)..(477): Pfam Name: AMP-binding enzyme Pfam Description: AMP-binding enzyme
  misc_feature (1)..(556): Homolog of NCBI NO: 21536867 NR Description: putative long-chain acyl-CoA synthetase
  misc_feature (1)..(556): Homolog of NCBI NO: 9294464 NR Description: long-chain-fatty-acid-CoA ligase-like protein
  misc_feature (1)..(556): Homolog of NCBI NO: 18401035 NR Description: putative long-chain acyl-CoA synthetase; protein
  misc_feature (1)..(213): Homolog of NCBI NO: 34909750 NR Description: hypothetical protein~similar to Arabidopsis
  misc_feature (414)..(558): Homolog of NCBI NO: 34909750 NR Description: hypothetical protein~similar to Arabidopsis
  misc_feature (187)..(558): Homolog of NCBI NO: 23127962 NR Description: hypothetical protein [Nostoc punctiforme]
  misc_feature (67)..(156): Homolog of NCBI NO: 23127962 NR Description: hypothetical protein [Nostoc punctiforme]
  misc_feature (142)..(558): Homolog of NCBI NO: 37520691 NR Description: probable long chain fatty acid CoA ligase violaceus] >gi|35211686|dbj|BAC89063.1| glr1122 [Gloeobacter
  misc_feature (62)..(134): Homolog of NCBI NO: 37520691 NR Description: probable long chain fatty acid CoA ligase violaceus] >gi|35211686|dbj|BAC89063.1| glr1122 [Gloeobacter
  misc_feature (65)..(386): Homolog of NCBI NO: 28372537 NR Description: hypothetical protein LOC197322 [Homo sapiens]
MEVVQEVLRHGSADSVRAVIRANKKSYSLVQLIAASFDVYNILCSKNMTPNGMQDSSSKGRNGTGFLHGARVGIVAKPSPEFVAGVFGTWLSGGVAVPLALSYPEAELLHVMNDSDISMVLSTKEHHEIMENLSIKCSAYCSILPSVTSIPSEINPQEPSSNEAISSVSTLITETNSSKKIKGDDPALILYTSGTTGKPKGVVHTHEGILSQVQILSEAWGYRSEDQFLHCLPLHHVHGLFNALFAPLYSGSVVEFIPKFSVSGIWQRWRESYPNDASKSTEAITVFTGVPTMYTRLLQGYDSMDPDQKSASSYAAKHLRLMMCGSSALPSPLMKRWEEVTGHRLLERYGMTEFVMALSNPLHGIRKEGTVGKPLPRIEAKIIMEDGAETTTGVGELCIRSPSLFKEYWKRPEVTAESFIDGGFFKTGDTVTVDEEGYFIILGRTNADIMKFGGYKLSALEIEAVLLEHDAVLECAVLGLPDEAYGEVICAIIVPKEDAKKKAGQDSKPALTLEALTSWSKDKLAPYKIPTRLYLWDSLPRNAMGKVNKKELKKLLGA

SEQ ID NO: 12274 - protein, 511 aa, Zea mays subsp. mays
  peptide (1)..(511): Ceres Seq. ID no. 12345743
  misc_feature (22)..(430): Pfam Name: AMP-binding enzyme Pfam Description: AMP-binding enzyme
  misc_feature (1)..(509): Homolog of NCBI NO: 21536867 NR Description: putative long-chain acyl-CoA synthetase
  misc_feature (1)..(509): Homolog of NCBI NO: 9294464 NR Description: long-chain-fatty-acid-CoA ligase-like protein
  misc_feature (1)..(509): Homolog of NCBI NO: 18401035 NR Description: putative long-chain acyl-CoA synthetase; protein
  misc_feature (1)..(166): Homolog of NCBI NO: 34909750 NR Description: hypothetical protein~similar to Arabidopsis
  misc_feature (367)..(511): Homolog of NCBI NO: 34909750 NR Description: hypothetical protein~similar to Arabidopsis
  misc_feature (140)..(511): Homolog of NCBI NO: 23127962 NR Description: hypothetical protein [Nostoc punctiforme]
  misc_feature (20)..(109): Homolog of NCBI NO: 23127962 NR Description: hypothetical protein [Nostoc punctiforme]
  misc_feature (95)..(511): Homolog of NCBI NO: 37520691 NR Description: probable long chain fatty acid CoA ligase violaceus] >gi|35211686|dbj|BAC89063.1| glr1122 [Gloeobacter
  misc_feature (15)..(87): Homolog of NCBI NO: 37520691 NR Description: probable long chain fatty acid CoA ligase violaceus] >gi|35211686|dbj|BAC89063.1| glr1122 [Gloeobacter
  misc_feature (18)..(339): Homolog of NCBI NO: 28372537 NR Description: hypothetical protein LOC197322 [Homo sapiens]
MTPNGMQDSSSKGRNGTGFLHGARVGIVAKPSPEFVAGVFGTWLSGGVAVPLALSYPEAELLHVMNDSDISMVLSTKEHHEIMENLSIKCSAYCSILPSVTSIPSEINPQEPSSNEAISSVSTLITETNSSKKIKGDDPALILYTSGTTGKPKGVVHTHEGILSQVQILSEAWGYRSEDQFLHCLPLHHVHGLFNALFAPLYSGSVVEFIPKFSVSGIWQRWRESYPNDASKSTEAITVFTGVPTMYTRLLQGYDSMDPDQKSASSYAAKHLRLMMCGSSALPSPLMKRWEEVTGHRLLERYGMTEFVMALSNPLHGIRKEGTVGKPLPRIEAKIIMEDGAETTTGVGELCIRSPSLFKEYWKRPEVTAESFIDGGFFKTGDTVTVDEEGYFIILGRTNADIMKFGGYKLSALEIEAVLLEHDAVLECAVLGLPDEAYGEVICAIIVPKEDAKKKAGQDSKPALTLEALTSWSKDKLAPYKIPTRLYLWDSLPRNAMGKVNKKELKKLLGA

SEQ ID NO: 12275 - DNA, 1617 bp, Zea mays subsp. mays
  misc_feature (1)..(1617): Ceres Seq. ID no. 13494824
  misc_feature: MA Experiment ID: 108522 Result: Up-regulated in Transcription
  misc_feature: MA Experiment 108522 PARAMETER Experiment Name: Zm_42deg_Heat_P Parameter: Age (day) Value: 8
  misc_feature: MA Experiment 108522 PARAMETER Experiment Name: Zm_42deg_Heat_P Parameter: Organism Value: Zea mays
  misc_feature: MA Experiment 108522 PARAMETER Experiment Name: Zm_42deg_Heat_P Parameter: Plant Line Value: 35A19
  misc_feature: MA Experiment 108522 PARAMETER Experiment Name: Zm_42deg_Heat_P Parameter: Temperature (deg C) Value: 42 vs. 22
  misc_feature: MA Experiment 108522 PARAMETER Experiment Name: Zm_42deg_Heat_P Parameter: Timepoint (hr) Value: 1
  misc_feature: MA Experiment 108522 PARAMETER Experiment Name: Zm_42deg_Heat_P Parameter: Tissue Value: Aerial
  misc_feature: MA Experiment ID: 108523 Result: Up-regulated in Transcription
  misc_feature: MA Experiment 108523 PARAMETER Experiment Name: Zm_42deg_Heat_P Parameter: Age (day) Value: 8
  misc_feature: MA Experiment 108523 PARAMETER Experiment Name: Zm_42deg_Heat_P Parameter: Organism Value: Zea mays
  misc_feature: MA Experiment 108523 PARAMETER Experiment Name: Zm_42deg_Heat_P Parameter: Plant Line Value: 35A19
  misc_feature: MA Experiment 108523 PARAMETER Experiment Name: Zm_42deg_Heat_P Parameter: Temperature (deg C) Value: 42 vs. 22
  misc_feature: MA Experiment 108523 PARAMETER Experiment Name: Zm_42deg_Heat_P Parameter: Timepoint (hr) Value: 6
  misc_feature: MA Experiment 108523 PARAMETER Experiment Name: Zm_42deg_Heat_P Parameter: Tissue Value: Aerial
  misc_feature: MA Experiment ID: 108527 Result: Up-regulated in Transcription
  misc_feature: MA Experiment 108527 PARAMETER Experiment Name: Zm_5mM_NO_P Parameter: Age (day) Value: 8
  misc_feature: MA Experiment 108527 PARAMETER Experiment Name: Zm_5mM_NO_P Parameter: Organism Value: Zea mays
  misc_feature: MA Experiment 108527 PARAMETER Experiment Name: Zm_5mM_NO_P Parameter: Plant Line Value: 35A19
  misc_feature: MA Experiment 108527 PARAMETER Experiment Name: Zm_5mM_NO_P Parameter: Timepoint (hr) Value: 6
  misc_feature: MA Experiment 108527 PARAMETER Experiment Name: Zm_5mM_NO_P Parameter: Tissue Value: Aerial
  misc_feature: MA Experiment 108527 PARAMETER Experiment Name: Zm_5mM_NO_P Parameter: Treatment Value: 5mM NO vs. No Treatment
agccaaatcgaaggagattgaacgaagcagcccagccaaattcccctcgccgccccgtcccttctcgacatttcttgtcccgtcgtcgcctcaatctcgaagcctctccggcggagccgcctcatcatgttccgaaggcctccaaccaaacatcctctagggtttccgcatcgtccgtcgcgatgggcttcacgaagcggtcgccccagcatcccgcctccccagccggcggcgaggtcggcgcccagacggcagggaaggtcacaccagtgccggcggcgccggagtcggcgcccgcggcggtggtgccgaggcctccggacgtggcgcccttcctgaccaaggtctacgacatggtctccgacccggccaccgacgcggtcatctcctggagcgccgccggcggcagtttcgtgatctgggactcgcacgctttcgagcgcgacctgctgccgcggcacttcaagcacaatcacttcaccagcttcatacgccagctcaacacctacggatttcataaagttgatccagatagatgggaatgggccaatgaaggctttgttaagggccaaaaacatcttttgaagaccatcaagagaaagaagaaatcctctcaggatgtacctagtgatctgcagtcggtgcctgtcaaaactgcacctggcactgagaatatcgagataggaaaatatggaggccttgaaaaggaggttgagacacttaagagggacaaggcccttctaatgcagcagcttgtagatctacggcagtaccagcaatcatctagcgctgaagtgcagaatttaattcaacgcctccgtgtgatggagcagaaccagcagcagatgatggcacttttggcaattgttgtccagaatccagacttcctgaaccagctcgtgcagcagcagcgcaggagtaactggtggaatgatgatggtaacaggaaaagaaggttccaagctctggaacatggtcctgtagatgaccaagagacttctggtggaggcgcacaaattattcaatatcgtcctcctgttcctgaaacttccaatcagccaataccagcaaatgaagctttctattcaacccctgcacaaccagcttcaagccctgcacttgagatgcccatggatgtagagatgacttcaaacaatgttaatacctttgattcaactggcaatgattttactgacacctctgctctatgtgaatggtatgacatggatatatttggtgatgaacttgagcacattcttcaacagccagagcaggactttcaagtggaccctcctttaacagttgaggattatggttatgatcatccacggttagagcaggactatcagatggaagcacaacagaattgcaaaaatcctcaatatgttgcctgtgtcttgaagcaaagggaaagccatgcatctgatgtccattagtactgatcagtttgagctgatgtcataactgaagcatgagcggtggtcccccagaatgttgtccagtaacattagtggatagagatttgtgatgaacagaatcttgagactggcaggttagccaccattgggaacctgaagaccgtcgggattgctcagaattcagtatactaatactaat

SEQ ID NO: 12276 - protein, 477 aa, Zea mays subsp. mays
  peptide (1)..(477): Ceres Seq. ID no. 13494825
  misc_feature (109)..(286): Pfam Name: HSF-type DNA-binding Pfam Description: HSF-type DNA-binding
  misc_feature (61)..(461): Homolog of NCBI NO: 34902282 NR Description: Putative heat shock factor 3 [Oryza sativa
  misc_feature (81)..(350): Homolog of NCBI NO: 29126355 NR Description: putative heat shock transcription factor [Oryza
  misc_feature (71)..(364): Homolog of NCBI NO: 729775 NR Description: HEAT SHOCK FACTOR PROTEIN HSF8 (HEAT SHOCK FACTOR 8) (HSTF 8) (HEAT STRESS TRANSCRIPTION FACTOR)
  misc_feature (90)..(367): Homolog of NCBI NO: 25296101 NR Description: heat shock transcription factor HSF3 [imported] - thaliana (fragment) >gi|3256068|emb|CAA74397.1| Heat Shock Factor
  misc_feature (90)..(367): Homolog of NCBI NO: 27261140 NR Description: HSF3 DNA-binding domain/VP16 activation domain
  misc_feature (90)..(367): Homolog of NCBI NO: 30686034 NR Description: heat shock transcription factor 3 (HSF3) thaliana] >gi|30686038|ref|NP_850832.1| heat shock transcription
  misc_feature (80)..(344): Homolog of NCBI NO: 15236631 NR Description: heat shock transcription factor 1 (HSF1) thaliana] >gi|12644262|sp|P41151|HSF1_ARATH Heat shock factor
  misc_feature (80)..(344): Homolog of NCBI NO: 429155 NR Description: heat shock factor [Arabidopsis thaliana]
  misc_feature (71)..(364): Homolog of NCBI NO: 11386827 NR Description: Heat shock factor protein HSF8 (Heat shock factor 8) (HSTF 8) (Heat stress transcription factor)
  misc_feature (93)..(348): Homolog of NCBI NO: 15223168 NR Description: heat shock transcription factor family
PNRRRLNEAAQPNSPRRPVPSRHFLSRRRLNLEASPAEPPHHVPKASNQTSSRVSASSVAMGFTKRSPQHPASPAGGEVGAQTAGKVTPVPAAPESAPAAVVPRPPDVAPFLTKVYDMVSDPATDAVISWSAAGGSFVIWDSHAFERDLLPRHFKHNHFTSFIRQLNTYGFHKVDPDRWEWANEGFVKGQKHLLKTIKRKKKSSQDVPSDLQSVPVKTAPGTENIEIGKYGGLEKEVETLKRDKALLMQQLVDLRQYQQSSSAEVQNLIQRLRVMEQNQQQMMALLAIVVQNPDFLNQLVQQQRRSNWWNDDGNRKRRFQALEHGPVDDQETSGGGAQIIQYRPPVPETSNQPIPANEAFYSTPAQPASSPALEMPMDVEMTSNNVNTFDSTGNDFTDTSALCEWYDMDIFGDELEHILQQPEQDFQVDPPLTVEDYGYDHPRLEQDYQMEAQQNCKNPQYVACVLKQRESHASDVH

SEQ ID NO: 12277 - protein, 417 aa, Zea mays subsp. mays
  peptide (1)..(417): Ceres Seq. ID no. 13494826
  misc_feature (49)..(226): Pfam Name: HSF-type DNA-binding Pfam Description: HSF-type DNA-binding
  misc_feature (1)..(401): Homolog of NCBI NO: 34902282 NR Description: Putative heat shock factor 3 [Oryza sativa
  misc_feature (21)..(290): Homolog of NCBI NO: 29126355 NR Description: putative heat shock transcription factor [Oryza
  misc_feature (11)..(304): Homolog of NCBI NO: 729775 NR Description: HEAT SHOCK FACTOR PROTEIN HSF8 (HEAT SHOCK FACTOR 8) (HSTF 8) (HEAT STRESS TRANSCRIPTION FACTOR)
  misc_feature (30)..(307): Homolog of NCBI NO: 25296101 NR Description: heat shock transcription factor HSF3 [imported] - thaliana (fragment) >gi|3256068|emb|CAA74397.1| Heat Shock Factor
  misc_feature (30)..(307): Homolog of NCBI NO: 30686034 NR Description: heat shock transcription factor 3 (HSF3) thaliana] >gi|30686038|ref|NP_850832.1| heat shock transcription
  misc_feature (30)..(307): Homolog of NCBI NO: 27261140 NR Description: HSF3 DNA-binding domain/VP16 activation domain
  misc_feature (20)..(284): Homolog of NCBI NO: 15236631 NR Description: heat shock transcription factor 1 (HSF1) thaliana] >gi|12644262|sp|P41151|HSF1_ARATH Heat shock factor
  misc_feature (20)..(284): Homolog of NCBI NO: 429155 NR Description: heat shock factor [Arabidopsis thaliana]
  misc_feature (11)..(304): Homolog of NCBI NO: 11386827 NR Description: Heat shock factor protein HSF8 (Heat shock factor 8) (HSTF 8) (Heat stress transcription factor)
  misc_feature (33)..(288): Homolog of NCBI NO: 15223168 NR Description: heat shock transcription factor family
MGFTKRSPQHPASPAGGEVGAQTAGKVTPVPAAPESAPAAVVPRPPDVAPFLTKVYDMVSDPATDAVISWSAAGGSFVIWDSHAFERDLLPRHFKHNHFTSFIRQLNTYGFHKVDPDRWEWANEGFVKGQKHLLKTIKRKKKSSQDVPSDLQSVPVKTAPGTENIEIGKYGGLEKEVETLKRDKALLMQQLVDLRQYQQSSSAEVQNLIQRLRVMEQNQQQMMALLAIVVQNPDFLNQLVQQQRRSNWWNDDGNRKRRFQALEHGPVDDQETSGGGAQIIQYRPPVPETSNQPIPANEAFYSTPAQPASSPALEMPMDVEMTSNNVNTFDSTGNDFTDTSALCEWYDMDIFGDELEHILQQPEQDFQVDPPLTVEDYGYDHPRLEQDYQMEAQQNCKNPQYVACVLKQRESHASDVH

SEQ ID NO: 12278 - protein, 360 aa, Zea mays subsp. mays
  peptide (1)..(360): Ceres Seq. ID no. 13494827
  misc_feature (1)..(169): Pfam Name: HSF-type DNA-binding Pfam Description: HSF-type DNA-binding
  misc_feature (1)..(344): Homolog of NCBI NO: 34902282 NR Description: Putative heat shock factor 3 [Oryza sativa
  misc_feature (1)..(233): Homolog of NCBI NO: 29126355 NR Description: putative heat shock transcription factor [Oryza
  misc_feature (1)..(247): Homolog of NCBI NO: 729775 NR Description: HEAT SHOCK FACTOR PROTEIN HSF8 (HEAT SHOCK FACTOR 8) (HSTF 8) (HEAT STRESS TRANSCRIPTION FACTOR)
  misc_feature (1)..(250): Homolog of NCBI NO: 25296101 NR Description: heat shock transcription factor HSF3 [imported] - thaliana (fragment) >gi|3256068|emb|CAA74397.1| Heat Shock Factor
  misc_feature (1)..(250): Homolog of NCBI NO: 27261140 NR Description: HSF3 DNA-binding domain/VP16 activation domain
  misc_feature (1)..(250): Homolog of NCBI NO: 30686034 NR Description: heat shock transcription factor 3 (HSF3) thaliana] >gi|30686038|ref|NP_850832.1| heat shock transcription
  misc_feature (1)..(227): Homolog of NCBI NO: 15236631 NR Description: heat shock transcription factor 1 (HSF1) thaliana] >gi|12644262|sp|P41151|HSF1_ARATH Heat shock factor
  misc_feature (1)..(227): Homolog of NCBI NO: 429155 NR Description: heat shock factor [Arabidopsis thaliana]
  misc_feature (1)..(247): Homolog of NCBI NO: 11386827 NR Description: Heat shock factor protein HSF8 (Heat shock factor 8) (HSTF 8) (Heat stress transcription factor)
  misc_feature (1)..(231): Homolog of NCBI NO: 15223168 NR Description: heat shock transcription factor family
MVSDPATDAVISWSAAGGSFVIWDSHAFERDLLPRHFKHNHFTSFIRQLNTYGFHKVDPDRWEWANEGFVKGQKHLLKTIKRKKKSSQDVPSDLQSVPVKTAPGTENIEIGKYGGLEKEVETLKRDKALLMQQLVDLRQYQQSSSAEVQNLIQRLRVMEQNQQQMMALLAIVVQNPDFLNQLVQQQRRSNWWNDDGNRKRRFQALEHGPVDDQETSGGGAQIIQYRPPVPETSNQPIPANEAFYSTPAQPASSPALEMPMDVEMTSNNVNTFDSTGNDFTDTSALCEWYDMDIFGDELEHILQQPEQDFQVDPPLTVEDYGYDHPRLEQDYQMEAQQNCKNPQYVACVLKQRESHASDVH

SEQ ID NO: 12279 - DNA, 1309 bp, Zea mays subsp. mays
  misc_feature (1)..(1309): Ceres Seq. ID no. 12412564
  misc_feature: MA Experiment ID: 108528 Result: Up-regulated in Transcription
  misc_feature: MA Experiment 108528 PARAMETER Experiment Name: Zm_Imbibed_Seeds_P Parameter: Age (day) Value: 5 vs. 2
  misc_feature: MA Experiment 108528 PARAMETER Experiment Name: Zm_Imbibed_Seeds_P Parameter: Organism Value: Zea mays
  misc_feature: MA Experiment 108528 PARAMETER Experiment Name: Zm_Imbibed_Seeds_P Parameter: Plant Line Value: 35A19
  misc_feature: MA Experiment 108528 PARAMETER Experiment Name: Zm_Imbibed_Seeds_P Parameter: Tissue Value: Aerial vs. Embryo
  misc_feature: MA Experiment ID: 108530 Result: Up-regulated in Transcription
  misc_feature: MA Experiment 108530 PARAMETER Experiment Name: Zm_Imbibed_Seeds_P Parameter: Age (day) Value: 6 vs. 2
  misc_feature: MA Experiment 108530 PARAMETER Experiment Name: Zm_Imbibed_Seeds_P Parameter: Organism Value: Zea mays
  misc_feature: MA Experiment 108530 PARAMETER Experiment Name: Zm_Imbibed_Seeds_P Parameter: Plant Line Value: 35A19
  misc_feature: MA Experiment 108530 PARAMETER Experiment Name: Zm_Imbibed_Seeds_P Parameter: Tissue Value: Aerial vs. Embryo
  misc_feature: MA Experiment ID: 108545 Result: Up-regulated in Transcription
  misc_feature: MA Experiment 108545 PARAMETER Experiment Name: Zm_Imbibed_Seeds_P Parameter: Age (day) Value: 3 vs. 2
  misc_feature: MA Experiment 108545 PARAMETER Experiment Name: Zm_Imbibed_Seeds_P Parameter: Organism Value: Zea mays
  misc_feature: MA Experiment 108545 PARAMETER Experiment Name: Zm_Imbibed_Seeds_P Parameter: Plant Line Value: 35A19
  misc_feature: MA Experiment 108545 PARAMETER Experiment Name: Zm_Imbibed_Seeds_P Parameter: Tissue Value: Aerial vs. Embryo
  misc_feature: MA Experiment ID: 108547 Result: Up-regulated in Transcription
  misc_feature: MA Experiment 108547 PARAMETER Experiment Name: Zm_Imbibed_Seeds_P Parameter: Age (day) Value: 4 vs. 2
  misc_feature: MA Experiment 108547 PARAMETER Experiment Name: Zm_Imbibed_Seeds_P Parameter: Organism Value: Zea mays
  misc_feature: MA Experiment 108547 PARAMETER Experiment Name: Zm_Imbibed_Seeds_P Parameter: Plant Line Value: 35A19
  misc_feature: MA Experiment 108547 PARAMETER Experiment Name: Zm_Imbibed_Seeds_P Parameter: Tissue Value: Aerial vs. Embryo
  misc_feature: MA Experiment ID: 20000480 Result: Down-regulated in Transcription
  misc_feature: MA Experiment 20000480 PARAMETER Experiment Name: Zm_Drought_P Parameter: Age (day) Value: 11
  misc_feature: MA Experiment 20000480 PARAMETER Experiment Name: Zm_Drought_P Parameter: Organism Value: Zea mays
  misc_feature: MA Experiment 20000480 PARAMETER Experiment Name: Zm_Drought_P Parameter: Plant Line Value: 35A19
  misc_feature: MA Experiment 20000480 PARAMETER Experiment Name: Zm_Drought_P Parameter: Timepoint (hr) Value: 72
  misc_feature: MA Experiment 20000480 PARAMETER Experiment Name: Zm_Drought_P Parameter: Tissue Value: Aerial
  misc_feature: MA Experiment 20000480 PARAMETER Experiment Name: Zm_Drought_P Parameter: Treatment Value: Drought vs. No Drought
  misc_feature: MA Experiment ID: 20000492 Result: Up-regulated in Transcription
  misc_feature: MA Experiment 20000492 PARAMETER Experiment Name: Zm_Hybrid_Seed_Dev_P Parameter: DAP Value: 12
  misc_feature: MA Experiment 20000492 PARAMETER Experiment Name: Zm_Hybrid_Seed_Dev_P Parameter: Organism Value: Zea mays
  misc_feature: MA Experiment 20000492 PARAMETER Experiment Name: Zm_Hybrid_Seed_Dev_P Parameter: Plant Line Value: 35A19
  misc_feature: MA Experiment 20000492 PARAMETER Experiment Name: Zm_Hybrid_Seed_Dev_P Parameter: Tissue Value: Fert Kernel vs. Unfert Floret
  misc_feature: MA Experiment ID: 20000626 Result: Down-regulated in Transcription
  misc_feature: MA Experiment 20000626 PARAMETER Experiment Name: Zm_Herbicide-Treatments_P Parameter: Timepoint (hr) Value: 12
  misc_feature: MA Experiment 20000626 PARAMETER Experiment Name: Zm_Herbicide-Treatments_P Parameter: Tissue Value: Aerial
  misc_feature: MA Experiment 20000626 PARAMETER Experiment Name: Zm_Herbicide-Treatments_P Parameter: Treatment Value: Roundup vs. No Treatment
accgtctcgtacatgcccttatccctctcgccccgcatcccatcacccgcaggccggaacagcagccgtcagccatgcccgcggcggccttcttctccgccgcgctgccccctccctcgcgtacgctgtcccgccgcctcgtcgtgtcccgcgcggctgcggccgcggcctcagcatcagcatcctcgtcctccgggtggcaaggtggcgggggagtggagttccagggcaaggtggggttcctggggctcgggatcatgggcgcgcccatggcatccaacctcatcaaggcaggctgcgacgtcacggtttggaacaggaccaagagcaagtgcgatcccctcctcagtctcgatgccaagtacgagcctacaccggcccaagtcgcttcatcttgtgacgtgacattcgcgattctcgctgatccacaaagcgcggctgaggttgcatgtgggtccagtggagctgctgaagggttggcccctgggaaaggctatgtcgatgtgtcgacggttgatggtgctacatccaagctgattggtgaacgcattacaagtactggagcatctttccttgaggctccagtttcaggctcgaaaaaaccagcagaagatgggctgctcatctttcttactgcaggtgatgagtccttgtacaagagagtggcgcccctccttgatgtcatggggaagtcaaggttttatcttggcgatgtaggcaatggtgctgcaatgaagctcgtggttaacatggtcatggggagcatgatggtttccttctcagaagggttgctcctgagtgaaaaagtcggtttagacccgaatactctcgtcgaggttatttcccagggtgctatcagtgcccccatgttctctctcaagggcccatccatggttaaagctgcatatcctcctgcatttcctctgaagcatcaacagaaggacttgaggctcgcattggcccctggcggaatcggtgtcccagtccattcctacagttgcagctgcgaacgagctgtacaaggctgcaaaatcgctcggccttagtgaccacgacttctcggcggttattgaagcgctgaaagccaaagtgcagagccagagctcacaatagtagttgcctgttcagcagagctcacagtagttgttgcctcttcagcagctaccattgaggcagcattttgtctcgatggatgaagttgacacttaggaaaatttctcaagatcgctacagaaaagtctcagaacaatacaatttctgtattcgtaaatattttctcaaacatcacaacgacgacatttccttaagg

SEQ ID NO: 12280 - protein, 347 aa, Zea mays subsp. mays
  peptide (1)..(347): Ceres Seq. ID no. 12412565
  misc_feature (78)..(237): Pfam Name: NAD binding domain of 6-phosphogluconate dehydrogenase Pfam Description: NAD binding domain of 6-phosphogluconate
  misc_feature (23)..(320): Homolog of NCBI NO: 34914300 NR Description: putative gamma hydroxybutyrate dehydrogenase
  misc_feature (78)..(319): Homolog of NCBI NO: 18394513 NR Description: Expressed protein; protein id: At1g17650.1, by cDNA: 17110., supported by cDNA: gi_20260471 [Arabidopsis >gi|20260472|gb|AAM13134.1| unknown protein [Arabidopsis
  misc_feature (147)..(319): Homolog of NCBI NO: 8778467 NR Description: F1L3.35 [Arabidopsis thaliana]
  misc_feature (78)..(149): Homolog of NCBI NO: 8778467 NR Description: F1L3.35 [Arabidopsis thaliana]
  misc_feature (77)..(328): Homolog of NCBI NO: 15375068 NR Description: gamma hydroxybutyrate dehydrogenase [Arabidopsis
  misc_feature (77)..(332): Homolog of NCBI NO: 29368238 NR Description: gamma hydroxybutyrate dehydrogenase-like protein
  misc_feature (77)..(328): Homolog of NCBI NO: 18404556 NR Description: expressed protein; protein id: At3g25530.1, by cDNA: gi_15146313, supported by cDNA: gi_15375067 [Arabidopsis
  misc_feature (77)..(345): Homolog of NCBI NO: 23054597 NR Description: hypothetical protein [Geobacter metallireducens]
  misc_feature (79)..(336): Homolog of NCBI NO: 39996474 NR Description: 3-hydroxyisobutyrate dehydrogenase family protein
  misc_feature (40)..(322): Homolog of NCBI NO: 20891625 NR Description: RIKEN cDNA 3930401K13 [Mus musculus]
RLVHALIPLAPHPITRRPEQQPSAMPAAAFFSAALPPPSRTLSRRLVVSRAAAAAASASASSSSGWQGGGGVEFQGKVGFLGLGIMGAPMASNLIKAGCDVTVWNRTKSKCDPLLSLDAKYEPTPAQVASSCDVTFAILADPQSAAEVACGSSGAAEGLAPGKGYVDVSTVDGATSKLIGERITSTGASFLEAPVSGSKKPAEDGLLIFLTAGDESLYKRVAPLLDVMGKSRFYLGDVGNGAAMKLVVNMVMGSMMVSFSEGLLLSEKVGLDPNTLVEVISQGAISAPMFSLKGPSMVKAAYPPAFPLKHQQKDLRLALAPGGIGVPVHSYSCSCERAVQGCKIARP

SEQ ID NO: 12281 - protein, 323 aa, Zea mays subsp. mays
  peptide (1)..(323): Ceres Seq. ID no. 12412566
  misc_feature (54)..(213): Pfam Name: NAD binding domain of 6-phosphogluconate dehydrogenase Pfam Description: NAD binding domain of 6-phosphogluconate
  misc_feature (53)..(304): Homolog of NCBI NO: 15375068 NR Description: gamma hydroxybutyrate dehydrogenase [Arabidopsis
  misc_feature (53)..(308): Homolog of NCBI NO: 29368238 NR Description: gamma hydroxybutyrate dehydrogenase-like protein
  misc_feature (53)..(304): Homolog of NCBI NO: 18404556 NR Description: expressed protein; protein id: At3g25530.1, by cDNA: gi_15146313, supported by cDNA: gi_15375067 [Arabidopsis
  misc_feature (1)..(296): Homolog of NCBI NO: 34914300 NR Description: putative gamma hydroxybutyrate dehydrogenase
  misc_feature (123)..(295): Homolog of NCBI NO: 8778467 NR Description: F1L3.35 [Arabidopsis thaliana]
  misc_feature (54)..(125): Homolog of NCBI NO: 8778467 NR Description: F1L3.35 [Arabidopsis thaliana]
  misc_feature (54)..(295): Homolog of NCBI NO: 18394513 NR Description: Expressed protein; protein id: At1g17650.1, by cDNA: 17110., supported by cDNA: gi_20260471 [Arabidopsis >gi|20260472|gb|AAM13134.1| unknown protein [Arabidopsis
  misc_feature (53)..(321): Homolog of NCBI NO: 23054597 NR Description: hypothetical protein [Geobacter metallireducens]
  misc_feature (55)..(312): Homolog of NCBI NO: 39996474 NR Description: 3-hydroxyisobutyrate dehydrogenase family protein
  misc_feature (16)..(298): Homolog of NCBI NO: 20891625 NR Description: RIKEN cDNA 3930401K13 [Mus musculus]
MPAAAFFSAALPPPSRTLSRRLVVSRAAAAAASASASSSSGWQGGGGVEFQGKVGFLGLGIMGAPMASNLIKAGCDVTVWNRTKSKCDPLLSLDAKYEPTPAQVASSCDVTFAILADPQSAAEVACGSSGAAEGLAPGKGYVDVSTVDGATSKLIGERITSTGASFLEAPVSGSKKPAEDGLLIFLTAGDESLYKRVAPLLDVMGKSRFYLGDVGNGAAMKLVVNMVMGSMMVSFSEGLLLSEKVGLDPNTLVEVISQGAISAPMFSLKGPSMVKAAYPPAFPLKHQQKDLRLALAPGGIGVPVHSYSCSCERAVQGCKIARP

SEQ ID NO: 12282 - protein, 262 aa, Zea mays subsp. mays
  peptide (1)..(262): Ceres Seq. ID no. 12412567
  misc_feature (1)..(152): Pfam Name: NAD binding domain of 6-phosphogluconate dehydrogenase Pfam Description: NAD binding domain of 6-phosphogluconate
  misc_feature (1)..(235): Homolog of NCBI NO: 34914300 NR Description: putative gamma hydroxybutyrate dehydrogenase
  misc_feature (1)..(234): Homolog of NCBI NO: 18394513 NR Description: Expressed protein; protein id: At1g17650.1, by cDNA: 17110., supported by cDNA: gi_20260471 [Arabidopsis >gi|20260472|gb|AAM13134.1| unknown protein [Arabidopsis
  misc_feature (62)..(234): Homolog of NCBI NO: 8778467 NR Description: F1L3.35 [Arabidopsis thaliana]
  misc_feature (1)..(64): Homolog of NCBI NO: 8778467 NR Description: F1L3.35 [Arabidopsis thaliana]
  misc_feature (1)..(243): Homolog of NCBI NO: 15375068 NR Description: gamma hydroxybutyrate dehydrogenase [Arabidopsis
  misc_feature (1)..(247): Homolog of NCBI NO: 29368238 NR Description: gamma hydroxybutyrate dehydrogenase-like protein
  misc_feature (1)..(243): Homolog of NCBI NO: 18404556 NR Description: expressed protein; protein id: At3g25530.1, by cDNA: gi_15146313, supported by cDNA: gi_15375067 [Arabidopsis
  misc_feature (1)..(260): Homolog of NCBI NO: 23054597 NR Description: hypothetical protein [Geobacter metallireducens]
  misc_feature (1)..(251): Homolog of NCBI NO: 39996474 NR Description: 3-hydroxyisobutyrate dehydrogenase family protein
  misc_feature (1)..(237): Homolog of NCBI NO: 20891625 NR Description: RIKEN cDNA 3930401K13 [Mus musculus]
MGAPMASNLIKAGCDVTVWNRTKSKCDPLLSLDAKYEPTPAQVASSCDVTFAILADPQSAAEVACGSSGAAEGLAPGKGYVDVSTVDGATSKLIGERITSTGASFLEAPVSGSKKPAEDGLLIFLTAGDESLYKRVAPLLDVMGKSRFYLGDVGNGAAMKLVVNMVMGSMMVSFSEGLLLSEKVGLDPNTLVEVISQGAISAPMFSLKGPSMVKAAYPPAFPLKHQQKDLRLALAPGGIGVPVHSYSCSCERAVQGCKIARP

SEQ ID NO: 12283 - DNA, 1338 bp, Zea mays subsp. mays
  misc_feature (1)..(1338): Ceres Seq. ID no. 12343920
  misc_feature: MA Experiment ID: 108504 Result: Down-regulated in Transcription
  misc_feature: MA Experiment 108504 PARAMETER Experiment Name: Zm_Drought_P Parameter: Age (day) Value: 8
  misc_feature: MA Experiment 108504 PARAMETER Experiment Name: Zm_Drought_P Parameter: Organism Value: Zea mays
  misc_feature: MA Experiment 108504 PARAMETER Experiment Name: Zm_Drought_P Parameter: Plant Line Value: 35A19
  misc_feature: MA Experiment 108504 PARAMETER Experiment Name: Zm_Drought_P Parameter: Timepoint (hr) Value: 12
  misc_feature: MA Experiment 108504 PARAMETER Experiment Name: Zm_Drought_P Parameter: Tissue Value: Aerial
  misc_feature: MA Experiment 108504 PARAMETER Experiment Name: Zm_Drought_P Parameter: Treatment Value: Drought vs. No Drought
  misc_feature: MA Experiment ID: 108522 Result: Down-regulated in Transcription
  misc_feature: MA Experiment 108522 PARAMETER Experiment Name: Zm_42deg_Heat_P Parameter: Age (day) Value: 8
  misc_feature: MA Experiment 108522 PARAMETER Experiment Name: Zm_42deg_Heat_P Parameter: Organism Value: Zea mays
  misc_feature: MA Experiment 108522 PARAMETER Experiment Name: Zm_42deg_Heat_P Parameter: Plant Line Value: 35A19
  misc_feature: MA Experiment 108522 PARAMETER Experiment Name: Zm_42deg_Heat_P Parameter: Temperature (deg C) Value: 42 vs. 22
  misc_feature: MA Experiment 108522 PARAMETER Experiment Name: Zm_42deg_Heat_P Parameter: Timepoint (hr) Value: 1
  misc_feature: MA Experiment 108522 PARAMETER Experiment Name: Zm_42deg_Heat_P Parameter: Tissue Value: Aerial
  misc_feature: MA Experiment ID: 108529 Result: Down-regulated in Transcription
  misc_feature: MA Experiment 108529 PARAMETER Experiment Name: Zm_Imbibed_Seeds_P Parameter: Age (day) Value: 5 vs. 2
  misc_feature: MA Experiment 108529 PARAMETER Experiment Name: Zm_Imbibed_Seeds_P Parameter: Organism Value: Zea mays
  misc_feature: MA Experiment 108529 PARAMETER Experiment Name: Zm_Imbibed_Seeds_P Parameter: Plant Line Value: 35A19
  misc_feature: MA Experiment 108529 PARAMETER Experiment Name: Zm_Imbibed_Seeds_P Parameter: Tissue Value: Roots vs. Embryo
  misc_feature: MA Experiment ID: 108535 Result: Up-regulated in Transcription
  misc_feature: MA Experiment 108535 PARAMETER Experiment Name: Zm_Meristem_P Parameter: Age (day) Value: 8
  misc_feature: MA Experiment 108535 PARAMETER Experiment Name: Zm_Meristem_P Parameter: Organism Value: Zea mays
  misc_feature: MA Experiment 108535 PARAMETER Experiment Name: Zm_Meristem_P Parameter: Plant Line Value: 35A19
  misc_feature: MA Experiment 108535 PARAMETER Experiment Name: Zm_Meristem_P Parameter: Tissue Value: Root Meristem vs. Above Root Meristem
  misc_feature: MA Experiment ID: 108544 Result: Down-regulated in Transcription
  misc_feature: MA Experiment ID: 108556 Result: Down-regulated in Transcription
  misc_feature: MA Experiment 108556 PARAMETER Experiment Name: Zm_Drought_P Parameter: Age (day) Value: 9
  misc_feature: MA Experiment 108556 PARAMETER Experiment Name: Zm_Drought_P Parameter: Organism Value: Zea mays
  misc_feature: MA Experiment 108556 PARAMETER Experiment Name: Zm_Drought_P Parameter: Plant Line Value: 35A19
  misc_feature: MA Experiment 108556 PARAMETER Experiment Name: Zm_Drought_P Parameter: Timepoint (hr) Value: 24
  misc_feature: MA Experiment 108556 PARAMETER Experiment Name: Zm_Drought_P Parameter: Tissue Value: Aerial
  misc_feature: MA Experiment 108556 PARAMETER Experiment Name: Zm_Drought_P Parameter: Treatment Value: Drought vs. No Drought
  misc_feature: MA Experiment ID: 20000108 Result: Up-regulated in Transcription
  misc_feature: MA Experiment 20000108 PARAMETER Experiment Name: Zm_Root-Tips_P Parameter: Age (day) Value: 12
  misc_feature: MA Experiment 20000108 PARAMETER Experiment Name: Zm_Root-Tips_P Parameter: Organism Value: Zea mays
  misc_feature: MA Experiment 20000108 PARAMETER Experiment Name: Zm_Root-Tips_P Parameter: Tissue Value: Root tips vs. Root mid region    35
  misc_feature: MA Experiment 20000108 PARAMETER Experiment Name: Zm_Root-Tips_P Parameter: Tissue Value: Root tips vs. Root mid region   Sequence Listing-Misc Features (4)
  misc_feature: MA Experiment ID: 20000480 Result: Down-regulated in Transcription
  misc_feature: MA Experiment 20000480 PARAMETER Experiment Name: Zm_Drought_P Parameter: Age (day) Value: 11
  misc_feature: MA Experiment 20000480 PARAMETER Experiment Name: Zm_Drought_P Parameter: Organism Value: Zea mays
  misc_feature: MA Experiment 20000480 PARAMETER Experiment Name: Zm_Drought_P Parameter: Plant Line Value: 35A19
  misc_feature: MA Experiment 20000480 PARAMETER Experiment Name: Zm_Drought_P Parameter: Timepoint (hr) Value: 72
  misc_feature: MA Experiment 20000480 PARAMETER Experiment Name: Zm_Drought_P Parameter: Tissue Value: Aerial
  misc_feature: MA Experiment 20000480 PARAMETER Experiment Name: Zm_Drought_P Parameter: Treatment Value: Drought vs. No Drought
  misc_feature: MA Experiment ID: 20000488 Result: Up-regulated in Transcription
  misc_feature: MA Experiment 20000488 PARAMETER Experiment Name: Zm_50mM_NH4NO3_L_to_H_P Parameter: Organism Value: Zea mays
  misc_feature: MA Experiment 20000488 PARAMETER Experiment Name: Zm_50mM_NH4NO3_L_to_H_P Parameter: Timepoint (hr) Value: 8
  misc_feature: MA Experiment 20000488 PARAMETER Experiment Name: Zm_50mM_NH4NO3_L_to_H_P Parameter: Tissue Value: Leaves
  misc_feature: MA Experiment 20000488 PARAMETER Experiment Name: Zm_50mM_NH4NO3_L_to_H_P Parameter: Treatment Value: 50mM NH4NO3 vs. 100mM Mannitol
  misc_feature: MA Experiment ID: 20000535 Result: Up-regulated in Transcription
  misc_feature: MA Experiment 20000535 PARAMETER Experiment Name: Zm_Hybrid_Seed_Dev_P Parameter: DAP Value: 30 vs. 12
  misc_feature: MA Experiment 20000535 PARAMETER Experiment Name: Zm_Hybrid_Seed_Dev_P Parameter: Organism Value: Zea mays
  misc_feature: MA Experiment 20000535 PARAMETER Experiment Name: Zm_Hybrid_Seed_Dev_P Parameter: Plant Line Value: 35A19
  misc_feature: MA Experiment 20000535 PARAMETER Experiment Name: Zm_Hybrid_Seed_Dev_P Parameter: Tissue Value: Embryo vs. Unfert Floret
  misc_feature: MA Experiment ID: 20000632 Result: Down-regulated in Transcription
  misc_feature: MA Experiment 20000632 PARAMETER Experiment Name: Zm_Herbicide-Treatments_P Parameter: Timepoint (hr) Value: 4
  misc_feature: MA Experiment 20000632 PARAMETER Experiment Name: Zm_Herbicide-Treatments_P Parameter: Tissue Value: Aerial
  misc_feature: MA Experiment 20000632 PARAMETER Experiment Name: Zm_Herbicide-Treatments_P Parameter: Treatment Value: Glean vs. No Treatment
  misc_feature: MA Experiment ID: 20001606 Result: Up-regulated in Transcription
  misc_feature: MA Experiment 20001606 PARAMETER Experiment Name: Zm_50ppm_KNO3_L-to-H_P Parameter: Age (day) Value: 19
  misc_feature: MA Experiment 20001606 PARAMETER Experiment Name: Zm_50ppm_KNO3_L-to-H_P Parameter: Organism Value: Zea mays
  misc_feature: MA Experiment 20001606 PARAMETER Experiment Name: Zm_50ppm_KNO3_L-to-H_P Parameter: Plant Line Value: 35A19
  misc_feature: MA Experiment 20001606 PARAMETER Experiment Name: Zm_50ppm_KNO3_L-to-H_P Parameter: Timepoint (hr) Value: 8
  misc_feature: MA Experiment 20001606 PARAMETER Experiment Name: Zm_50ppm_KNO3_L-to-H_P Parameter: Tissue Value: Shoots
  misc_feature: MA Experiment 20001606 PARAMETER Experiment Name: Zm_50ppm_KNO3_L-to-H_P Parameter: Treatment Value: 50ppm KNO3 vs. 50ppm KCl
gttcccggcctaaacggaggcggccgtataaaggcattctcctcgcgccccacccggcggttatcttcaccaccatatcgacatcgacgccagcgagccaaggacagaacagccggcgcccggccctaaaactgccgtgcagcgggagagaagcgagggaaagatggaccggtaccagagagtggagaagcagagggaggaggcacccatcaaggaaaacgagatccgcattaccacgcaggggaggatgcgcaactacatcacctacgccaccggcttgcttcaggacaaaggttctgatgaggttgtattcaaggccatggggagggctatcaataagactgtcatggttgtggaattgatcaagaggaggattgttggcctccatcagaataccaccactggatctactgatattactgatatgtgggagccattggaggaaggcctacttccgcttgagacaacaagacatgtctctatgataactataactctttcaaagaaggagctggacacatcatctatcggatatcaatctcctttgcctgctgatgaagtgaagcctttggttaaatatgataatgacgaagatgcacactcacctggtggccgtggaaggggtcgtggtggtcgaggccgtgggcggggcagggacaggggaagaggtggacgtggaaatgggttcaatgactatgctgatgccggttgggaagacgatcacgcccctgcatatatgggcaatggatatgcccgtggaagaggtcgtagtttcaggggccgtggcaggagaggcggctacaataaccagcctgaataccaacaagacggaggttattacgaggaggcacctgtccatgctccagctttaggtcgaggtcgtggtcgtgggagaggtccattcagaggcagaggacgtggtggcaacgcaaacggcgtgatgcacgctgctgcggacagtgcataagctgttcgttaccagtccaggctggttgtttgttggatgcctgctccaagtatgaagatgtatcatctgttgttatcagttaacgtcattacttggcataagattgacattctgtgtcggagtgcagccaggttttgatacttgactagatctgtagggtagcgtctttacagtgctttctcctttcacagtagatgtcttaaactaattgtagtttcgtaaaggtttagagcagggcattctttctatttttaaatataaaaacgaagtcttggtgtatgttcaaatgtgcacgtttttatatgtgctgtttttgaaatgcgagttagattaagttcgtggtacactgtgaatgaaatgcgagtcagatg

SEQ ID NO: 12284 - protein, 267 aa, Zea mays subsp. mays
  peptide (1)..(267): Ceres Seq. ID no. 12343921
  misc_feature (1)..(237): Homolog of NCBI NO: 32526671 NR Description: chloroplast nucleoid DNA-binding protein -like
  misc_feature (1)..(254): Homolog of NCBI NO: 18410994 NR Description: expressed protein; protein id: At1g76010.1, by cDNA: gi_15724323, supported by cDNA: gi_15809881, supported cDNA: gi_16226598 [Arabidopsis thaliana]
  misc_feature (1)..(254): Homolog of NCBI NO: 34897552 NR Description: OSJNBa0042L16.13 [Oryza sativa (japonica
  misc_feature (1)..(258): Homolog of NCBI NO: 25518088 NR Description: T20H2.2 protein - Arabidopsis thaliana Contains similarity to pigpen protein from Mus musculus and contains protein of unknown function DUF78 PF|01918 domain.
  misc_feature (1)..(258): Homolog of NCBI NO: 18394837 NR Description: expressed protein; protein id: At1g20220.1, by cDNA: gi_16612273 [Arabidopsis thaliana]
  misc_feature (1)..(258): Homolog of NCBI NO: 24417384 NR Description: unknown [Arabidopsis thaliana]
  misc_feature (41)..(254): Homolog of NCBI NO: 25404999 NR Description: protein T4O12.22 [imported] - Arabidopsis >gi|8778814|gb|AAF79819.1|AC007396_20 T4O12.22 [Arabidopsis
  misc_feature (1)..(41): Homolog of NCBI NO: 25404999 NR Description: protein T4O12.22 [imported] - Arabidopsis >gi|8778814|gb|AAF79819.1|AC007396_20 T4O12.22 [Arabidopsis
  misc_feature (1)..(154): Homolog of NCBI NO: 15231369 NR Description: unknown protein; protein id: At3g07030.1 thaliana] >gi|6729010|gb|AAF27007.1|AC016827_18 unknown protein
  misc_feature (7)..(258): Homolog of NCBI NO: 23612874 NR Description: hypothetical protein, conserved [Plasmodium
MDRYQRVEKQREEAPIKENEIRITTQGRMRNYITYATGLLQDKGSDEVVFKAMGRAINKTVMVVELIKRRIVGLHQNTTTGSTDITDMWEPLEEGLLPLETTRHVSMITITLSKKELDTSSIGYQSPLPADEVKPLVKYDNDEDAHSPGGRGRGRGGRGRGRGRDRGRGGRGNGFNDYADAGWEDDHAPAYMGNGYARGRGRSFRGRGRRGGYNNQPEYQQDGGYYEEAPVHAPALGRGRGRGRGPFRGRGRGGNANGVMHAAADSA

SEQ ID NO: 12285 - protein, 239 aa, Zea mays subsp. mays
  peptide (1)..(239): Ceres Seq. ID no. 12343922
  misc_feature (1)..(209): Homolog of NCBI NO: 32526671 NR Description: chloroplast nucleoid DNA-binding protein -like
  misc_feature (1)..(226): Homolog of NCBI NO: 18410994 NR Description: expressed protein; protein id: At1g76010.1, by cDNA: gi_15724323, supported by cDNA: gi_15809881, supported cDNA: gi_16226598 [Arabidopsis thaliana]
  misc_feature (1)..(226): Homolog of NCBI NO: 34897552 NR Description: OSJNBa0042L16.13 [Oryza sativa (japonica
  misc_feature (1)..(230): Homolog of NCBI NO: 25518088 NR Description: T20H2.2 protein - Arabidopsis thaliana Contains similarity to pigpen protein from Mus musculus and contains protein of unknown function DUF78 PF|01918 domain.
  misc_feature (1)..(230): Homolog of NCBI NO: 18394837 NR Description: expressed protein; protein id: At1g20220.1, by cDNA: gi_16612273 [Arabidopsis thaliana]
  misc_feature (1)..(230): Homolog of NCBI NO: 24417384 NR Description: unknown [Arabidopsis thaliana]
  misc_feature (13)..(226): Homolog of NCBI NO: 25404999 NR Description: protein T4O12.22 [imported] - Arabidopsis >gi|8778814|gb|AAF79819.1|AC007396_20 T4O12.22 [Arabidopsis
  misc_feature (1)..(13): Homolog of NCBI NO: 25404999 NR Description: protein T4O12.22 [imported] - Arabidopsis >gi|8778814|gb|AAF79819.1|AC007396_20 T4O12.22 [Arabidopsis
  misc_feature (1)..(126): Homolog of NCBI NO: 15231369 NR Description: unknown protein; protein id: At3g07030.1 thaliana] >gi|6729010|gb|AAF27007.1|AC016827_18 unknown protein
  misc_feature (1)..(230): Homolog of NCBI NO: 23612874 NR Description: hypothetical protein, conserved [Plasmodium
MRNYITYATGLLQDKGSDEVVFKAMGRAINKTVMVVELIKRRIVGLHQNTTTGSTDITDMWEPLEEGLLPLETTRHVSMITITLSKKELDTSSIGYQSPLPADEVKPLVKYDNDEDAHSPGGRGRGRGGRGRGRGRDRGRGGRGNGFNDYADAGWEDDHAPAYMGNGYARGRGRSFRGRGRRGGYNNQPEYQQDGGYYEEAPVHAPALGRGRGRGRGPFRGRGRGGNANGVMHAAADSA

SEQ ID NO: 12286 - protein, 215 aa, Zea mays subsp. mays
  peptide (1)..(215): Ceres Seq. ID no. 12343923
  misc_feature (1)..(185): Homolog of NCBI NO: 32526671 NR Description: chloroplast nucleoid DNA-binding protein -like
  misc_feature (1)..(202): Homolog of NCBI NO: 18410994 NR Description: expressed protein; protein id: At1g76010.1, by cDNA: gi_15724323, supported by cDNA: gi_15809881, supported cDNA: gi_16226598 [Arabidopsis thaliana]
  misc_feature (1)..(202): Homolog of NCBI NO: 34897552 NR Description: OSJNBa0042L16.13 [Oryza sativa (japonica
  misc_feature (1)..(206): Homolog of NCBI NO: 25518088 NR Description: T20H2.2 protein - Arabidopsis thaliana Contains similarity to pigpen protein from Mus musculus and contains protein of unknown function DUF78 PF|01918 domain.
  misc_feature (1)..(206): Homolog of NCBI NO: 18394837 NR Description: expressed protein; protein id: At1g20220.1, by cDNA: gi_16612273 [Arabidopsis thaliana]
  misc_feature (1)..(206): Homolog of NCBI NO: 24417384 NR Description: unknown [Arabidopsis thaliana]
  misc_feature (1)..(202): Homolog of NCBI NO: 25404999 NR Description: protein T4O12.22 [imported] - Arabidopsis >gi|8778814|gb|AAF79819.1|AC007396_20 T4O12.22 [Arabidopsis
  misc_feature (1)..(102): Homolog of NCBI NO: 15231369 NR Description: unknown protein; protein id: At3g07030.1 thaliana] >gi|6729010|gb|AAF27007.1|AC016827_18 unknown protein
  misc_feature (1)..(206): Homolog of NCBI NO: 23612874 NR Description: hypothetical protein, conserved [Plasmodium
  misc_feature (1)..(200): Homolog of NCBI NO: 23485324 NR Description: Arabidopsis thaliana At1g20220/T20H2_3-related
MGRAINKTVMVVELIKRRIVGLHQNTTTGSTDITDMWEPLEEGLLPLETTRHVSMITITLSKKELDTSSIGYQSPLPADEVKPLVKYDNDEDAHSPGGRGRGRGGRGRGRGRDRGRGGRGNGFNDYADAGWEDDHAPAYMGNGYARGRGRSFRGRGRRGGYNNQPEYQQDGGYYEEAPVHAPALGRGRGRGRGPFRGRGRGGNANGVMHAAADSA

SEQ ID NO: 12287 - DNA, 1251 bp, Zea mays subsp. mays
  misc_feature (1)..(1251): Ceres Seq. ID no. 12366718
  misc_feature: MA Experiment ID: 108544 Result: Down-regulated in Transcription
  misc_feature: MA Experiment ID: 108545 Result: Up-regulated in Transcription
  misc_feature: MA Experiment 108545 PARAMETER Experiment Name: Zm_Imbibed_Seeds_P Parameter: Age (day) Value: 3 vs. 2
  misc_feature: MA Experiment 108545 PARAMETER Experiment Name: Zm_Imbibed_Seeds_P Parameter: Organism Value: Zea mays
  misc_feature: MA Experiment 108545 PARAMETER Experiment Name: Zm_Imbibed_Seeds_P Parameter: Plant Line Value: 35A19
  misc_feature: MA Experiment 108545 PARAMETER Experiment Name: Zm_Imbibed_Seeds_P Parameter: Tissue Value: Aerial vs. Embryo
gtcggaaaaaccatcatctaaagttcaacgcccgcaccgcaagcgcaacacgccaacacccgagacccgacgcggccttcgccttccctccgcgcgagggagattcgaggggagagaggttctcaccttcgcgcctgcggttgcttggcgcagagtcgtcgcagatggaccggtaccagagggtggagaagccgcgggaggagtcccctatcggcgccaacgagatccgcatcacggcgcagggccggccccgcaactacatcacctatgcgctcgccctggtccaggacaatgcaacagatgacattgtcatcaaggccatgggaagggcgatcaacaagacagttgccatcgtggagcttcttaagagaaggattgctggtctccatcagaatacctctattgaatccattgatataacagacacttgggagccattggaagaaggccttgtcactcttgagaccattcgccatgtgtccttaatcactattaaattgtcaaagaaggagctggatacatcatccccaggttaccagccgcccataccagctgaccaggtcaggccagcagctgactttgatcaggatgcagaggccgtaccaagtggtcgtggaagaggacgtggtcgtcgcagcaggggcaggggaaggggaagggggttcagcagtggagtagactatgatgatgagattggagagccagaggaggctccgcgtggatatcgtggcagagggaggggccgtggagggcgtggatcttttgcagttggaaggggctatggtggtgataattatgcgatggaagaagctggtagatatgatgatgatggatataacgcaccacctatgcaacgatatgaaggtggcagaggaaggggcagagggcgtggacgcggtcgtgggcggggaaggcaaggccatggacctcctccgcagcagtagattggttggcacatcacctttgggatgtcataacctccatttctttccataagataaatgttaccgtccattatattttttatctggttattaggttcatgttgaaagttgacatagtgactctagcgtggaggatgcggctagttaagatttggtagctaggttgttcgtccatttgcctatttattatctcagatcagacttggtgccgttccagttgtgcattgtagcctctttttaccatgaaagttagttcagaagattcttttatgttgttgcaaatcacagactgaaaacgtttgttttc

SEQ ID NO: 12288 - protein, 313 aa, Zea mays subsp. mays
  peptide (1)..(313): Ceres Seq. ID no. 12366719
  misc_feature (55)..(311): Homolog of NCBI NO: 34897552 NR Description: OSJNBa0042L16.13 [Oryza sativa (japonica
  misc_feature (53)..(311): Homolog of NCBI NO: 25518088 NR Description: T20H2.2 protein - Arabidopsis thaliana Contains similarity to pigpen protein from Mus musculus and contains protein of unknown function DUF78 PF|01918 domain.
  misc_feature (55)..(311): Homolog of NCBI NO: 18394837 NR Description: expressed protein; protein id: At1g20220.1, by cDNA: gi_16612273 [Arabidopsis thaliana]
  misc_feature (55)..(312): Homolog of NCBI NO: 18410994 NR Description: expressed protein; protein id: At1g76010.1, by cDNA: gi_15724323, supported by cDNA: gi_15809881, supported cDNA: gi_16226598 [Arabidopsis thaliana]
  misc_feature (55)..(313): Homolog of NCBI NO: 24417384 NR Description: unknown [Arabidopsis thaliana]
  misc_feature (55)..(207): Homolog of NCBI NO: 15231369 NR Description: unknown protein; protein id: At3g07030.1 thaliana] >gi|6729010|gb|AAF27007.1|AC016827_18 unknown protein
  misc_feature (95)..(312): Homolog of NCBI NO: 25404999 NR Description: protein T4O12.22 [imported] - Arabidopsis >gi|8778814|gb|AAF79819.1|AC007396_20 T4O12.22 [Arabidopsis
  misc_feature (55)..(95): Homolog of NCBI NO: 25404999 NR Description: protein T4O12.22 [imported] - Arabidopsis >gi|8778814|gb|AAF79819.1|AC007396_20 T4O12.22 [Arabidopsis
  misc_feature (61)..(303): Homolog of NCBI NO: 23612874 NR Description: hypothetical protein, conserved [Plasmodium
  misc_feature (61)..(298): Homolog of NCBI NO: 23485324 NR Description: Arabidopsis thaliana At1g20220/T20H2_3-related
RKNHHLKFNARTASATRQHPRPDAAFAFPPREGDSRGERFSPSRLRLLGAESSQMDRYQRVEKPREESPIGANEIRITAQGRPRNYITYALALVQDNATDDIVIKAMGRAINKTVAIVELLKRRIAGLHQNTSIESIDITDTWEPLEEGLVTLETIRHVSLITIKLSKKELDTSSPGYQPPIPADQVRPAADFDQDAEAVPSGRGRGRGRRSRGRGRGRGFSSGVDYDDEIGEPEEAPRGYRGRGRGRGGRGSFAVGRGYGGDNYAMEEAGRYDDDGYNAPPMQRYEGGRGRGRGRGRGRGRGRQGHGPPPQQ

SEQ ID NO: 12289 - protein, 259 aa, Zea mays subsp. mays
  peptide (1)..(259): Ceres Seq. ID no. 12366720
  misc_feature (1)..(257): Homolog of NCBI NO: 34897552 NR Description: OSJNBa0042L16.13 [Oryza sativa (japonica
  misc_feature (1)..(257): Homolog of NCBI NO: 25518088 NR Description: T20H2.2 protein - Arabidopsis thaliana Contains similarity to pigpen protein from Mus musculus and contains protein of unknown function DUF78 PF|01918 domain.
  misc_feature (1)..(257): Homolog of NCBI NO: 18394837 NR Description: expressed protein; protein id: At1g20220.1, by cDNA: gi_16612273 [Arabidopsis thaliana]
  misc_feature (1)..(258): Homolog of NCBI NO: 18410994 NR Description: expressed protein; protein id: At1g76010.1, by cDNA: gi_15724323, supported by cDNA: gi_15809881, supported cDNA: gi_16226598 [Arabidopsis thaliana]
  misc_feature (1)..(259): Homolog of NCBI NO: 24417384 NR Description: unknown [Arabidopsis thaliana]
  misc_feature (1)..(153): Homolog of NCBI NO: 15231369 NR Description: unknown protein; protein id: At3g07030.1 thaliana] >gi|6729010|gb|AAF27007.1|AC016827_18 unknown protein
  misc_feature (41)..(258): Homolog of NCBI NO: 25404999 NR Description: protein T4O12.22 [imported] - Arabidopsis >gi|8778814|gb|AAF79819.1|AC007396_20 T4O12.22 [Arabidopsis
  misc_feature (1)..(41): Homolog of NCBI NO: 25404999 NR Description: protein T4O12.22 [imported] - Arabidopsis >gi|8778814|gb|AAF79819.1|AC007396_20 T4O12.22 [Arabidopsis
  misc_feature (7)..(249): Homolog of NCBI NO: 23612874 NR Description: hypothetical protein, conserved [Plasmodium
  misc_feature (7)..(244): Homolog of NCBI NO: 23485324 NR Description: Arabidopsis thaliana At1g20220/T20H2_3-related
MDRYQRVEKPREESPIGANEIRITAQGRPRNYITYALALVQDNATDDIVIKAMGRAINKTVAIVELLKRRIAGLHQNTSIESIDITDTWEPLEEGLVTLETIRHVSLITIKLSKKELDTSSPGYQPPIPADQVRPAADFDQDAEAVPSGRGRGRGRRSRGRGRGRGFSSGVDYDDEIGEPEEAPRGYRGRGRGRGGRGSFAVGRGYGGDNYAMEEAGRYDDDGYNAPPMQRYEGGRGRGRGRGRGRGRGRQGHGPPPQQ

SEQ ID NO: 12290 - protein, 207 aa, Zea mays subsp. mays
  peptide (1)..(207): Ceres Seq. ID no. 12366721
  misc_feature (1)..(205): Homolog of NCBI NO: 34897552 NR Description: OSJNBa0042L16.13 [Oryza sativa (japonica
  misc_feature (1)..(205): Homolog of NCBI NO: 25518088 NR Description: T20H2.2 protein - Arabidopsis thaliana Contains similarity to pigpen protein from Mus musculus and contains protein of unknown function DUF78 PF|01918 domain.
  misc_feature (1)..(205): Homolog of NCBI NO: 18394837 NR Description: expressed protein; protein id: At1g20220.1, by cDNA: gi_16612273 [Arabidopsis thaliana]
  misc_feature (1)..(206): Homolog of NCBI NO: 18410994 NR Description: expressed protein; protein id: At1g76010.1, by cDNA: gi_15724323, supported by cDNA: gi_15809881, supported cDNA: gi_16226598 [Arabidopsis thaliana]
  misc_feature (1)..(207): Homolog of NCBI NO: 24417384 NR Description: unknown [Arabidopsis thaliana]
  misc_feature (1)..(101): Homolog of NCBI NO: 15231369 NR Description: unknown protein; protein id: At3g07030.1 thaliana] >gi|6729010|gb|AAF27007.1|AC016827_18 unknown protein
  misc_feature (1)..(206): Homolog of NCBI NO: 25404999 NR Description: protein T4O12.22 [imported] - Arabidopsis >gi|8778814|gb|AAF79819.1|AC007396_20 T4O12.22 [Arabidopsis
  misc_feature (1)..(197): Homolog of NCBI NO: 23612874 NR Description: hypothetical protein, conserved [Plasmodium
  misc_feature (1)..(192): Homolog of NCBI NO: 23485324 NR Description: Arabidopsis thaliana At1g20220/T20H2_3-related
  misc_feature (97)..(206): Homolog of NCBI NO: 25404999 NR Description: protein T4O12.22 [imported] - Arabidopsis >gi|8778814|gb|AAF79819.1|AC007396_20 T4O12.22 [Arabidopsis
MGRAINKTVAIVELLKRRIAGLHQNTSIESIDITDTWEPLEEGLVTLETIRHVSLITIKLSKKELDTSSPGYQPPIPADQVRPAADFDQDAEAVPSGRGRGRGRRSRGRGRGRGFSSGVDYDDEIGEPEEAPRGYRGRGRGRGGRGSFAVGRGYGGDNYAMEEAGRYDDDGYNAPPMQRYEGGRGRGRGRGRGRGRGRQGHGPPPQQ

SEQ ID NO: 12291 - DNA, 789 bp, Zea mays subsp. mays; identical to SEQ ID NO: 1699
  misc_feature (1)..(789): Ceres Seq. ID no. 12355957
  misc_feature: MA Experiment ID: 108528 Result: Down-regulated in Transcription
  misc_feature: MA Experiment 108528 PARAMETER Experiment Name: Zm_Imbibed_Seeds_P Parameter: Age (day) Value: 5 vs. 2
  misc_feature: MA Experiment 108528 PARAMETER Experiment Name: Zm_Imbibed_Seeds_P Parameter: Organism Value: Zea mays
  misc_feature: MA Experiment 108528 PARAMETER Experiment Name: Zm_Imbibed_Seeds_P Parameter: Plant Line Value: 35A19
  misc_feature: MA Experiment 108528 PARAMETER Experiment Name: Zm_Imbibed_Seeds_P Parameter: Tissue Value: Aerial vs. Embryo
  misc_feature: MA Experiment ID: 108530 Result: Down-regulated in Transcription
  misc_feature: MA Experiment 108530 PARAMETER Experiment Name: Zm_Imbibed_Seeds_P Parameter: Age (day) Value: 6 vs. 2
  misc_feature: MA Experiment 108530 PARAMETER Experiment Name: Zm_Imbibed_Seeds_P Parameter: Organism Value: Zea mays
  misc_feature: MA Experiment 108530 PARAMETER Experiment Name: Zm_Imbibed_Seeds_P Parameter: Plant Line Value: 35A19
  misc_feature: MA Experiment 108530 PARAMETER Experiment Name: Zm_Imbibed_Seeds_P Parameter: Tissue Value: Aerial vs. Embryo
  misc_feature: MA Experiment ID: 108535 Result: Up-regulated in Transcription
  misc_feature: MA Experiment 108535 PARAMETER Experiment Name: Zm_Meristem_P Parameter: Age (day) Value: 8
  misc_feature: MA Experiment 108535 PARAMETER Experiment Name: Zm_Meristem_P Parameter: Organism Value: Zea mays
  misc_feature: MA Experiment 108535 PARAMETER Experiment Name: Zm_Meristem_P Parameter: Plant Line Value: 35A19
  misc_feature: MA Experiment 108535 PARAMETER Experiment Name: Zm_Meristem_P Parameter: Tissue Value: Root Meristem vs. Above Root Meristem
  misc_feature: MA Experiment ID: 20000488 Result: Up-regulated in Transcription
  misc_feature: MA Experiment 20000488 PARAMETER Experiment Name: Zm_50mM_NH4NO3_L_to_H_P Parameter: Organism Value: Zea mays
  misc_feature: MA Experiment 20000488 PARAMETER Experiment Name: Zm_50mM_NH4NO3_L_to_H_P Parameter: Timepoint (hr) Value: 8
  misc_feature: MA Experiment 20000488 PARAMETER Experiment Name: Zm_50mM_NH4NO3_L_to_H_P Parameter: Tissue Value: Leaves
  misc_feature: MA Experiment 20000488 PARAMETER Experiment Name: Zm_50mM_NH4NO3_L_to_H_P Parameter: Treatment Value: 50mM NH4NO3 vs. 100mM Mannitol
  misc_feature: MA Experiment ID: 20001606 Result: Up-regulated in Transcription
  misc_feature: MA Experiment 20001606 PARAMETER Experiment Name: Zm_50ppm_KNO3_L-to-H_P Parameter: Age (day) Value: 19
  misc_feature: MA Experiment 20001606 PARAMETER Experiment Name: Zm_50ppm_KNO3_L-to-H_P Parameter: Organism Value: Zea mays
  misc_feature: MA Experiment 20001606 PARAMETER Experiment Name: Zm_50ppm_KNO3_L-to-H_P Parameter: Plant Line Value: 35A19
  misc_feature: MA Experiment 20001606 PARAMETER Experiment Name: Zm_50ppm_KNO3_L-to-H_P Parameter: Timepoint (hr) Value: 8
  misc_feature: MA Experiment 20001606 PARAMETER Experiment Name: Zm_50ppm_KNO3_L-to-H_P Parameter: Tissue Value: Shoots
  misc_feature: MA Experiment 20001606 PARAMETER Experiment Name: Zm_50ppm_KNO3_L-to-H_P Parameter: Treatment Value: 50ppm KNO3 vs. 50ppm KCl
  misc_feature: MA Experiment ID: 20001612 Result: Up-regulated in Transcription
  misc_feature: MA Experiment 20001612 PARAMETER Experiment Name: Zm_50ppm_KNO3_L-to-H_P Parameter: Age (day) Value: 19
  misc_feature: MA Experiment 20001612 PARAMETER Experiment Name: Zm_50ppm_KNO3_L-to-H_P Parameter: Organism Value: Zea mays
  misc_feature: MA Experiment 20001612 PARAMETER Experiment Name: Zm_50ppm_KNO3_L-to-H_P Parameter: Plant Line Value: 35A19
  misc_feature: MA Experiment 20001612 PARAMETER Experiment Name: Zm_50ppm_KNO3_L-to-H_P Parameter: Timepoint (hr) Value: 8
  misc_feature: MA Experiment 20001612 PARAMETER Experiment Name: Zm_50ppm_KNO3_L-to-H_P Parameter: Tissue Value: Roots
  misc_feature: MA Experiment 20001612 PARAMETER Experiment Name: Zm_50ppm_KNO3_L-to-H_P Parameter: Treatment Value: 50ppm KNO3 vs. 50ppm KCl

SEQ ID NO: 12292 - protein, 161 aa, Zea mays subsp. mays; identical to SEQ ID NO: 1700
  peptide (1)..(161): Ceres Seq. ID no. 12355958
  misc_feature (3)..(73): Pfam Name: Ribosomal protein L24e Pfam Description: Ribosomal protein L24e
  misc_feature (3)..(73): Pfam Name: Ribosomal protein L24e Pfam Description: Ribosomal protein L24e
  misc_feature (3)..(73): Pfam Name: Ribosomal protein L24e Pfam Description: Ribosomal protein L24e
  misc_feature (1)..(161): Homolog of NCBI NO: 1710521 NR Description: 60S RIBOSOMAL PROTEIN L24 >gi|7440778|pir||T06178
  misc_feature (4)..(161): Homolog of NCBI NO: 34900364 NR Description: putative 60S ribosomal protein L24 [Oryza sativa
  misc_feature (1)..(160): Homolog of NCBI NO: 6094040 NR Description: 60S ribosomal protein L24
  misc_feature (1)..(156): Homolog of NCBI NO: 10180025 NR Description: 60S ribosomal protein L24 [Prunus avium]
  misc_feature (1)..(161): Homolog of NCBI NO: 18404176 NR Description: 60S ribosomal protein L24; protein id: supported by cDNA: 14564., supported by cDNA: gi_16604375, by cDNA: gi_18252830 [Arabidopsis thaliana]
  misc_feature (4)..(161): Homolog of NCBI NO: 34900364 NR Description: putative 60S ribosomal protein L24 [Oryza sativa
  misc_feature (1)..(156): Homolog of NCBI NO: 10180025 NR Description: 60S ribosomal protein L24 [Prunus avium]
  misc_feature (1)..(160): Homolog of NCBI NO: 6094040 NR Description: 60S ribosomal protein L24
  misc_feature (4)..(161): Homolog of NCBI NO: 34900364 NR Description: putative 60S ribosomal protein L24 [Oryza sativa
  misc_feature (1)..(161): Homolog of NCBI NO: 1710521 NR Description: 60S RIBOSOMAL PROTEIN L24 >gi|7440778|pir||T06178
  misc_feature (10)..(154): Homolog of NCBI NO: 40741063 NR Description: conserved hypothetical protein [Aspergillus
  misc_feature (3)..(150): Homolog of NCBI NO: 19115030 NR Description: 60S ribosomal protein L24 [Schizosaccharomyces
  misc_feature (3)..(150): Homolog of NCBI NO: 19075214 NR Description: 60s ribosomal protein L24 [Schizosaccharomyces
  misc_feature (5)..(161): Homolog of NCBI NO: 25295112 NR Description: 60S ribosomal protein L24 [imported] -
  misc_feature (1)..(161): Homolog of NCBI NO: 15231730 NR Description: 60S ribosomal protein - like; protein id: supported by cDNA: gi_16648705, supported by cDNA: gi_20260561 thaliana] >gi|26454659|sp|P38666|RL24_ARATH 60S ribosomal protein
  misc_feature (1)..(161): Homolog of NCBI NO: 18404176 NR Description: 60S ribosomal protein L24; protein id: supported by cDNA: 14564., supported by cDNA: gi_16604375, by cDNA: gi_18252830 [Arabidopsis thaliana]
  misc_feature (10)..(154): Homolog of NCBI NO: 40741063 NR Description: conserved hypothetical protein [Aspergillus
  misc_feature (3)..(150): Homolog of NCBI NO: 19115030 NR Description: 60S ribosomal protein L24 [Schizosaccharomyces
  misc_feature (3)..(150): Homolog of NCBI NO: 19075214 NR Description: 60s ribosomal protein L24 [Schizosaccharomyces
  misc_feature (5)..(161): Homolog of NCBI NO: 25295112 NR Description: 60S ribosomal protein L24 [imported] -
  misc_feature (1)..(161): Homolog of NCBI NO: 15231730 NR Description: 60S ribosomal protein - like; protein id: supported by cDNA: gi_16648705, supported by cDNA: gi_20260561 thaliana] >gi|26454659|sp|P38666|RL24_ARATH 60S ribosomal protein
  misc_feature (1)..(161): Homolog of NCBI NO: 18404176 NR Description: 60S ribosomal protein L24; protein id: supported by cDNA: 14564., supported by cDNA: gi_16604375, by cDNA: gi_18252830 [Arabidopsis thaliana]
  misc_feature (1)..(156): Homolog of NCBI NO: 10180025 NR Description: 60S ribosomal protein L24 [Prunus avium]
  misc_feature (1)..(160): Homolog of NCBI NO: 6094040 NR Description: 60S ribosomal protein L24
  misc_feature (1)..(161): Homolog of NCBI NO: 1710521 NR Description: 60S RIBOSOMAL PROTEIN L24 >gi|7440778|pir||T06178
  misc_feature (1)..(161): Homolog of NCBI NO: 15231730 NR Description: 60S ribosomal protein - like; protein id: supported by cDNA: gi_16648705, supported by cDNA: gi_20260561 thaliana] >gi|26454659|sp|P38666|RL24_ARATH 60S ribosomal protein
  misc_feature (5)..(161): Homolog of NCBI NO: 25295112 NR Description: 60S ribosomal protein L24 [imported] -
  misc_feature (3)..(150): Homolog of NCBI NO: 19075214 NR Description: 60s ribosomal protein L24 [Schizosaccharomyces
  misc_feature (3)..(150): Homolog of NCBI NO: 19115030 NR Description: 60S ribosomal protein L24 [Schizosaccharomyces
  misc_feature (10)..(154): Homolog of NCBI NO: 40741063 NR Description: conserved hypothetical protein [Aspergillus

SEQ ID NO: 12293 - protein, 106 aa, Zea mays subsp. mays; identical to SEQ ID NO: 1701
  peptide (1)..(106): Ceres Seq. ID no. 12355959
  misc_feature (1)..(99): Homolog of NCBI NO: 40741063 NR Description: conserved hypothetical protein [Aspergillus
  misc_feature (1)..(106): Homolog of NCBI NO: 1710521 NR Description: 60S RIBOSOMAL PROTEIN L24 >gi|7440778|pir||T06178
  misc_feature (1)..(106): Homolog of NCBI NO: 34900364 NR Description: putative 60S ribosomal protein L24 [Oryza sativa
  misc_feature (1)..(105): Homolog of NCBI NO: 6094040 NR Description: 60S ribosomal protein L24
  misc_feature (1)..(101): Homolog of NCBI NO: 10180025 NR Description: 60S ribosomal protein L24 [Prunus avium]
  misc_feature (1)..(106): Homolog of NCBI NO: 18404176 NR Description: 60S ribosomal protein L24; protein id: supported by cDNA: 14564., supported by cDNA: gi_16604375, by cDNA: gi_18252830 [Arabidopsis thaliana]
  misc_feature (1)..(106): Homolog of NCBI NO: 15231730 NR Description: 60S ribosomal protein - like; protein id: supported by cDNA: gi_16648705, supported by cDNA: gi_20260561 thaliana] >gi|26454659|sp|P38666|RL24_ARATH 60S ribosomal protein
  misc_feature (1)..(106): Homolog of NCBI NO: 25295112 NR Description: 60S ribosomal protein L24 [imported] -
  misc_feature (1)..(95): Homolog of NCBI NO: 19075214 NR Description: 60s ribosomal protein L24 [Schizosaccharomyces
  misc_feature (1)..(95): Homolog of NCBI NO: 19115030 NR Description: 60S ribosomal protein L24 [Schizosaccharomyces
  misc_feature (1)..(106): Homolog of NCBI NO: 1710521 NR Description: 60S RIBOSOMAL PROTEIN L24 >gi|7440778|pir||T06178
  misc_feature (1)..(106): Homolog of NCBI NO: 34900364 NR Description: putative 60S ribosomal protein L24 [Oryza sativa
  misc_feature (1)..(105): Homolog of NCBI NO: 6094040 NR Description: 60S ribosomal protein L24
  misc_feature (1)..(101): Homolog of NCBI NO: 10180025 NR Description: 60S ribosomal protein L24 [Prunus avium]
  misc_feature (1)..(106): Homolog of NCBI NO: 18404176 NR Description: 60S ribosomal protein L24; protein id: supported by cDNA: 14564., supported by cDNA: gi_16604375, by cDNA: gi_18252830 [Arabidopsis thaliana]
  misc_feature (1)..(106): Homolog of NCBI NO: 15231730 NR Description: 60S ribosomal protein - like; protein id: supported by cDNA: gi_16648705, supported by cDNA: gi_20260561 thaliana] >gi|26454659|sp|P38666|RL24_ARATH 60S ribosomal protein
  misc_feature (1)..(106): Homolog of NCBI NO: 25295112 NR Description: 60S ribosomal protein L24 [imported] -
  misc_feature (1)..(95): Homolog of NCBI NO: 19075214 NR Description: 60s ribosomal protein L24 [Schizosaccharomyces
  misc_feature (1)..(95): Homolog of NCBI NO: 19115030 NR Description: 60S ribosomal protein L24 [Schizosaccharomyces
  misc_feature (1)..(99): Homolog of NCBI NO: 40741063 NR Description: conserved hypothetical protein [Aspergillus
  misc_feature (1)..(106): Homolog of NCBI NO: 1710521 NR Description: 60S RIBOSOMAL PROTEIN L24 >gi|7440778|pir||T06178
  misc_feature (1)..(106): Homolog of NCBI NO: 34900364 NR Description: putative 60S ribosomal protein L24 [Oryza sativa
  misc_feature (1)..(105): Homolog of NCBI NO: 6094040 NR Description: 60S ribosomal protein L24
  misc_feature (1)..(101): Homolog of NCBI NO: 10180025 NR Description: 60S ribosomal protein L24 [Prunus avium]
  misc_feature (1)..(106): Homolog of NCBI NO: 18404176 NR Description: 60S ribosomal protein L24; protein id: supported by cDNA: 14564., supported by cDNA: gi_16604375, by cDNA: gi_18252830 [Arabidopsis thaliana]
  misc_feature (1)..(106): Homolog of NCBI NO: 15231730 NR Description: 60S ribosomal protein - like; protein id: supported by cDNA: gi_16648705, supported by cDNA: gi_20260561 thaliana] >gi|26454659|sp|P38666|RL24_ARATH 60S ribosomal protein
  misc_feature (1)..(106): Homolog of NCBI NO: 25295112 NR Description: 60S ribosomal protein L24 [imported] -
  misc_feature (1)..(95): Homolog of NCBI NO: 19075214 NR Description: 60s ribosomal protein L24 [Schizosaccharomyces
  misc_feature (1)..(95): Homolog of NCBI NO: 19115030 NR Description: 60S ribosomal protein L24 [Schizosaccharomyces
  misc_feature (1)..(99): Homolog of NCBI NO: 40741063 NR Description: conserved hypothetical protein [Aspergillus

SEQ ID NO: 12294 - DNA, 1450 bp, Zea mays subsp. mays
  misc_feature (1)..(1450): Ceres Seq. ID no. 12372642
  misc_feature: MA Experiment ID: 108527 Result: Up-regulated in Transcription
  misc_feature: MA Experiment 108527 PARAMETER Experiment Name: Zm_5mM_NO_P Parameter: Age (day) Value: 8
  misc_feature: MA Experiment 108527 PARAMETER Experiment Name: Zm_5mM_NO_P Parameter: Organism Value: Zea mays
  misc_feature: MA Experiment 108527 PARAMETER Experiment Name: Zm_5mM_NO_P Parameter: Plant Line Value: 35A19
  misc_feature: MA Experiment 108527 PARAMETER Experiment Name: Zm_5mM_NO_P Parameter: Timepoint (hr) Value: 6
  misc_feature: MA Experiment 108527 PARAMETER Experiment Name: Zm_5mM_NO_P Parameter: Tissue Value: Aerial
  misc_feature: MA Experiment 108527 PARAMETER Experiment Name: Zm_5mM_NO_P Parameter: Treatment Value: 5mM NO vs. No Treatment
  misc_feature: MA Experiment ID: 108528 Result: Up-regulated in Transcription
  misc_feature: MA Experiment 108528 PARAMETER Experiment Name: Zm_Imbibed_Seeds_P Parameter: Age (day) Value: 5 vs. 2
  misc_feature: MA Experiment 108528 PARAMETER Experiment Name: Zm_Imbibed_Seeds_P Parameter: Organism Value: Zea mays
  misc_feature: MA Experiment 108528 PARAMETER Experiment Name: Zm_Imbibed_Seeds_P Parameter: Plant Line Value: 35A19
  misc_feature: MA Experiment 108528 PARAMETER Experiment Name: Zm_Imbibed_Seeds_P Parameter: Tissue Value: Aerial vs. Embryo
  misc_feature: MA Experiment ID: 108530 Result: Up-regulated in Transcription
  misc_feature: MA Experiment 108530 PARAMETER Experiment Name: Zm_Imbibed_Seeds_P Parameter: Age (day) Value: 6 vs. 2
  misc_feature: MA Experiment 108530 PARAMETER Experiment Name: Zm_Imbibed_Seeds_P Parameter: Organism Value: Zea mays
  misc_feature: MA Experiment 108530 PARAMETER Experiment Name: Zm_Imbibed_Seeds_P Parameter: Plant Line Value: 35A19
  misc_feature: MA Experiment 108530 PARAMETER Experiment Name: Zm_Imbibed_Seeds_P Parameter: Tissue Value: Aerial vs. Embryo
  misc_feature: MA Experiment ID: 108543 Result: Down-regulated in Transcription
  misc_feature: MA Experiment ID: 108544 Result: Down-regulated in Transcription
  misc_feature: MA Experiment ID: 108547 Result: Up-regulated in Transcription
  misc_feature: MA Experiment 108547 PARAMETER Experiment Name: Zm_Imbibed_Seeds_P Parameter: Age (day) Value: 4 vs. 2
  misc_feature: MA Experiment 108547 PARAMETER Experiment Name: Zm_Imbibed_Seeds_P Parameter: Organism Value: Zea mays
  misc_feature: MA Experiment 108547 PARAMETER Experiment Name: Zm_Imbibed_Seeds_P Parameter: Plant Line Value: 35A19
  misc_feature: MA Experiment 108547 PARAMETER Experiment Name: Zm_Imbibed_Seeds_P Parameter: Tissue Value: Aerial vs. Embryo
  misc_feature: MA Experiment ID: 108559 Result: Up-regulated in Transcription
  misc_feature: MA Experiment 108559 PARAMETER Experiment Name: Zm_5mM_NO_P Parameter: Age (day) Value: 8
  misc_feature: MA Experiment 108559 PARAMETER Experiment Name: Zm_5mM_NO_P Parameter: Organism Value: Zea mays
  misc_feature: MA Experiment 108559 PARAMETER Experiment Name: Zm_5mM_NO_P Parameter: Plant Line Value: 35A19
  misc_feature: MA Experiment 108559 PARAMETER Experiment Name: Zm_5mM_NO_P Parameter: Timepoint (hr) Value: 12
  misc_feature: MA Experiment 108559 PARAMETER Experiment Name: Zm_5mM_NO_P Parameter: Tissue Value: Aerial
  misc_feature: MA Experiment 108559 PARAMETER Experiment Name: Zm_5mM_NO_P Parameter: Treatment Value: 5mM NO vs. No Treatment
  misc_feature: MA Experiment ID: 108689 Result: Up-regulated in Transcription
  misc_feature: MA Experiment 108689 PARAMETER Experiment Name: Zm_Drought_Roots_P Parameter: Age (day) Value: 9
  misc_feature: MA Experiment 108689 PARAMETER Experiment Name: Zm_Drought_Roots_P Parameter: Organism Value: Zea mays
  misc_feature: MA Experiment 108689 PARAMETER Experiment Name: Zm_Drought_Roots_P Parameter: Plant Line Value: 35A19
  misc_feature: MA Experiment 108689 PARAMETER Experiment Name: Zm_Drought_Roots_P Parameter: Timepoint (hr) Value: 24
  misc_feature: MA Experiment 108689 PARAMETER Experiment Name: Zm_Drought_Roots_P Parameter: Tissue Value: Roots
  misc_feature: MA Experiment 108689 PARAMETER Experiment Name: Zm_Drought_Roots_P Parameter: Treatment Value: Drought vs. No Drought
  misc_feature: MA Experiment ID: 20000477 Result: Up-regulated in Transcription
  misc_feature: MA Experiment 20000477 PARAMETER Experiment Name: Zm_5mM_SA_P Parameter: Age (day) Value: 10
  misc_feature: MA Experiment 20000477 PARAMETER Experiment Name: Zm_5mM_SA_P Parameter: Organism Value: Zea mays
  misc_feature: MA Experiment 20000477 PARAMETER Experiment Name: Zm_5mM_SA_P Parameter: Plant Line Value: 35A19
  misc_feature: MA Experiment 20000477 PARAMETER Experiment Name: Zm_5mM_SA_P Parameter: Timepoint (hr) Value: 48
  misc_feature: MA Experiment 20000477 PARAMETER Experiment Name: Zm_5mM_SA_P Parameter: Tissue Value: Aerial
  misc_feature: MA Experiment 20000477 PARAMETER Experiment Name: Zm_5mM_SA_P Parameter: Treatment Value: 5mM SA vs. No Treatment
  misc_feature: MA Experiment ID: 20000478 Result: Up-regulated in Transcription
  misc_feature: MA Experiment 20000478 PARAMETER Experiment Name: Zm_5mM_SA_P Parameter: Age (day) Value: 11
  misc_feature: MA Experiment 20000478 PARAMETER Experiment Name: Zm_5mM_SA_P Parameter: Organism Value: Zea mays
  misc_feature: MA Experiment 20000478 PARAMETER Experiment Name: Zm_5mM_SA_P Parameter: Plant Line Value: 35A19
  misc_feature: MA Experiment 20000478 PARAMETER Experiment Name: Zm_5mM_SA_P Parameter: Timepoint (hr) Value: 72
  misc_feature: MA Experiment 20000478 PARAMETER Experiment Name: Zm_5mM_SA_P Parameter: Tissue Value: Aerial
  misc_feature: MA Experiment 20000478 PARAMETER Experiment Name: Zm_5mM_SA_P Parameter: Treatment Value: 5mM SA vs. No Treatment
  misc_feature: MA Experiment ID: 20000535 Result: Up-regulated in Transcription
  misc_feature: MA Experiment 20000535 PARAMETER Experiment Name: Zm_Hybrid_Seed_Dev_P Parameter: DAP Value: 30 vs. 12
  misc_feature: MA Experiment 20000535 PARAMETER Experiment Name: Zm_Hybrid_Seed_Dev_P Parameter: Organism Value: Zea mays
  misc_feature: MA Experiment 20000535 PARAMETER Experiment Name: Zm_Hybrid_Seed_Dev_P Parameter: Plant Line Value: 35A19
  misc_feature: MA Experiment 20000535 PARAMETER Experiment Name: Zm_Hybrid_Seed_Dev_P Parameter: Tissue Value: Embryo vs. Unfert Floret
gcacgagaccattacctagaacatcctaatcgaaaaggcttctcgattcttgaccatcctgctgttctgccttctccgtccgcgccttcgagaaggccacagagcgaaggaattgcagagttttcttggcgcgaaagaaggggagagagagagagaaagacgaagatgtttatccagaaggcatggaggacggcggcgtttgggctctacggcttcaaccatttcacaaaatctggtttcctggagcatgcgaagaaattcagagaggaggatatgcagatccggttggatggaaaaaattgcctagtaactggagcgaattctggcattggttttgctatggctgagggcttggcttcacatggtgctaccgtctatatggtctgtcgtaacaaggagagaggggaggcagctctcaaccaaataagatccaaaactggcaatgcaaacgttcatctggagatatgtgacctttcatctatcaatcaagtaaaatcgtttgcaacaaagttcacttcgatggataaaccactccatgtcttggtaaacaatgctggcttattagagcacaagcatgagactacagcagaagggttggagctcaattttgctgtcaatgtagctgcaacatacactttaacagagctagttatgccgtcattggagaaagcggcaccagatgctcgtgtcatcacagttgcatcaggaggcatgtacaccgagccactgaacaaagacttacagttcaccgaaggcaccttcgatgggacgcaacagtatgctcgaaacaaaagagttcaggtggcactgactgaatggtgggctgagaaaagcggtgacaggggagtcggtttctacgccatgcatcctggatgggccgatacgcctggggtcgccaagagcttgcccggactgtcagagaggttgtctggaaacctgagaacaaatgacgaaggagctgatacagttgtttggttggcttgcaacctaaggagaagttagcctcgggagccttttacttcgaccgtgctgaagcaccaaaacatttgaagtttgctgggactgcagattcgcacgctcagataaaccctatcgttgatagcattagatccatctgtggtctctctgttaatggttgagctgccaaagcaaaagtgatatacagctccatcgtcaatagcattagattcatctgtggcttctctgttaaaggttgagcttccaaagcaaaagtgaagtgatatattacttgatataatgggtgcatgattcataaaaccgcaaaaaattgaagagtggaaaaaaaaatgcaccagccgggaatcgaacccgggtctgtaccgtggcagggtactattctaccactagaccactggtgcctttgatgctaaagttatgtacgtatttaatttcttttgaatcaacaatcaaacatagatccaacattctt

SEQ ID NO: 12295 - protein, 333 aa, Zea mays subsp. mays
  peptide (1)..(333): Ceres Seq. ID no. 12372643
  misc_feature (56)..(327): Homolog of NCBI NO: 15234031 NR Description: putative protein; protein id: At4g09750.1
  misc_feature (62)..(327): Homolog of NCBI NO: 34106252 NR Description: short chain dehydrogenase/reductase [Danio rerio]
  misc_feature (133)..(327): Homolog of NCBI NO: 13375997 NR Description: hypothetical protein FLJ13639 [Homo sapiens]
  misc_feature (133)..(296): Homolog of NCBI NO: 14602619 NR Description: hypothetical protein FLJ13639 [Homo sapiens]
  misc_feature (86)..(302): Homolog of NCBI NO: 24586330 NR Description: CG30495-PA [Drosophila melanogaster]
  misc_feature (94)..(327): Homolog of NCBI NO: 6630624 NR Description: M42C60 [Mus musculus]
  misc_feature (94)..(327): Homolog of NCBI NO: 5668733 NR Description: UBE-1a [Mus musculus]
  misc_feature (94)..(327): Homolog of NCBI NO: 19482172 NR Description: short-chain dehydrogenase/reductase 1; cell line
  misc_feature (94)..(327): Homolog of NCBI NO: 5668735 NR Description: UBE-1b [Mus musculus]
  misc_feature (94)..(322): Homolog of NCBI NO: 22748935 NR Description: hypothetical protein FLJ30273; retinol
ARDHYLEHPNRKGFSILDHPAVLPSPSAPSRRPQSEGIAEFSWRERRGERERKTKMFIQKAWRTAAFGLYGFNHFTKSGFLEHAKKFREEDMQIRLDGKNCLVTGANSGIGFAMAEGLASHGATVYMVCRNKERGEAALNQIRSKTGNANVHLEICDLSSINQVKSFATKFTSMDKPLHVLVNNAGLLEHKHETTAEGLELNFAVNVAATYTLTELVMPSLEKAAPDARVITVASGGMYTEPLNKDLQFTEGTFDGTQQYARNKRVQVALTEWWAEKSGDRGVGFYAMHPGWADTPGVAKSLPGLSERLSGNLRTNDEGADTVVWLACNLRRS

SEQ ID NO: 12296 - protein, 278 aa, Zea mays subsp. mays
  peptide (1)..(278): Ceres Seq. ID no. 12372644
  misc_feature (1)..(272): Homolog of NCBI NO: 15234031 NR Description: putative protein; protein id: At4g09750.1
  misc_feature (7)..(272): Homolog of NCBI NO: 34106252 NR Description: short chain dehydrogenase/reductase [Danio rerio]
  misc_feature (78)..(272): Homolog of NCBI NO: 13375997 NR Description: hypothetical protein FLJ13639 [Homo sapiens]
  misc_feature (78)..(241): Homolog of NCBI NO: 14602619 NR Description: hypothetical protein FLJ13639 [Homo sapiens]
  misc_feature (31)..(247): Homolog of NCBI NO: 24586330 NR Description: CG30495-PA [Drosophila melanogaster]
  misc_feature (39)..(272): Homolog of NCBI NO: 6630624 NR Description: M42C60 [Mus musculus]
  misc_feature (39)..(272): Homolog of NCBI NO: 5668733 NR Description: UBE-1a [Mus musculus]
  misc_feature (39)..(272): Homolog of NCBI NO: 5668735 NR Description: UBE-1b [Mus musculus]
  misc_feature (39)..(272): Homolog of NCBI NO: 19482172 NR Description: short-chain dehydrogenase/reductase 1; cell line
  misc_feature (39)..(267): Homolog of NCBI NO: 22748935 NR Description: hypothetical protein FLJ30273; retinol
MFIQKAWRTAAFGLYGFNHFTKSGFLEHAKKFREEDMQIRLDGKNCLVTGANSGIGFAMAEGLASHGATVYMVCRNKERGEAALNQIRSKTGNANVHLEICDLSSINQVKSFATKFTSMDKPLHVLVNNAGLLEHKHETTAEGLELNFAVNVAATYTLTELVMPSLEKAAPDARVITVASGGMYTEPLNKDLQFTEGTFDGTQQYARNKRVQVALTEWWAEKSGDRGVGFYAMHPGWADTPGVAKSLPGLSERLSGNLRTNDEGADTVVWLACNLRRS

SEQ ID NO: 12297 - protein, 242 aa, Zea mays subsp. mays
  peptide (1)..(242): Ceres Seq. ID no. 12372645
  misc_feature (1)..(236): Homolog of NCBI NO: 15234031 NR Description: putative protein; protein id: At4g09750.1
  misc_feature (1)..(236): Homolog of NCBI NO: 34106252 NR Description: short chain dehydrogenase/reductase [Danio rerio]
  misc_feature (42)..(236): Homolog of NCBI NO: 13375997 NR Description: hypothetical protein FLJ13639 [Homo sapiens]
  misc_feature (42)..(205): Homolog of NCBI NO: 14602619 NR Description: hypothetical protein FLJ13639 [Homo sapiens]
  misc_feature (1)..(211): Homolog of NCBI NO: 24586330 NR Description: CG30495-PA [Drosophila melanogaster]
  misc_feature (3)..(236): Homolog of NCBI NO: 6630624 NR Description: M42C60 [Mus musculus]
  misc_feature (3)..(236): Homolog of NCBI NO: 5668733 NR Description: UBE-1a [Mus musculus]
  misc_feature (3)..(236): Homolog of NCBI NO: 19482172 NR Description: short-chain dehydrogenase/reductase 1; cell line
  misc_feature (3)..(236): Homolog of NCBI NO: 5668735 NR Description: UBE-1b [Mus musculus]
  misc_feature (3)..(231): Homolog of NCBI NO: 22748935 NR Description: hypothetical protein FLJ30273; retinol
MQIRLDGKNCLVTGANSGIGFAMAEGLASHGATVYMVCRNKERGEAALNQIRSKTGNANVHLEICDLSSINQVKSFATKFTSMDKPLHVLVNNAGLLEHKHETTAEGLELNFAVNVAATYTLTELVMPSLEKAAPDARVITVASGGMYTEPLNKDLQFTEGTFDGTQQYARNKRVQVALTEWWAEKSGDRGVGFYAMHPGWADTPGVAKSLPGLSERLSGNLRTNDEGADTVVWLACNLRRS

SEQ ID NO: 12298 - DNA, 1432 bp, Zea mays subsp. mays
  misc_feature (1)..(1432): Ceres Seq. ID no. 12348832
  misc_feature: MA Experiment ID: 108528 Result: Up-regulated in Transcription
  misc_feature: MA Experiment 108528 PARAMETER Experiment Name: Zm_Imbibed_Seeds_P Parameter: Age (day) Value: 5 vs. 2
  misc_feature: MA Experiment 108528 PARAMETER Experiment Name: Zm_Imbibed_Seeds_P Parameter: Organism Value: Zea mays
  misc_feature: MA Experiment 108528 PARAMETER Experiment Name: Zm_Imbibed_Seeds_P Parameter: Plant Line Value: 35A19
  misc_feature: MA Experiment 108528 PARAMETER Experiment Name: Zm_Imbibed_Seeds_P Parameter: Tissue Value: Aerial vs. Embryo
  misc_feature: MA Experiment ID: 108530 Result: Up-regulated in Transcription
  misc_feature: MA Experiment 108530 PARAMETER Experiment Name: Zm_Imbibed_Seeds_P Parameter: Age (day) Value: 6 vs. 2
  misc_feature: MA Experiment 108530 PARAMETER Experiment Name: Zm_Imbibed_Seeds_P Parameter: Organism Value: Zea mays
  misc_feature: MA Experiment 108530 PARAMETER Experiment Name: Zm_Imbibed_Seeds_P Parameter: Plant Line Value: 35A19
  misc_feature: MA Experiment 108530 PARAMETER Experiment Name: Zm_Imbibed_Seeds_P Parameter: Tissue Value: Aerial vs. Embryo
  misc_feature: MA Experiment ID: 108547 Result: Up-regulated in Transcription
  misc_feature: MA Experiment 108547 PARAMETER Experiment Name: Zm_Imbibed_Seeds_P Parameter: Age (day) Value: 4 vs. 2
  misc_feature: MA Experiment 108547 PARAMETER Experiment Name: Zm_Imbibed_Seeds_P Parameter: Organism Value: Zea mays
  misc_feature: MA Experiment 108547 PARAMETER Experiment Name: Zm_Imbibed_Seeds_P Parameter: Plant Line Value: 35A19
  misc_feature: MA Experiment 108547 PARAMETER Experiment Name: Zm_Imbibed_Seeds_P Parameter: Tissue Value: Aerial vs. Embryo
  misc_feature: MA Experiment ID: 108556 Result: Down-regulated in Transcription
  misc_feature: MA Experiment 108556 PARAMETER Experiment Name: Zm_Drought_P Parameter: Age (day) Value: 9
  misc_feature: MA Experiment 108556 PARAMETER Experiment Name: Zm_Drought_P Parameter: Organism Value: Zea mays
  misc_feature: MA Experiment 108556 PARAMETER Experiment Name: Zm_Drought_P Parameter: Plant Line Value: 35A19
  misc_feature: MA Experiment 108556 PARAMETER Experiment Name: Zm_Drought_P Parameter: Timepoint (hr) Value: 24
  misc_feature: MA Experiment 108556 PARAMETER Experiment Name: Zm_Drought_P Parameter: Tissue Value: Aerial
  misc_feature: MA Experiment 108556 PARAMETER Experiment Name: Zm_Drought_P Parameter: Treatment Value: Drought vs. No Drought
  misc_feature: MA Experiment ID: 108597 Result: Down-regulated in Transcription
  misc_feature: MA Experiment 108597 PARAMETER Experiment Name: Zm_100uM_ABA_P Parameter: Age (day) Value: 9
  misc_feature: MA Experiment 108597 PARAMETER Experiment Name: Zm_100uM_ABA_P Parameter: Organism Value: Zea mays
  misc_feature: MA Experiment 108597 PARAMETER Experiment Name: Zm_100uM_ABA_P Parameter: Plant Line Value: 35A19
  misc_feature: MA Experiment 108597 PARAMETER Experiment Name: Zm_100uM_ABA_P Parameter: Timepoint (hr) Value: 24
  misc_feature: MA Experiment 108597 PARAMETER Experiment Name: Zm_100uM_ABA_P Parameter: Tissue Value: Aerial
  misc_feature: MA Experiment 108597 PARAMETER Experiment Name: Zm_100uM_ABA_P Parameter: Treatment Value: 100uM ABA vs. No Treatment
  misc_feature: MA Experiment ID: 20000477 Result: Down-regulated in Transcription
  misc_feature: MA Experiment 20000477 PARAMETER Experiment Name: Zm_5mM_SA_P Parameter: Age (day) Value: 10
  misc_feature: MA Experiment 20000477 PARAMETER Experiment Name: Zm_5mM_SA_P Parameter: Organism Value: Zea mays
  misc_feature: MA Experiment 20000477 PARAMETER Experiment Name: Zm_5mM_SA_P Parameter: Plant Line Value: 35A19
  misc_feature: MA Experiment 20000477 PARAMETER Experiment Name: Zm_5mM_SA_P Parameter: Timepoint (hr) Value: 48
  misc_feature: MA Experiment 20000477 PARAMETER Experiment Name: Zm_5mM_SA_P Parameter: Tissue Value: Aerial
  misc_feature: MA Experiment 20000477 PARAMETER Experiment Name: Zm_5mM_SA_P Parameter: Treatment Value: 5mM SA vs. No Treatment
  misc_feature: MA Experiment ID: 20000478 Result: Down-regulated in Transcription
  misc_feature: MA Experiment 20000478 PARAMETER Experiment Name: Zm_5mM_SA_P Parameter: Age (day) Value: 11
  misc_feature: MA Experiment 20000478 PARAMETER Experiment Name: Zm_5mM_SA_P Parameter: Organism Value: Zea mays
  misc_feature: MA Experiment 20000478 PARAMETER Experiment Name: Zm_5mM_SA_P Parameter: Plant Line Value: 35A19
  misc_feature: MA Experiment 20000478 PARAMETER Experiment Name: Zm_5mM_SA_P Parameter: Timepoint (hr) Value: 72
  misc_feature: MA Experiment 20000478 PARAMETER Experiment Name: Zm_5mM_SA_P Parameter: Tissue Value: Aerial
  misc_feature: MA Experiment 20000478 PARAMETER Experiment Name: Zm_5mM_SA_P Parameter: Treatment Value: 5mM SA vs. No Treatment
  misc_feature: MA Experiment ID: 20000480 Result: Down-regulated in Transcription
  misc_feature: MA Experiment 20000480 PARAMETER Experiment Name: Zm_Drought_P Parameter: Age (day) Value: 11
  misc_feature: MA Experiment 20000480 PARAMETER Experiment Name: Zm_Drought_P Parameter: Organism Value: Zea mays
  misc_feature: MA Experiment 20000480 PARAMETER Experiment Name: Zm_Drought_P Parameter: Plant Line Value: 35A19
  misc_feature: MA Experiment 20000480 PARAMETER Experiment Name: Zm_Drought_P Parameter: Timepoint (hr) Value: 72
  misc_feature: MA Experiment 20000480 PARAMETER Experiment Name: Zm_Drought_P Parameter: Tissue Value: Aerial
  misc_feature: MA Experiment 20000480 PARAMETER Experiment Name: Zm_Drought_P Parameter: Treatment Value: Drought vs. No Drought
aagatgctgagccacataactccggtgggtgtgggtccaacgccccccacctgcacgctggccccccgccccgccgcgggatcaaatacgccgcctccgcccgtccactccctcgccgcccccgtctcctctcctctcctctcccccgcatccacggccgcaggccgcagccagccactcgacgatctagtcgtctctctctccccgctctgccgcctcgctgccgcggcttcccgtcggctggaggatgaaggtcacggtcgtgtcccggagcggccgggaggtcgtcaagggcggcatcgacctcaaggactcggccaaggtcgcggacctgcaggaggccatccatgccaggactaagaagtattatccttctaggcagcggctcaccctcccccttcaacctggaaaaggcgggaagccagttgtcctcagtccgaaggccagcctgctagaatactgcgagaagggttctgggtcactgacagtggtcttcaaagatttagggccacaggtctactacagcacactgttcttcttcgagtacctgggtcctctcatcatctaccccatgttctactatctgcctgtctacaaatacttcgggtacgagggggagcgggccatgcaccctgtccagacctacgccatgtactactggtgcttccactacttcaagcggatcatggagacattcttcgtgcaccgcttcagccacgcgacgtcgccgctctcgaacgtcttcaggaactgtgcctactactggaccttcggcgcctacattgcttactactgcaaccacccgctgtacaccccagtgagtgatctgcagatgaagattgggtttggttttggggtcgtctgccaggtcgcgaacttctactgccacatcctgctgcggaacctcaggagcccaagcggcagcggcgggtaccagatcccccgcggtttcttgttcaacatcgtgacctgcgccaattacaccaccgagatctatcagtgggtcggcttcaacatcgccacgcagaccgtggcaggttacgtcttccttgtcgtggcggcaggcatcatgaccaactgggcgctcggcaagcacagccgtctgaagaagctgtttgacggcaaggatgggaggcccaagtaccctcgccggtgggtgattctccctccgttcctgtgaagaggtggtggtggtcggcctattgtgattcgatgtctacagacagttgtactgtactaatcgtgcctgtttagcggttgaacttggattccgttgtccgaaatttctaatccgaaagatggatttcattgtcttcttcttcttagcattatgtcactatctcacgtcgtcctgtctcaatacagtctaaggttcatgtgatgttatccccatttgtccacgcacaagtgaatgcagtcactatttcgattc

SEQ ID NO: 12299 - protein, 310 aa, Zea mays subsp. mays; identical to SEQ ID NO: 2382
  peptide (1)..(310): Ceres Seq. ID no. 12348833
  misc_feature (158)..(310): Pfam Name: 3-oxo-5-alpha-steroid 4-dehydrogenase Pfam Description: 3-oxo-5-alpha-steroid 4-dehydrogenase
  misc_feature (1)..(310): Homolog of NCBI NO: 34895848 NR Description: putative glycoprotein [Oryza sativa (japonica group)] >gi|9663963|dbj|BAB03604.1| putative glycoprotein [Oryza
  misc_feature (1)..(310): Homolog of NCBI NO: 15233250 NR Description: synaptic glycoprotein SC2-like protein; protein At3g55360.1, supported by cDNA: 6774., supported by cDNA: supported by cDNA: gi_20148508 [Arabidopsis thaliana]
  misc_feature (1)..(310): Homolog of NCBI NO: 25004880 NR Description: steroid 5-alpha reductase [Cicer arietinum]
  misc_feature (38)..(310): Homolog of NCBI NO: 39590267 NR Description: Hypothetical protein CBG11196 [Caenorhabditis
  misc_feature (38)..(310): Homolog of NCBI NO: 17531783 NR Description: Synaptic glycoprotein SC2 (35.1 kD) elegans] >gi|7206593|gb|AAF39753.1| Hypothetical protein C15F1.6
  misc_feature (24)..(291): Homolog of NCBI NO: 13111809 NR Description: Unknown (protein for IMAGE:2901253) [Homo sapiens]
  misc_feature (24)..(291): Homolog of NCBI NO: 24475816 NR Description: glycoprotein, synaptic 2; synaptic glycoprotein [Homo sapiens] >gi|20177939|sp|Q9NZ01|GSN2_HUMAN Synaptic
  misc_feature (24)..(291): Homolog of NCBI NO: 30585427 NR Description: Homo sapiens glycoprotein, synaptic 2 [synthetic
  misc_feature (24)..(310): Homolog of NCBI NO: 33585860 NR Description: Glycoprotein, synaptic 2 [Xenopus laevis]
  misc_feature (20)..(291): Homolog of NCBI NO: 31418870 NR Description: Unknown (protein for MGC:64025) [Danio rerio]

SEQ ID NO: 12300 - protein, 202 aa, Zea mays subsp. mays; identical to SEQ ID NO: 2383
  peptide (1)..(202): Ceres Seq. ID no. 12348834
  misc_feature (50)..(202): Pfam Name: 3-oxo-5-alpha-steroid 4-dehydrogenase Pfam Description: 3-oxo-5-alpha-steroid 4-dehydrogenase
  misc_feature (1)..(202): Homolog of NCBI NO: 34895848 NR Description: putative glycoprotein [Oryza sativa (japonica group)] >gi|9663963|dbj|BAB03604.1| putative glycoprotein [Oryza
  misc_feature (1)..(202): Homolog of NCBI NO: 15233250 NR Description: synaptic glycoprotein SC2-like protein; protein At3g55360.1, supported by cDNA: 6774., supported by cDNA: supported by cDNA: gi_20148508 [Arabidopsis thaliana]
  misc_feature (1)..(202): Homolog of NCBI NO: 25004880 NR Description: steroid 5-alpha reductase [Cicer arietinum]
  misc_feature (1)..(202): Homolog of NCBI NO: 39590267 NR Description: Hypothetical protein CBG11196 [Caenorhabditis
  misc_feature (1)..(202): Homolog of NCBI NO: 17531783 NR Description: Synaptic glycoprotein SC2 (35.1 kD) elegans] >gi|7206593|gb|AAF39753.1| Hypothetical protein C15F1.6
  misc_feature (1)..(183): Homolog of NCBI NO: 13111809 NR Description: Unknown (protein for IMAGE:2901253) [Homo sapiens]
  misc_feature (1)..(183): Homolog of NCBI NO: 24475816 NR Description: glycoprotein, synaptic 2; synaptic glycoprotein [Homo sapiens] >gi|20177939|sp|Q9NZ01|GSN2_HUMAN Synaptic
  misc_feature (1)..(183): Homolog of NCBI NO: 30585427 NR Description: Homo sapiens glycoprotein, synaptic 2 [synthetic
  misc_feature (1)..(202): Homolog of NCBI NO: 33585860 NR Description: Glycoprotein, synaptic 2 [Xenopus laevis]
  misc_feature (1)..(183): Homolog of NCBI NO: 31418870 NR Description: Unknown (protein for MGC:64025) [Danio rerio]

SEQ ID NO: 12301 - protein, 184 aa, Zea mays subsp. mays; identical to SEQ ID NO: 2384
  peptide (1)..(184): Ceres Seq. ID no. 12348835
  misc_feature (32)..(184): Pfam Name: 3-oxo-5-alpha-steroid 4-dehydrogenase Pfam Description: 3-oxo-5-alpha-steroid 4-dehydrogenase
  misc_feature (1)..(184): Homolog of NCBI NO: 34895848 NR Description: putative glycoprotein [Oryza sativa (japonica group)] >gi|9663963|dbj|BAB03604.1| putative glycoprotein [Oryza
  misc_feature (1)..(184): Homolog of NCBI NO: 15233250 NR Description: synaptic glycoprotein SC2-like protein; protein At3g55360.1, supported by cDNA: 6774., supported by cDNA: supported by cDNA: gi_20148508 [Arabidopsis thaliana]
  misc_feature (1)..(184): Homolog of NCBI NO: 25004880 NR Description: steroid 5-alpha reductase [Cicer arietinum]
  misc_feature (1)..(184): Homolog of NCBI NO: 39590267 NR Description: Hypothetical protein CBG11196 [Caenorhabditis
  misc_feature (1)..(184): Homolog of NCBI NO: 17531783 NR Description: Synaptic glycoprotein SC2 (35.1 kD) elegans] >gi|7206593|gb|AAF39753.1| Hypothetical protein C15F1.6
  misc_feature (1)..(165): Homolog of NCBI NO: 13111809 NR Description: Unknown (protein for IMAGE:2901253) [Homo sapiens]
  misc_feature (1)..(165): Homolog of NCBI NO: 24475816 NR Description: glycoprotein, synaptic 2; synaptic glycoprotein [Homo sapiens] >gi|20177939|sp|Q9NZ01|GSN2_HUMAN Synaptic
  misc_feature (1)..(165): Homolog of NCBI NO: 30585427 NR Description: Homo sapiens glycoprotein, synaptic 2 [synthetic
  misc_feature (1)..(184): Homolog of NCBI NO: 33585860 NR Description: Glycoprotein, synaptic 2 [Xenopus laevis]
  misc_feature (1)..(165): Homolog of NCBI NO: 31418870 NR Description: Unknown (protein for MGC:64025) [Danio rerio]

SEQ ID NO: 12302 - DNA, 393 bp, Zea mays subsp. mays
  misc_feature (1)..(393): Ceres Seq. ID no. 1337693
  misc_feature: MA Experiment ID: 108544 Result: Down-regulated in Transcription
  misc_feature: MA Experiment ID: 20000534 Result: Down-regulated in Transcription
  misc_feature: MA Experiment 20000534 PARAMETER Experiment Name: Zm_Hybrid_Pollen_P Parameter: Age (day) Value: 8
  misc_feature: MA Experiment 20000534 PARAMETER Experiment Name: Zm_Hybrid_Pollen_P Parameter: Organism Value: Zea mays
  misc_feature: MA Experiment 20000534 PARAMETER Experiment Name: Zm_Hybrid_Pollen_P Parameter: Plant Line Value: 35A19
  misc_feature: MA Experiment 20000534 PARAMETER Experiment Name: Zm_Hybrid_Pollen_P Parameter: Tissue Value: Pollen vs. Aerial
tcaagaaagaagcatgctggacgatctcaaacatcacagctggtaacaaggagcagattcaggctgtgatcaatgcaaatataattgcacctctgshractcctgcaaactgctgaatttgacatcaagaaagaagcagcctgggcaatttcaaatgccacttctggtggcacacatgatcagatcaagtaccttgttgcccagggttgcattaagccactctgtgatctgcttgtttgcccggatcccagaatcgtaacagtttgcttggagggtctcgagaacatcctgaaggttggcgaggcagagaaaaaccttggtgcaggtgatgtcaatgtctatgcacagatgattsatgatgctgagggcctggacaagattgagaacctgcag

SEQ ID NO: 12303 - protein, 37 aa, Zea mays subsp. mays
  peptide (1)..(37): Ceres Seq. ID no. 1337694
  misc_feature (1)..(31): Homolog of NCBI NO: 6682927 NR Description: importin alpha 1b [Oryza sativa (japonica
  misc_feature (1)..(31): Homolog of NCBI NO: 34897636 NR Description: putative impotin alpha 1b [Oryza sativa]
  misc_feature (1)..(31): Homolog of NCBI NO: 13699777 NR Description: AtKAP alpha [Arabidopsis thaliana]
  misc_feature (1)..(31): Homolog of NCBI NO: 15809794 NR Description: AT3g06720/F3E22_14 [Arabidopsis thaliana]
  misc_feature (1)..(31): Homolog of NCBI NO: 25314876 NR Description: probable nuclear transport factor importin
  misc_feature (1)..(31): Homolog of NCBI NO: 15230778 NR Description: importin alpha; protein id: At3g06720.2, by cDNA: 9351., supported by cDNA: gi_13699776, supported by gi_15809793, supported by cDNA: gi_20453047, supported by cDNA:
  misc_feature (1)..(31): Homolog of NCBI NO: 34902832 NR Description: unnamed protein product [Oryza sativa (japonica
  misc_feature (1)..(31): Homolog of NCBI NO: 33337497 NR Description: importin [Oryza sativa]
  misc_feature (1)..(31): Homolog of NCBI NO: 3915737 NR Description: Importin alpha subunit (Karyopherin alpha
  misc_feature (1)..(31): Homolog of NCBI NO: 13752562 NR Description: importin alpha 2 [Capsicum annuum]
  misc_feature (32)..(32): Xaa is any aa, unknown or other
KKEACWTISNITAGNKEQIQAVINANIIAPLXTPANC

SEQ ID NO: 12304 - protein, 34 aa, Zea mays subsp. mays
  peptide (1)..(34): Ceres Seq. ID no. 1337695
MPLLVAHMIRSSTLLPRVALSHSVICLFARIPES

SEQ ID NO: 12305 - DNA, 1862 bp, Zea mays subsp. mays
  misc_feature (1)..(1862): Ceres Seq. ID no. 12374063
  misc_feature: MA Experiment ID: 108522 Result: Up-regulated in Transcription
  misc_feature: MA Experiment 108522 PARAMETER Experiment Name: Zm_42deg_Heat_P Parameter: Age (day) Value: 8
  misc_feature: MA Experiment 108522 PARAMETER Experiment Name: Zm_42deg_Heat_P Parameter: Organism Value: Zea mays
  misc_feature: MA Experiment 108522 PARAMETER Experiment Name: Zm_42deg_Heat_P Parameter: Plant Line Value: 35A19
  misc_feature: MA Experiment 108522 PARAMETER Experiment Name: Zm_42deg_Heat_P Parameter: Temperature (deg C) Value: 42 vs. 22
  misc_feature: MA Experiment 108522 PARAMETER Experiment Name: Zm_42deg_Heat_P Parameter: Timepoint (hr) Value: 1
  misc_feature: MA Experiment 108522 PARAMETER Experiment Name: Zm_42deg_Heat_P Parameter: Tissue Value: Aerial
accgaaaggagaaggcttcagccttcaagcgcacacaggcacgcaaatcccctcttcatcaacctcgactcgagtccgcgcgcgtccccgaatcgaggggagatgagtcgtccgcatgacggtcacaggtccttctttcccatggggaatcccttcaggatgattctcccaagaggagcccgcctgccaccgaagctcactgagctgctcacttcgtatgaggatggcctggcctcgagcttgaggaaggtcaagccagaggccacctcagaggtgttcacactatcatggatgaagctcgcagtggagtgcttatcagagctgcacaccaatatagccaccctgattactgagcttgagctgcccttatcagactgggatgagaagtgggtggacatttacctgaacagcagtgtgaagctgctggacatctgcattgccctgagctcggagctctctcggttggatcaagggcagctgcttgtgcgatatctcctgaatgtgttgaactctgggagcgacatgccatcccaggagcagctcaggagagctgaggtgtctcttaaggaatggatagagcgagcaagtgaaaggtctcccaggcttgatagttgcttggcagcgctacaggagctttctggaaaccttagcctgatgaaggttaggcattctgctaaggggaaagtgctcatgcgagcattgtatggaatcgaggctgttaccgtcttaatctgcagcgtacttgtagctgtactgtcgggtaccttcaagccactggtggactttgatgtccctgagaaatttggttggtctacggccttcattgatcttcagaaggccataagcggtgaacttagcaggcaactgtccagaggtagtgttgcagctgtaaaagagctggaggatgttgatgtatgtgctaaacagctgcatacattgacttgcactgttcagcttgaagaggagaatgccagcctggctcattcatttagccgttcaaaggaagtggtcctggcagatactacagcccagggaagaggccatgcggataatctcaagttggctgatgatagtagctgtcagcatgaagtgatcatgctgcaaagtattactacagaaggaggaatggatacagctgatatcaaggaggataccgagaccattggccatacaaaggaagtgatggcgcctgagaaaataattgacagaggacaccaagatgataacacaaagcaggacactggtgttgtcactgatatcagttgcttggaaaggagagaggaactgctgaactgcatctcccggatgtcgaaaagtgctgaaaggctccagttggggttggactcgctgtcgaagcgggtggatgacttcttccatattgtgcttacagggcgtgatgcactactttgtaatctcaggttttcaaacggcggcaaggttgctgcagaggtcaggtcttaatatgccatctcatgtttgtgccatgttatgcatgtatagtcagctcagcggcccatcgtgatgtgtggtgcttctgacttctggcccctgctcagctccaccaacactaagccggggccagatctcagaagcattgtgcatgatatgtgcctctagctgtgctgtgcaaaagcttatatagcttctctttttggttaagtatgaactagagttctgctgagtaaatagtgctgttaagttggtgtcgggtggaatgtacaccatctagagtagagcagctgtatgtatgctcatgtgtccttgtaagttgtaatggagatgaaaaatgagttgcaaaatgttgatccctgtttgtctgttggataacttaaactggtaatgtacaactttcaatgtacccg

SEQ ID NO: 12306 - protein, 486 aa, Zea mays subsp. mays
  peptide (1)..(486): Ceres Seq. ID no. 12374064
  misc_feature (35)..(483): Homolog of NCBI NO: 37536014 NR Description: unknown protein [Oryza sativa (japonica
  misc_feature (35)..(313): Homolog of NCBI NO: 18406969 NR Description: expressed protein; protein id: At2g46080.1, by cDNA: gi_16604341, supported by cDNA: gi_18252158 [Arabidopsis >gi|25341889|pir||E84898 hypothetical protein At2g46080
  misc_feature (433)..(484): Homolog of NCBI NO: 18406969 NR Description: expressed protein; protein id: At2g46080.1, by cDNA: gi_16604341, supported by cDNA: gi_18252158 [Arabidopsis >gi|25341889|pir||E84898 hypothetical protein At2g46080
  misc_feature (35)..(313): Homolog of NCBI NO: 16604342 NR Description: At2g46080/T3F17.27 [Arabidopsis thaliana]
  misc_feature (433)..(484): Homolog of NCBI NO: 16604342 NR Description: At2g46080/T3F17.27 [Arabidopsis thaliana]
  misc_feature (35)..(311): Homolog of NCBI NO: 18378853 NR Description: expressed protein; protein id: At1g01550.1, by cDNA: gi_13194833, supported by cDNA: gi_16648870, supported cDNA: gi_17380899, supported by cDNA: gi_20259586 [Arabidopsis
  misc_feature (436)..(473): Homolog of NCBI NO: 18378853 NR Description: expressed protein; protein id: At1g01550.1, by cDNA: gi_13194833, supported by cDNA: gi_16648870, supported cDNA: gi_17380899, supported by cDNA: gi_20259586 [Arabidopsis
  misc_feature (50)..(312): Homolog of NCBI NO: 28392962 NR Description: unknown protein [Arabidopsis thaliana]
  misc_feature (50)..(312): Homolog of NCBI NO: 7485228 NR Description: hypothetical protein A_IG002N01.26 - Arabidopsis >gi|2191147|gb|AAB61034.1| A_IG002N01.26 gene product thaliana] >gi|7267633|emb|CAB80945.1| hypothetical protein
  misc_feature (50)..(312): Homolog of NCBI NO: 30678866 NR Description: expressed protein [Arabidopsis thaliana]
TERRRLQPSSAHRHANPLFINLDSSPRASPNRGEMSRPHDGHRSFFPMGNPFRMILPRGARLPPKLTELLTSYEDGLASSLRKVKPEATSEVFTLSWMKLAVECLSELHTNIATLITELELPLSDWDEKWVDIYLNSSVKLLDICIALSSELSRLDQGQLLVRYLLNVLNSGSDMPSQEQLRRAEVSLKEWIERASERSPRLDSCLAALQELSGNLSLMKVRHSAKGKVLMRALYGIEAVTVLICSVLVAVLSGTFKPLVDFDVPEKFGWSTAFIDLQKAISGELSRQLSRGSVAAVKELEDVDVCAKQLHTLTCTVQLEEENASLAHSFSRSKEVVLADTTAQGRGHADNLKLADDSSCQHEVIMLQSITTEGGMDTADIKEDTETIGHTKEVMAPEKIIDRGHQDDNTKQDTGVVTDISCLERREELLNCISRMSKSAERLQLGLDSLSKRVDDFFHIVLTGRDALLCNLRFSNGGKVAAEVRS

SEQ ID NO: 12307 - protein, 452 aa, Zea mays subsp. mays
  peptide (1)..(452): Ceres Seq. ID no. 12374065
  misc_feature (1)..(449): Homolog of NCBI NO: 37536014 NR Description: unknown protein [Oryza sativa (japonica
  misc_feature (1)..(279): Homolog of NCBI NO: 18406969 NR Description: expressed protein; protein id: At2g46080.1, by cDNA: gi_16604341, supported by cDNA: gi_18252158 [Arabidopsis >gi|25341889|pir||E84898 hypothetical protein At2g46080
  misc_feature (399)..(450): Homolog of NCBI NO: 18406969 NR Description: expressed protein; protein id: At2g46080.1, by cDNA: gi_16604341, supported by cDNA: gi_18252158 [Arabidopsis >gi|25341889|pir||E84898 hypothetical protein At2g46080
  misc_feature (1)..(279): Homolog of NCBI NO: 16604342 NR Description: At2g46080/T3F17.27 [Arabidopsis thaliana]
  misc_feature (399)..(450): Homolog of NCBI NO: 16604342 NR Description: At2g46080/T3F17.27 [Arabidopsis thaliana]
  misc_feature (1)..(277): Homolog of NCBI NO: 18378853 NR Description: expressed protein; protein id: At1g01550.1, by cDNA: gi_13194833, supported by cDNA: gi_16648870, supported cDNA: gi_17380899, supported by cDNA: gi_20259586 [Arabidopsis
  misc_feature (402)..(439): Homolog of NCBI NO: 18378853 NR Description: expressed protein; protein id: At1g01550.1, by cDNA: gi_13194833, supported by cDNA: gi_16648870, supported cDNA: gi_17380899, supported by cDNA: gi_20259586 [Arabidopsis
  misc_feature (16)..(278): Homolog of NCBI NO: 28392962 NR Description: unknown protein [Arabidopsis thaliana]
  misc_feature (16)..(278): Homolog of NCBI NO: 7485228 NR Description: hypothetical protein A_IG002N01.26 - Arabidopsis >gi|2191147|gb|AAB61034.1| A_IG002N01.26 gene product thaliana] >gi|7267633|emb|CAB80945.1| hypothetical protein
  misc_feature (16)..(278): Homolog of NCBI NO: 30678866 NR Description: expressed protein [Arabidopsis thaliana]
MSRPHDGHRSFFPMGNPFRMILPRGARLPPKLTELLTSYEDGLASSLRKVKPEATSEVFTLSWMKLAVECLSELHTNIATLITELELPLSDWDEKWVDIYLNSSVKLLDICIALSSELSRLDQGQLLVRYLLNVLNSGSDMPSQEQLRRAEVSLKEWIERASERSPRLDSCLAALQELSGNLSLMKVRHSAKGKVLMRALYGIEAVTVLICSVLVAVLSGTFKPLVDFDVPEKFGWSTAFIDLQKAISGELSRQLSRGSVAAVKELEDVDVCAKQLHTLTCTVQLEEENASLAHSFSRSKEVVLADTTAQGRGHADNLKLADDSSCQHEVIMLQSITTEGGMDTADIKEDTETIGHTKEVMAPEKIIDRGHQDDNTKQDTGVVTDISCLERREELLNCISRMSKSAERLQLGLDSLSKRVDDFFHIVLTGRDALLCNLRFSNGGKVAAEVRS

SEQ ID NO: 12308 - protein, 439 aa, Zea mays subsp. mays
  peptide (1)..(439): Ceres Seq. ID no. 12374066
  misc_feature (1)..(436): Homolog of NCBI NO: 37536014 NR Description: unknown protein [Oryza sativa (japonica
  misc_feature (1)..(266): Homolog of NCBI NO: 18406969 NR Description: expressed protein; protein id: At2g46080.1, by cDNA: gi_16604341, supported by cDNA: gi_18252158 [Arabidopsis >gi|25341889|pir||E84898 hypothetical protein At2g46080
  misc_feature (386)..(437): Homolog of NCBI NO: 18406969 NR Description: expressed protein; protein id: At2g46080.1, by cDNA: gi_16604341, supported by cDNA: gi_18252158 [Arabidopsis >gi|25341889|pir||E84898 hypothetical protein At2g46080
  misc_feature (1)..(266): Homolog of NCBI NO: 16604342 NR Description: At2g46080/T3F17.27 [Arabidopsis thaliana]
  misc_feature (386)..(437): Homolog of NCBI NO: 16604342 NR Description: At2g46080/T3F17.27 [Arabidopsis thaliana]
  misc_feature (1)..(264): Homolog of NCBI NO: 18378853 NR Description: expressed protein; protein id: At1g01550.1, by cDNA: gi_13194833, supported by cDNA: gi_16648870, supported cDNA: gi_17380899, supported by cDNA: gi_20259586 [Arabidopsis
  misc_feature (389)..(426): Homolog of NCBI NO: 18378853 NR Description: expressed protein; protein id: At1g01550.1, by cDNA: gi_13194833, supported by cDNA: gi_16648870, supported cDNA: gi_17380899, supported by cDNA: gi_20259586 [Arabidopsis
  misc_feature (3)..(265): Homolog of NCBI NO: 28392962 NR Description: unknown protein [Arabidopsis thaliana]
  misc_feature (3)..(265): Homolog of NCBI NO: 7485228 NR Description: hypothetical protein A_IG002N01.26 - Arabidopsis >gi|2191147|gb|AAB61034.1| A_IG002N01.26 gene product thaliana] >gi|7267633|emb|CAB80945.1| hypothetical protein
  misc_feature (3)..(265): Homolog of NCBI NO: 30678866 NR Description: expressed protein [Arabidopsis thaliana]
MGNPFRMILPRGARLPPKLTELLTSYEDGLASSLRKVKPEATSEVFTLSWMKLAVECLSELHTNIATLITELELPLSDWDEKWVDIYLNSSVKLLDICIALSSELSRLDQGQLLVRYLLNVLNSGSDMPSQEQLRRAEVSLKEWIERASERSPRLDSCLAALQELSGNLSLMKVRHSAKGKVLMRALYGIEAVTVLICSVLVAVLSGTFKPLVDFDVPEKFGWSTAFIDLQKAISGELSRQLSRGSVAAVKELEDVDVCAKQLHTLTCTVQLEEENASLAHSFSRSKEVVLADTTAQGRGHADNLKLADDSSCQHEVIMLQSITTEGGMDTADIKEDTETIGHTKEVMAPEKIIDRGHQDDNTKQDTGVVTDISCLERREELLNCISRMSKSAERLQLGLDSLSKRVDDFFHIVLTGRDALLCNLRFSNGGKVAAEVRS

SEQ ID NO: 12309 - DNA, 1701 bp, Zea mays subsp. mays
  misc_feature (1)..(1701): Ceres Seq. ID no. 12342304
  misc_feature: MA Experiment ID: 108535 Result: Up-regulated in Transcription
  misc_feature: MA Experiment 108535 PARAMETER Experiment Name: Zm_Meristem_P Parameter: Age (day) Value: 8
  misc_feature: MA Experiment 108535 PARAMETER Experiment Name: Zm_Meristem_P Parameter: Organism Value: Zea mays
  misc_feature: MA Experiment 108535 PARAMETER Experiment Name: Zm_Meristem_P Parameter: Plant Line Value: 35A19
  misc_feature: MA Experiment 108535 PARAMETER Experiment Name: Zm_Meristem_P Parameter: Tissue Value: Root Meristem vs. Above Root Meristem
  misc_feature: MA Experiment ID: 108544 Result: Down-regulated in Transcription
  misc_feature: MA Experiment ID: 108556 Result: Down-regulated in Transcription
  misc_feature: MA Experiment 108556 PARAMETER Experiment Name: Zm_Drought_P Parameter: Age (day) Value: 9
  misc_feature: MA Experiment 108556 PARAMETER Experiment Name: Zm_Drought_P Parameter: Organism Value: Zea mays
  misc_feature: MA Experiment 108556 PARAMETER Experiment Name: Zm_Drought_P Parameter: Plant Line Value: 35A19
  misc_feature: MA Experiment 108556 PARAMETER Experiment Name: Zm_Drought_P Parameter: Timepoint (hr) Value: 24
  misc_feature: MA Experiment 108556 PARAMETER Experiment Name: Zm_Drought_P Parameter: Tissue Value: Aerial
  misc_feature: MA Experiment 108556 PARAMETER Experiment Name: Zm_Drought_P Parameter: Treatment Value: Drought vs. No Drought
  misc_feature: MA Experiment ID: 20000487 Result: Up-regulated in Transcription
  misc_feature: MA Experiment 20000487 PARAMETER Experiment Name: Zm_50mM_NH4NO3_L_to_H_P Parameter: Organism Value: Zea mays
  misc_feature: MA Experiment 20000487 PARAMETER Experiment Name: Zm_50mM_NH4NO3_L_to_H_P Parameter: Timepoint (hr) Value: 4
  misc_feature: MA Experiment 20000487 PARAMETER Experiment Name: Zm_50mM_NH4NO3_L_to_H_P Parameter: Tissue Value: Leaves
  misc_feature: MA Experiment 20000487 PARAMETER Experiment Name: Zm_50mM_NH4NO3_L_to_H_P Parameter: Treatment Value: 50mM NH4NO3 vs. 100mM Mannitol
  misc_feature: MA Experiment ID: 20000488 Result: Up-regulated in Transcription
  misc_feature: MA Experiment 20000488 PARAMETER Experiment Name: Zm_50mM_NH4NO3_L_to_H_P Parameter: Organism Value: Zea mays
  misc_feature: MA Experiment 20000488 PARAMETER Experiment Name: Zm_50mM_NH4NO3_L_to_H_P Parameter: Timepoint (hr) Value: 8
  misc_feature: MA Experiment 20000488 PARAMETER Experiment Name: Zm_50mM_NH4NO3_L_to_H_P Parameter: Tissue Value: Leaves
  misc_feature: MA Experiment 20000488 PARAMETER Experiment Name: Zm_50mM_NH4NO3_L_to_H_P Parameter: Treatment Value: 50mM NH4NO3 vs. 100mM Mannitol
atcttgcgcttaatccagtccgttcaattcttgacatccgaacaccccgccgacgcagccctagattccgcattcctctctgtcacctccgcggcgccgccagcccgccatcacataacttcggcttctatcccttcgtaaacccttctctcttcttcccgcggcctgctcgttctatctgtccagcagacttgaggttccgagcggccggaaaccagcggcaaccgtcggcatggcgctcgtattgcattctggggctggaaacaaaaatgccttcaaggcacttattgctgcagaatacagtggggtcaaggttgagttgaccaaggattttgagatgggtgtctcgaacaagacccctgagtttctaaagatgaacccccttgggaaggttcctgttctggagactcctgatggccctgtttttgagagtaatgctattgcgcgctatgttgctcgcttgaaggatgacaaccctcttttcgggtcttcccgtattgaacaagcccacgttgagcagtggatggactttgctgcaacagaagttgatcctggtgttggatggtacttgtatccaaggcttgggtacatcccttatgctcacacgactgaggaaacagctattgcttcattgaagagatcccttggtgctctgaacacacatcttgccttgaacacataccttgttggacattctgttactctagctgacattgtattgacatgcaacctctaccatggaattgcacggatcttgaccaaaagcttcacttctgatttccctcatgttgagaggtatttctggaccatggttaaccaacctaatttcaagaaggtcattggtgaggtcaagcaggcagagtctgtacctcctgttcttaaaaagggtgttcctcctaaggagtcaaaggcaaaggatgtgaagaaagaaactccaaaggaggcccccaagccaaaggtggttgaggtaccagcagaagaggaagcaccaaagccaaagccaaagaatcctcttgacttgctgccaccaagcaagatggtccttgatgactggaagaggctatactcaaacacaaagaccaacttccgggaggttgccatcaaaggtttctgggacatgtatgacccagagggctactctctgtggttctgtgactacaagtacaatgacgagaacaccgtctcctttgtgaccctgaacaaggttggtggattcctgcagcggatggacctgtgccgcaagtacgcctttggcaagatgctcgtggtaggttctgagccacccttcaagctgaagggcctttggctcttccgtggccaggaggttcccaagtttgtaatggatgaggtctatgacatggagctctacgagtggaccaaggtcgacatctctgatgaggcccagaaggagcgtgtcaatgccatgatcgaggaccaggaaccctttgagggcgaggccttgcttgacgcgaaatgcttcaagtgagtgtgctttatccagagctgtttagccctcgaattggatgtctatgttgatctggtatatcttgctatgaactggttaaggtttgtgctggtttgagaatttttgtttaccttctcatcatttaagtgtttcgccgtaacaattttggtcatgtttttgaaagcctgtttgtattcgcgtcgtagttggggctatttatgcagactatccgattt

SEQ ID NO: 12310 - protein, 417 aa, Zea mays subsp. mays
  peptide (1)..(417): Ceres Seq. ID no. 12342305
  misc_feature (256)..(364): Pfam Name: Elongation factor 1 gamma, conserved domain Pfam Description: Elongation factor 1 gamma, conserved domain
  misc_feature (4)..(417): Homolog of NCBI NO: 29367381 NR Description: elongation factor 1 gamma-like protein [Oryza
  misc_feature (1)..(417): Homolog of NCBI NO: 13626515 NR Description: Elongation factor 1-gamma (EF-1-gamma) (eEF-1B >gi|3868758|dbj|BAA34206.1| elongation factor 1B gamma [Oryza
  misc_feature (10)..(417): Homolog of NCBI NO: 29367403 NR Description: elongation factor 1 gamma-like protein [Oryza
  misc_feature (1)..(417): Homolog of NCBI NO: 13626392 NR Description: Elongation factor 1-gamma (EF-1-gamma) (eEF-1B
MALVLHSGAGNKNAFKALIAAEYSGVKVELTKDFEMGVSNKTPEFLKMNPLGKVPVLETPDGPVFESNAIARYVARLKDDNPLFGSSRIEQAHVEQWMDFAATEVDPGVGWYLYPRLGYIPYAHTTEETAIASLKRSLGALNTHLALNTYLVGHSVTLADIVLTCNLYHGIARILTKSFTSDFPHVERYFWTMVNQPNFKKVIGEVKQAESVPPVLKKGVPPKESKAKDVKKETPKEAPKPKVVEVPAEEEAPKPKPKNPLDLLPPSKMVLDDWKRLYSNTKTNFREVAIKGFWDMYDPEGYSLWFCDYKYNDENTVSFVTLNKVGGFLQRMDLCRKYAFGKMLVVGSEPPFKLKGLWLFRGQEVPKFVMDEVYDMELYEWTKVDISDEAQKERVNAMIEDQEPFEGEALLDAKCFK

SEQ ID NO: 12311 - protein, 382 aa, Zea mays subsp. mays
  peptide (1)..(382): Ceres Seq. ID no. 12342306
  misc_feature (221)..(329): Pfam Name: Elongation factor 1 gamma, conserved domain Pfam Description: Elongation factor 1 gamma, conserved domain
  misc_feature (1)..(382): Homolog of NCBI NO: 29367381 NR Description: elongation factor 1 gamma-like protein [Oryza
  misc_feature (1)..(382): Homolog of NCBI NO: 13626515 NR Description: Elongation factor 1-gamma (EF-1-gamma) (eEF-1B >gi|3868758|dbj|BAA34206.1| elongation factor 1B gamma [Oryza
  misc_feature (1)..(382): Homolog of NCBI NO: 29367403 NR Description: elongation factor 1 gamma-like protein [Oryza
  misc_feature (1)..(382): Homolog of NCBI NO: 13626392 NR Description: Elongation factor 1-gamma (EF-1-gamma) (eEF-1B
MGVSNKTPEFLKMNPLGKVPVLETPDGPVFESNAIARYVARLKDDNPLFGSSRIEQAHVEQWMDFAATEVDPGVGWYLYPRLGYIPYAHTTEETAIASLKRSLGALNTHLALNTYLVGHSVTLADIVLTCNLYHGIARILTKSFTSDFPHVERYFWTMVNQPNFKKVIGEVKQAESVPPVLKKGVPPKESKAKDVKKETPKEAPKPKVVEVPAEEEAPKPKPKNPLDLLPPSKMVLDDWKRLYSNTKTNFREVAIKGFWDMYDPEGYSLWFCDYKYNDENTVSFVTLNKVGGFLQRMDLCRKYAFGKMLVVGSEPPFKLKGLWLFRGQEVPKFVMDEVYDMELYEWTKVDISDEAQKERVNAMIEDQEPFEGEALLDAKCFK

SEQ ID NO: 12312 - protein, 370 aa, Zea mays subsp. mays
  peptide (1)..(370): Ceres Seq. ID no. 12342307
  misc_feature (209)..(317): Pfam Name: Elongation factor 1 gamma, conserved domain Pfam Description: Elongation factor 1 gamma, conserved domain
  misc_feature (1)..(370): Homolog of NCBI NO: 29367381 NR Description: elongation factor 1 gamma-like protein [Oryza
  misc_feature (1)..(370): Homolog of NCBI NO: 13626515 NR Description: Elongation factor 1-gamma (EF-1-gamma) (eEF-1B >gi|3868758|dbj|BAA34206.1| elongation factor 1B gamma [Oryza
  misc_feature (1)..(370): Homolog of NCBI NO: 29367403 NR Description: elongation factor 1 gamma-like protein [Oryza
  misc_feature (1)..(370): Homolog of NCBI NO: 13626392 NR Description: Elongation factor 1-gamma (EF-1-gamma) (eEF-1B
MNPLGKVPVLETPDGPVFESNAIARYVARLKDDNPLFGSSRIEQAHVEQWMDFAATEVDPGVGWYLYPRLGYIPYAHTTEETAIASLKRSLGALNTHLALNTYLVGHSVTLADIVLTCNLYHGIARILTKSFTSDFPHVERYFWTMVNQPNFKKVIGEVKQAESVPPVLKKGVPPKESKAKDVKKETPKEAPKPKVVEVPAEEEAPKPKPKNPLDLLPPSKMVLDDWKRLYSNTKTNFREVAIKGFWDMYDPEGYSLWFCDYKYNDENTVSFVTLNKVGGFLQRMDLCRKYAFGKMLVVGSEPPFKLKGLWLFRGQEVPKFVMDEVYDMELYEWTKVDISDEAQKERVNAMIEDQEPFEGEALLDAKCFK

SEQ ID NO: 12313 - DNA, 1331 bp, Zea mays subsp. mays
  misc_feature (1)..(1331): Ceres Seq. ID no. 12343309
  misc_feature: MA Experiment ID: 20000535 Result: Down-regulated in Transcription
  misc_feature: MA Experiment 20000535 PARAMETER Experiment Name: Zm_Hybrid_Seed_Dev_P Parameter: DAP Value: 30 vs. 12
  misc_feature: MA Experiment 20000535 PARAMETER Experiment Name: Zm_Hybrid_Seed_Dev_P Parameter: Organism Value: Zea mays
  misc_feature: MA Experiment 20000535 PARAMETER Experiment Name: Zm_Hybrid_Seed_Dev_P Parameter: Plant Line Value: 35A19
  misc_feature: MA Experiment 20000535 PARAMETER Experiment Name: Zm_Hybrid_Seed_Dev_P Parameter: Tissue Value: Embryo vs. Unfert Floret
accggaccaaccaggacttggagcgtgcggcgtcggagttcgccggcggtgaggagcagaagaggaagggaaccaaacaaagatgggctgctccatctcggggctcaacgcgctctacgacgcggccacgggcggcggcgacgtctggatcaacgagcgccgcttccgcgtccttcgccagatcggcgagggcgggttcgccttcgtctacctcgtcagagagcaccagcccgcctccgatgcggcgttcgctaggcgtgaccccgcccacgtctcagaggatggaacgtatgccatgaagaaggtgctgatacagagcaaggagcagttggatctggtgagggaggagatccgtgtgtcgtccttattcaatcaccccaaccttctgccgcttcttgatcatgccataatagccgtgaagggagattggagccatgaagcatacctacttttccctgttcatctggatggtactttgtttgacaacgctaacatcatgctgtccagaagggaattctattccacagctgatgttctgcaaatattccagcagatgtgtgaagggctgaaacacatgcacagctttgatcctccatacgctcataatgatgttaagcctggtaatgttcttataacctggcgtaaaggacaagcacctgttgcaactttaatggattttggaagtgcaaggcctgcaagaaaggaaatccgttctcgttctgaggcactacagttgcaggaatgggccgctgagcattgctctgctccttaccgggcccctgaattatgggactgcccaagccatgccgatattgatgagaggacagacatctggtctctaggatgcactctttttgctatcatgtacaatgtttcaccatttgagtatgctcttggtgaatctggaggaagtctgcaacttgccattgtaaacgggcagttgaaatggccagcaggacccaaacctccttatcctgatgaacttcgccattttgttatctggatgcttcaacctgaagctgcaatgcgccctcacatttctgatgtggttcttcatgttgacaagctcattgcaaaatacttgccctagatcagcctggagttcctctcatttctttgttatacagtacagagccaatatgatgtaaaatgggcccatgcttgacgtcattcagtccttggataggctcaatattgattctttcgtagaactttcaggatattacatcagtctaatgtctgtggatctttgatactcatggagtcacggtgtcatgtaaaaatgtcaaactgaacatcaaagcagctatatgatatccttgcacttgggc

SEQ ID NO: 12314 - protein, 335 aa, Zea mays subsp. mays
  peptide (1)..(335): Ceres Seq. ID no. 12343310
  misc_feature (1)..(333): Homolog of NCBI NO: 15241535 NR Description: serine/threonine protein kinase; protein id: supported by cDNA: 5323., supported by cDNA: gi_13358242, by cDNA: gi_2109292 [Arabidopsis thaliana]
  misc_feature (1)..(333): Homolog of NCBI NO: 21593866 NR Description: serine/threonine protein kinase [Arabidopsis
  misc_feature (58)..(333): Homolog of NCBI NO: 30682270 NR Description: serine/threonine protein kinase, putative
  misc_feature (1)..(30): Homolog of NCBI NO: 30682270 NR Description: serine/threonine protein kinase, putative
  misc_feature (49)..(329): Homolog of NCBI NO: 10640971 NR Description: F5-2 [Homo sapiens]
  misc_feature (49)..(329): Homolog of NCBI NO: 4106342 NR Description: palmitylated serine/threonine kinase [Mus
  misc_feature (49)..(329): Homolog of NCBI NO: 27465615 NR Description: serine/threonine kinase 16 [Rattus norvegicus] serine/threonine kinase 16 [Rattus norvegicus] Serine/threonine protein kinase 16 (Protein kinase PKL12)
  misc_feature (49)..(329): Homolog of NCBI NO: 3372666 NR Description: myristilated and palmitylated serine-threonine
  misc_feature (49)..(329): Homolog of NCBI NO: 4505837 NR Description: serine/threonine kinase 16; protein kinase in day 12 fetal liver [Homo sapiens] >gi|3367705|emb|CAA06700.1|
  misc_feature (49)..(329): Homolog of NCBI NO: 13626604 NR Description: SERINE/THREONINE PROTEIN KINASE 16 (PROTEIN
MGCSISGLNALYDAATGGGDVWINERRFRVLRQIGEGGFAFVYLVREHQPASDAAFARRDPAHVSEDGTYAMKKVLIQSKEQLDLVREEIRVSSLFNHPNLLPLLDHAIIAVKGDWSHEAYLLFPVHLDGTLFDNANIMLSRREFYSTADVLQIFQQMCEGLKHMHSFDPPYAHNDVKPGNVLITWRKGQAPVATLMDFGSARPARKEIRSRSEALQLQEWAAEHCSAPYRAPELWDCPSHADIDERTDIWSLGCTLFAIMYNVSPFEYALGESGGSLQLAIVNGQLKWPAGPKPPYPDELRHFVIWMLQPEAAMRPHISDVVLHVDKLIAKYLP

SEQ ID NO: 12315 - protein, 264 aa, Zea mays subsp. mays
  peptide (1)..(264): Ceres Seq. ID no. 12343311
  misc_feature (1)..(262): Homolog of NCBI NO: 15241535 NR Description: serine/threonine protein kinase; protein id: supported by cDNA: 5323., supported by cDNA: gi_13358242, by cDNA: gi_2109292 [Arabidopsis thaliana]
  misc_feature (1)..(262): Homolog of NCBI NO: 21593866 NR Description: serine/threonine protein kinase [Arabidopsis
  misc_feature (1)..(262): Homolog of NCBI NO: 30682270 NR Description: serine/threonine protein kinase, putative
  misc_feature (1)..(258): Homolog of NCBI NO: 10640971 NR Description: F5-2 [Homo sapiens]
  misc_feature (1)..(258): Homolog of NCBI NO: 4106342 NR Description: palmitylated serine/threonine kinase [Mus
  misc_feature (1)..(258): Homolog of NCBI NO: 27465615 NR Description: serine/threonine kinase 16 [Rattus norvegicus] serine/threonine kinase 16 [Rattus norvegicus] Serine/threonine protein kinase 16 (Protein kinase PKL12)
  misc_feature (1)..(258): Homolog of NCBI NO: 3372666 NR Description: myristilated and palmitylated serine-threonine
  misc_feature (1)..(258): Homolog of NCBI NO: 4505837 NR Description: serine/threonine kinase 16; protein kinase in day 12 fetal liver [Homo sapiens] >gi|3367705|emb|CAA06700.1|
  misc_feature (1)..(258): Homolog of NCBI NO: 13626604 NR Description: SERINE/THREONINE PROTEIN KINASE 16 (PROTEIN
  misc_feature (1)..(258): Homolog of NCBI NO: 12803571 NR Description: serine/threonine kinase 16 [Homo sapiens]
MKKVLIQSKEQLDLVREEIRVSSLFNHPNLLPLLDHAIIAVKGDWSHEAYLLFPVHLDGTLFDNANIMLSRREFYSTADVLQIFQQMCEGLKHMHSFDPPYAHNDVKPGNVLITWRKGQAPVATLMDFGSARPARKEIRSRSEALQLQEWAAEHCSAPYRAPELWDCPSHADIDERTDIWSLGCTLFAIMYNVSPFEYALGESGGSLQLAIVNGQLKWPAGPKPPYPDELRHFVIWMLQPEAAMRPHISDVVLHVDKLIAKYLP

SEQ ID NO: 12316 - protein, 197 aa, Zea mays subsp. mays
  peptide (1)..(197): Ceres Seq. ID no. 12343312
  misc_feature (1)..(195): Homolog of NCBI NO: 15241535 NR Description: serine/threonine protein kinase; protein id: supported by cDNA: 5323., supported by cDNA: gi_13358242, by cDNA: gi_2109292 [Arabidopsis thaliana]
  misc_feature (1)..(195): Homolog of NCBI NO: 21593866 NR Description: serine/threonine protein kinase [Arabidopsis
  misc_feature (1)..(195): Homolog of NCBI NO: 30682270 NR Description: serine/threonine protein kinase, putative
  misc_feature (1)..(191): Homolog of NCBI NO: 10640971 NR Description: F5-2 [Homo sapiens]
  misc_feature (1)..(191): Homolog of NCBI NO: 4106342 NR Description: palmitylated serine/threonine kinase [Mus
  misc_feature (1)..(191): Homolog of NCBI NO: 27465615 NR Description: serine/threonine kinase 16 [Rattus norvegicus] serine/threonine kinase 16 [Rattus norvegicus] Serine/threonine protein kinase 16 (Protein kinase PKL12)
  misc_feature (1)..(191): Homolog of NCBI NO: 3372666 NR Description: myristilated and palmitylated serine-threonine
  misc_feature (1)..(191): Homolog of NCBI NO: 4505837 NR Description: serine/threonine kinase 16; protein kinase in day 12 fetal liver [Homo sapiens] >gi|3367705|emb|CAA06700.1|
  misc_feature (1)..(191): Homolog of NCBI NO: 13626604 NR Description: SERINE/THREONINE PROTEIN KINASE 16 (PROTEIN
  misc_feature (1)..(191): Homolog of NCBI NO: 12803571 NR Description: serine/threonine kinase 16 [Homo sapiens]
MLSRREFYSTADVLQIFQQMCEGLKHMHSFDPPYAHNDVKPGNVLITWRKGQAPVATLMDFGSARPARKEIRSRSEALQLQEWAAEHCSAPYRAPELWDCPSHADIDERTDIWSLGCTLFAIMYNVSPFEYALGESGGSLQLAIVNGQLKWPAGPKPPYPDELRHFVIWMLQPEAAMRPHISDVVLHVDKLIAKYLP

SEQ ID NO: 12317 - DNA, 1047 bp, Zea mays subsp. mays
  misc_feature (1)..(1047): Ceres Seq. ID no. 12593638
  misc_feature: MA Experiment ID: 108523 Result: Down-regulated in Transcription
  misc_feature: MA Experiment 108523 PARAMETER Experiment Name: Zm_42deg_Heat_P Parameter: Age (day) Value: 8
  misc_feature: MA Experiment 108523 PARAMETER Experiment Name: Zm_42deg_Heat_P Parameter: Organism Value: Zea mays
  misc_feature: MA Experiment 108523 PARAMETER Experiment Name: Zm_42deg_Heat_P Parameter: Plant Line Value: 35A19
  misc_feature: MA Experiment 108523 PARAMETER Experiment Name: Zm_42deg_Heat_P Parameter: Temperature (deg C) Value: 42 vs. 22
  misc_feature: MA Experiment 108523 PARAMETER Experiment Name: Zm_42deg_Heat_P Parameter: Timepoint (hr) Value: 6
  misc_feature: MA Experiment 108523 PARAMETER Experiment Name: Zm_42deg_Heat_P Parameter: Tissue Value: Aerial
  misc_feature: MA Experiment ID: 108535 Result: Down-regulated in Transcription
  misc_feature: MA Experiment 108535 PARAMETER Experiment Name: Zm_Meristem_P Parameter: Age (day) Value: 8
  misc_feature: MA Experiment 108535 PARAMETER Experiment Name: Zm_Meristem_P Parameter: Organism Value: Zea mays
  misc_feature: MA Experiment 108535 PARAMETER Experiment Name: Zm_Meristem_P Parameter: Plant Line Value: 35A19
  misc_feature: MA Experiment 108535 PARAMETER Experiment Name: Zm_Meristem_P Parameter: Tissue Value: Root Meristem vs. Above Root Meristem
  misc_feature: MA Experiment ID: 108543 Result: Up-regulated in Transcription
  misc_feature: MA Experiment ID: 108544 Result: Down-regulated in Transcription
  misc_feature: MA Experiment ID: 108556 Result: Down-regulated in Transcription
  misc_feature: MA Experiment 108556 PARAMETER Experiment Name: Zm_Drought_P Parameter: Age (day) Value: 9
  misc_feature: MA Experiment 108556 PARAMETER Experiment Name: Zm_Drought_P Parameter: Organism Value: Zea mays
  misc_feature: MA Experiment 108556 PARAMETER Experiment Name: Zm_Drought_P Parameter: Plant Line Value: 35A19
  misc_feature: MA Experiment 108556 PARAMETER Experiment Name: Zm_Drought_P Parameter: Timepoint (hr) Value: 24
  misc_feature: MA Experiment 108556 PARAMETER Experiment Name: Zm_Drought_P Parameter: Tissue Value: Aerial
  misc_feature: MA Experiment 108556 PARAMETER Experiment Name: Zm_Drought_P Parameter: Treatment Value: Drought vs. No Drought
  misc_feature: MA Experiment ID: 108597 Result: Down-regulated in Transcription
  misc_feature: MA Experiment 108597 PARAMETER Experiment Name: Zm_100uM_ABA_P Parameter: Age (day) Value: 9
  misc_feature: MA Experiment 108597 PARAMETER Experiment Name: Zm_100uM_ABA_P Parameter: Organism Value: Zea mays
  misc_feature: MA Experiment 108597 PARAMETER Experiment Name: Zm_100uM_ABA_P Parameter: Plant Line Value: 35A19
  misc_feature: MA Experiment 108597 PARAMETER Experiment Name: Zm_100uM_ABA_P Parameter: Timepoint (hr) Value: 24
  misc_feature: MA Experiment 108597 PARAMETER Experiment Name: Zm_100uM_ABA_P Parameter: Tissue Value: Aerial
  misc_feature: MA Experiment 108597 PARAMETER Experiment Name: Zm_100uM_ABA_P Parameter: Treatment Value: 100uM ABA vs. No Treatment
  misc_feature: MA Experiment ID: 108688 Result: Down-regulated in Transcription
  misc_feature: MA Experiment 108688 PARAMETER Experiment Name: Zm_Embryos-Flowers__P Parameter: Tissue Value: Immature Flowers vs. Aerial+
  misc_feature: MA Experiment ID: 20000477 Result: Down-regulated in Transcription
  misc_feature: MA Experiment 20000477 PARAMETER Experiment Name: Zm_5mM_SA_P Parameter: Age (day) Value: 10
  misc_feature: MA Experiment 20000477 PARAMETER Experiment Name: Zm_5mM_SA_P Parameter: Organism Value: Zea mays
  misc_feature: MA Experiment 20000477 PARAMETER Experiment Name: Zm_5mM_SA_P Parameter: Plant Line Value: 35A19
  misc_feature: MA Experiment 20000477 PARAMETER Experiment Name: Zm_5mM_SA_P Parameter: Timepoint (hr) Value: 48
  misc_feature: MA Experiment 20000477 PARAMETER Experiment Name: Zm_5mM_SA_P Parameter: Tissue Value: Aerial
  misc_feature: MA Experiment 20000477 PARAMETER Experiment Name: Zm_5mM_SA_P Parameter: Treatment Value: 5mM SA vs. No Treatment
  misc_feature: MA Experiment ID: 20000478 Result: Down-regulated in Transcription
  misc_feature: MA Experiment 20000478 PARAMETER Experiment Name: Zm_5mM_SA_P Parameter: Age (day) Value: 11
  misc_feature: MA Experiment 20000478 PARAMETER Experiment Name: Zm_5mM_SA_P Parameter: Organism Value: Zea mays
  misc_feature: MA Experiment 20000478 PARAMETER Experiment Name: Zm_5mM_SA_P Parameter: Plant Line Value: 35A19
  misc_feature: MA Experiment 20000478 PARAMETER Experiment Name: Zm_5mM_SA_P Parameter: Timepoint (hr) Value: 72
  misc_feature: MA Experiment 20000478 PARAMETER Experiment Name: Zm_5mM_SA_P Parameter: Tissue Value: Aerial
  misc_feature: MA Experiment 20000478 PARAMETER Experiment Name: Zm_5mM_SA_P Parameter: Treatment Value: 5mM SA vs. No Treatment
  misc_feature: MA Experiment ID: 20000479 Result: Down-regulated in Transcription
  misc_feature: MA Experiment 20000479 PARAMETER Experiment Name: Zm_Drought_P Parameter: Age (day) Value: 10
  misc_feature: MA Experiment 20000479 PARAMETER Experiment Name: Zm_Drought_P Parameter: Organism Value: Zea mays
  misc_feature: MA Experiment 20000479 PARAMETER Experiment Name: Zm_Drought_P Parameter: Plant Line Value: 35A19
  misc_feature: MA Experiment 20000479 PARAMETER Experiment Name: Zm_Drought_P Parameter: Timepoint (hr) Value: 48
  misc_feature: MA Experiment 20000479 PARAMETER Experiment Name: Zm_Drought_P Parameter: Tissue Value: Aerial
  misc_feature: MA Experiment 20000479 PARAMETER Experiment Name: Zm_Drought_P Parameter: Treatment Value: Drought vs. No Drought
  misc_feature: MA Experiment ID: 20000480 Result: Down-regulated in Transcription
  misc_feature: MA Experiment 20000480 PARAMETER Experiment Name: Zm_Drought_P Parameter: Age (day) Value: 11
  misc_feature: MA Experiment 20000480 PARAMETER Experiment Name: Zm_Drought_P Parameter: Organism Value: Zea mays
  misc_feature: MA Experiment 20000480 PARAMETER Experiment Name: Zm_Drought_P Parameter: Plant Line Value: 35A19
  misc_feature: MA Experiment 20000480 PARAMETER Experiment Name: Zm_Drought_P Parameter: Timepoint (hr) Value: 72
  misc_feature: MA Experiment 20000480 PARAMETER Experiment Name: Zm_Drought_P Parameter: Tissue Value: Aerial
  misc_feature: MA Experiment 20000480 PARAMETER Experiment Name: Zm_Drought_P Parameter: Treatment Value: Drought vs. No Drought
  misc_feature: MA Experiment ID: 20000488 Result: Down-regulated in Transcription
  misc_feature: MA Experiment 20000488 PARAMETER Experiment Name: Zm_50mM_NH4NO3_L_to_H_P Parameter: Organism Value: Zea mays
  misc_feature: MA Experiment 20000488 PARAMETER Experiment Name: Zm_50mM_NH4NO3_L_to_H_P Parameter: Timepoint (hr) Value: 8
  misc_feature: MA Experiment 20000488 PARAMETER Experiment Name: Zm_50mM_NH4NO3_L_to_H_P Parameter: Tissue Value: Leaves
  misc_feature: MA Experiment 20000488 PARAMETER Experiment Name: Zm_50mM_NH4NO3_L_to_H_P Parameter: Treatment Value: 50mM NH4NO3 vs. 100mM Mannitol
  misc_feature: MA Experiment ID: 20000533 Result: Down-regulated in Transcription
  misc_feature: MA Experiment 20000533 PARAMETER Experiment Name: Zm_0.001percent_MeJA_P Parameter: Age (day) Value: 11
  misc_feature: MA Experiment 20000533 PARAMETER Experiment Name: Zm_0.001percent_MeJA_P Parameter: Organism Value: Zea mays
  misc_feature: MA Experiment 20000533 PARAMETER Experiment Name: Zm_0.001percent_MeJA_P Parameter: Plant Line Value: 35A19
  misc_feature: MA Experiment 20000533 PARAMETER Experiment Name: Zm_0.001percent_MeJA_P Parameter: Timepoint (hr) Value: 72
  misc_feature: MA Experiment 20000533 PARAMETER Experiment Name: Zm_0.001percent_MeJA_P Parameter: Tissue Value: Aerial
  misc_feature: MA Experiment 20000533 PARAMETER Experiment Name: Zm_0.001percent_MeJA_P Parameter: Treatment Value: 0.001percent MeJA vs. No Treatment
  misc_feature: MA Experiment ID: 20000626 Result: Down-regulated in Transcription
  misc_feature: MA Experiment 20000626 PARAMETER Experiment Name: Zm_Herbicide-Treatments_P Parameter: Timepoint (hr) Value: 12
  misc_feature: MA Experiment 20000626 PARAMETER Experiment Name: Zm_Herbicide-Treatments_P Parameter: Tissue Value: Aerial
  misc_feature: MA Experiment 20000626 PARAMETER Experiment Name: Zm_Herbicide-Treatments_P Parameter: Treatment Value: Roundup vs. No Treatment
gcacgagaccattacctagaacatcctaatcgaaaaatcacccctcgttgtcatctcatatcctgagccagagatcaaagaaaccagagggagcgaggcatggcagcaggcttgcaggtgtttggccagccggcgtctactgatgtctccagggttctgacatgcctgtttgagaagaaactggagttcgatcttgtccgcatcgatacgttcaagacgcatcacaagcttcccgagttcatcaggcttcgggatcctaatgggcaagtgaccttgaagcacggcgacaaaactctcgttgattcgagggacatctgccggtacgtctgcacccagtttccaaacgatggaaacaagagcctttacggatccggcgctctagaacgggcgtcgatagaacagtggcttcaggcggaggctcagaacttcgggccccccagctccgcgctcgtcttccagctggcgttcgtccctcacctcactcacctgggcgttcgtcaggaccctgccgtgatcgccgagaacgaggataagctgaagcaggtccttgatgtctacgacgagatactctcgaggaacgagtacctggctggcgacgagttcaccctggccgacctctcccacctcccgaactcgcactacatcgtgaacaccgagagaggaaggaagctcttcactaacaagaagaacgtggccaagtggtacgagaagctctcgaagcgcgagacgtggaagcaggtcgctaagatgcagaaggaacatcctggtgcgttcgagtgattgcttgtcttggggggagctgcgagtgcaccatcatgaatggcttcatcgtctgtgtcggtctggctctacagttcattttgttttgagtgatccattgtttaattcctcctatcagtgttgtcgtgtgcaccaaaaataatgtgaagcccagctgtgatgtatatgatccttttgctctaatctatcatgacgtataagctcgatctctgaccttgtacgcacagtattttttttactgatgatttcgatcgagacatacagtcg

SEQ ID NO: 12318 - protein, 226 aa, Zea mays subsp. mays
  peptide (1)..(226): Ceres Seq. ID no. 12593639
  misc_feature (1)..(226): Homolog of NCBI NO: 11385469 NR Description: glutathione S-transferase GST 9 [Zea mays]
  misc_feature (1)..(226): Homolog of NCBI NO: 11385475 NR Description: glutathione S-transferase GST 12 [Zea mays]
  misc_feature (1)..(226): Homolog of NCBI NO: 11385477 NR Description: glutathione S-transferase GST 13 [Zea mays]
  misc_feature (1)..(226): Homolog of NCBI NO: 22758269 NR Description: Putative glutathione S-transferase [Oryza sativa
  misc_feature (131)..(226): Homolog of NCBI NO: 22758268 NR Description: Putative glutathione S-transferase [Oryza sativa
  misc_feature (1)..(75): Homolog of NCBI NO: 22758268 NR Description: Putative glutathione S-transferase [Oryza sativa
  misc_feature (1)..(128): Homolog of NCBI NO: 37536564 NR Description: putative glutathione S-transferase [Oryza sativa
  misc_feature (132)..(224): Homolog of NCBI NO: 37536564 NR Description: putative glutathione S-transferase [Oryza sativa
  misc_feature (1)..(218): Homolog of NCBI NO: 11177845 NR Description: putative glutathione S-transferase OsGSTF3 [Oryza
  misc_feature (1)..(218): Homolog of NCBI NO: 22758267 NR Description: Putative glutathione S-transferase [Oryza sativa
MAAGLQVFGQPASTDVSRVLTCLFEKKLEFDLVRIDTFKTHHKLPEFIRLRDPNGQVTLKHGDKTLVDSRDICRYVCTQFPNDGNKSLYGSGALERASIEQWLQAEAQNFGPPSSALVFQLAFVPHLTHLGVRQDPAVIAENEDKLKQVLDVYDEILSRNEYLAGDEFTLADLSHLPNSHYIVNTERGRKLFTNKKNVAKWYEKLSKRETWKQVAKMQKEHPGAFE

SEQ ID NO: 12319 - DNA, 1318 bp, Zea mays subsp. mays
  misc_feature (1)..(1318): Ceres Seq. ID no. 12366785
  misc_feature: MA Experiment ID: 108559 Result: Down-regulated in Transcription
  misc_feature: MA Experiment 108559 PARAMETER Experiment Name: Zm_5mM_NO_P Parameter: Age (day) Value: 8
  misc_feature: MA Experiment 108559 PARAMETER Experiment Name: Zm_5mM_NO_P Parameter: Organism Value: Zea mays
  misc_feature: MA Experiment 108559 PARAMETER Experiment Name: Zm_5mM_NO_P Parameter: Plant Line Value: 35A19
  misc_feature: MA Experiment 108559 PARAMETER Experiment Name: Zm_5mM_NO_P Parameter: Timepoint (hr) Value: 12
  misc_feature: MA Experiment 108559 PARAMETER Experiment Name: Zm_5mM_NO_P Parameter: Tissue Value: Aerial
  misc_feature: MA Experiment 108559 PARAMETER Experiment Name: Zm_5mM_NO_P Parameter: Treatment Value: 5mM NO vs. No Treatment
actgtggaagaaccgttgagctgagccgagcagggagaaggacgcgagagcagcatggagacggcggagaggggcaccaccgtgtgcgtgaccggcgcggggggctttgtggcatcgtggctcgtcaagctcctcctctccaccggccgctacaccgtccggggtaccgtgcgtcatctcggtgatggcaagaatgcccatcttaagacactggaagatgccggggagaggctgcagttggtcaaggctgacatgctggactatggcagcgttgcgtccgcggtcgccggctgtcagggtgtcttccatgtcgcgagccctgtcccctccggcaaatcctccaaccctgaggaagatgtcattgctcctgctgtaactggcacactgaatgtgttgaaagcttgctatgaggccaaagcgaagagagttgttgtggtatcttcagtggctgctgtgttcaataatcctgactggcctaagggcgaggcctttactgaggatagctggtcagatggggaatattgcagaaaaaatgaggaatggtatttcctttctaaaacattggcagaacatgaggcttttgcttatgcagccaaaactgggctagacattgtaactatttgcccatcattggtaattggacctttgttgcaacctgcagtaaatacaagtattaaagtcttcctcagttatatcaaaggagatcaggagatagttaaagatggacccaaaaatcttgtggatgttcgtgatgtcgctggtgcccttctgttggcttacgaaaatctgcaggcatctggacgatacctctgcagctcaccagcaataagagtctctgatattgtaaacatactgaagaccgaatatccaacatacacttaccctcaaaaattcgttgaagcagaaggtagcaacacatacaacacggagaagcttcggaagctagggtggacctctaggcccatggaggaaaccctccgggacagcatcgaatgctacagagctttgggcatcctgaactgagcttcccttcagctttgggctttggctgctgctgctgctgctacttttcagcttctttcttcttcatgtaaacagtgaatcagaaattcagaatacgctggtataggaactagagaagtggatcatggaagatgctgatgctaaaaatgaatttggatactatccatcatttgtgcctgcgggattgagggcaaattaattaagtacttatatttgtaaatctggggccgtcgaactgaaccaacaatgaagaggtgaagaacaaatcgaagtggtagatgagtgcattgctgtg

SEQ ID NO: 12320 - protein, 322 aa, Zea mays subsp. mays
  peptide (1)..(322): Ceres Seq. ID no. 12366786
  misc_feature (10)..(315): Pfam Name: NAD dependent epimerase/dehydratase family Pfam Description: NAD dependent epimerase/dehydratase family
  misc_feature (1)..(316): Homolog of NCBI NO: 15226135 NR Description: putative cinnamoyl-CoA reductase; protein id: supported by cDNA: gi_20260487 [Arabidopsis thaliana]
  misc_feature (1)..(316): Homolog of NCBI NO: 15226134 NR Description: putative cinnamoyl-CoA reductase; protein id: supported by cDNA: 11254. [Arabidopsis thaliana]
  misc_feature (10)..(321): Homolog of NCBI NO: 15223068 NR Description: putative cinnamoyl-CoA reductase; protein id:
  misc_feature (10)..(321): Homolog of NCBI NO: 6554472 NR Description: putative cinnamoyl-CoA reductase; 14056-15506
  misc_feature (5)..(312): Homolog of NCBI NO: 17978649 NR Description: cinnamoyl-CoA reductase [Pinus taeda]
  misc_feature (6)..(321): Homolog of NCBI NO: 9998901 NR Description: cinnamoyl-CoA reductase [Populus balsamifera
  misc_feature (6)..(321): Homolog of NCBI NO: 40233135 NR Description: cinnamoyl CoA reductase [Populus tomentosa]
  misc_feature (6)..(321): Homolog of NCBI NO: 2960364 NR Description: cinnamoyl CoA reductase [Populus balsamifera
  misc_feature (7)..(321): Homolog of NCBI NO: 7431406 NR Description: probable cinnamyl-alcohol dehydrogenase (EC
  misc_feature (4)..(321): Homolog of NCBI NO: 7431410 NR Description: cinnamoyl CoA reductase - maize
METAERGTTVCVTGAGGFVASWLVKLLLSTGRYTVRGTVRHLGDGKNAHLKTLEDAGERLQLVKADMLDYGSVASAVAGCQGVFHVASPVPSGKSSNPEEDVIAPAVTGTLNVLKACYEAKAKRVVVVSSVAAVFNNPDWPKGEAFTEDSWSDGEYCRKNEEWYFLSKTLAEHEAFAYAAKTGLDIVTICPSLVIGPLLQPAVNTSIKVFLSYIKGDQEIVKDGPKNLVDVRDVAGALLLAYENLQASGRYLCSSPAIRVSDIVNILKTEYPTYTYPQKFVEAEGSNTYNTEKLRKLGWTSRPMEETLRDSIECYRALGILN

SEQ ID NO: 12321 - protein, 256 aa, Zea mays subsp. mays
  peptide (1)..(256): Ceres Seq. ID no. 12366787
  misc_feature (1)..(249): Pfam Name: NAD dependent epimerase/dehydratase family Pfam Description: NAD dependent epimerase/dehydratase family
  misc_feature (1)..(250): Homolog of NCBI NO: 15226135 NR Description: putative cinnamoyl-CoA reductase; protein id: supported by cDNA: gi_20260487 [Arabidopsis thaliana]
  misc_feature (1)..(250): Homolog of NCBI NO: 15226134 NR Description: putative cinnamoyl-CoA reductase; protein id: supported by cDNA: 11254. [Arabidopsis thaliana]
  misc_feature (1)..(255): Homolog of NCBI NO: 15223068 NR Description: putative cinnamoyl-CoA reductase; protein id:
  misc_feature (1)..(255): Homolog of NCBI NO: 6554472 NR Description: putative cinnamoyl-CoA reductase; 14056-15506
  misc_feature (1)..(246): Homolog of NCBI NO: 17978649 NR Description: cinnamoyl-CoA reductase [Pinus taeda]
  misc_feature (1)..(255): Homolog of NCBI NO: 9998901 NR Description: cinnamoyl-CoA reductase [Populus balsamifera
  misc_feature (1)..(255): Homolog of NCBI NO: 40233135 NR Description: cinnamoyl CoA reductase [Populus tomentosa]
  misc_feature (1)..(255): Homolog of NCBI NO: 2960364 NR Description: cinnamoyl CoA reductase [Populus balsamifera
  misc_feature (1)..(255): Homolog of NCBI NO: 7431406 NR Description: probable cinnamyl-alcohol dehydrogenase (EC
  misc_feature (1)..(255): Homolog of NCBI NO: 7431410 NR Description: cinnamoyl CoA reductase - maize
MLDYGSVASAVAGCQGVFHVASPVPSGKSSNPEEDVIAPAVTGTLNVLKACYEAKAKRVVVVSSVAAVFNNPDWPKGEAFTEDSWSDGEYCRKNEEWYFLSKTLAEHEAFAYAAKTGLDIVTICPSLVIGPLLQPAVNTSIKVFLSYIKGDQEIVKDGPKNLVDVRDVAGALLLAYENLQASGRYLCSSPAIRVSDIVNILKTEYPTYTYPQKFVEAEGSNTYNTEKLRKLGWTSRPMEETLRDSIECYRALGILN

SEQ ID NO: 12322 - DNA, 1494 bp, Zea mays subsp. mays
  misc_feature (1)..(1494): Ceres Seq. ID no. 12383105
  misc_feature: MA Experiment ID: 108504 Result: Up-regulated in Transcription
  misc_feature: MA Experiment 108504 PARAMETER Experiment Name: Zm_Drought_P Parameter: Age (day) Value: 8
  misc_feature: MA Experiment 108504 PARAMETER Experiment Name: Zm_Drought_P Parameter: Organism Value: Zea mays
  misc_feature: MA Experiment 108504 PARAMETER Experiment Name: Zm_Drought_P Parameter: Plant Line Value: 35A19
  misc_feature: MA Experiment 108504 PARAMETER Experiment Name: Zm_Drought_P Parameter: Timepoint (hr) Value: 12
  misc_feature: MA Experiment 108504 PARAMETER Experiment Name: Zm_Drought_P Parameter: Tissue Value: Aerial
  misc_feature: MA Experiment 108504 PARAMETER Experiment Name: Zm_Drought_P Parameter: Treatment Value: Drought vs. No Drought
  misc_feature: MA Experiment ID: 108523 Result: Up-regulated in Transcription
  misc_feature: MA Experiment 108523 PARAMETER Experiment Name: Zm_42deg_Heat_P Parameter: Age (day) Value: 8
  misc_feature: MA Experiment 108523 PARAMETER Experiment Name: Zm_42deg_Heat_P Parameter: Organism Value: Zea mays
  misc_feature: MA Experiment 108523 PARAMETER Experiment Name: Zm_42deg_Heat_P Parameter: Plant Line Value: 35A19
  misc_feature: MA Experiment 108523 PARAMETER Experiment Name: Zm_42deg_Heat_P Parameter: Temperature (deg C) Value: 42 vs. 22
  misc_feature: MA Experiment 108523 PARAMETER Experiment Name: Zm_42deg_Heat_P Parameter: Timepoint (hr) Value: 6
  misc_feature: MA Experiment 108523 PARAMETER Experiment Name: Zm_42deg_Heat_P Parameter: Tissue Value: Aerial
  misc_feature: MA Experiment ID: 108527 Result: Up-regulated in Transcription
  misc_feature: MA Experiment 108527 PARAMETER Experiment Name: Zm_5mM_NO_P Parameter: Age (day) Value: 8
  misc_feature: MA Experiment 108527 PARAMETER Experiment Name: Zm_5mM_NO_P Parameter: Organism Value: Zea mays
  misc_feature: MA Experiment 108527 PARAMETER Experiment Name: Zm_5mM_NO_P Parameter: Plant Line Value: 35A19
  misc_feature: MA Experiment 108527 PARAMETER Experiment Name: Zm_5mM_NO_P Parameter: Timepoint (hr) Value: 6
  misc_feature: MA Experiment 108527 PARAMETER Experiment Name: Zm_5mM_NO_P Parameter: Tissue Value: Aerial
  misc_feature: MA Experiment 108527 PARAMETER Experiment Name: Zm_5mM_NO_P Parameter: Treatment Value: 5mM NO vs. No Treatment
  misc_feature: MA Experiment ID: 20000478 Result: Up-regulated in Transcription
  misc_feature: MA Experiment 20000478 PARAMETER Experiment Name: Zm_5mM_SA_P Parameter: Age (day) Value: 11
  misc_feature: MA Experiment 20000478 PARAMETER Experiment Name: Zm_5mM_SA_P Parameter: Organism Value: Zea mays
  misc_feature: MA Experiment 20000478 PARAMETER Experiment Name: Zm_5mM_SA_P Parameter: Plant Line Value: 35A19
  misc_feature: MA Experiment 20000478 PARAMETER Experiment Name: Zm_5mM_SA_P Parameter: Timepoint (hr) Value: 72
  misc_feature: MA Experiment 20000478 PARAMETER Experiment Name: Zm_5mM_SA_P Parameter: Tissue Value: Aerial
  misc_feature: MA Experiment 20000478 PARAMETER Experiment Name: Zm_5mM_SA_P Parameter: Treatment Value: 5mM SA vs. No Treatment
  misc_feature: MA Experiment ID: 20000479 Result: Up-regulated in Transcription
  misc_feature: MA Experiment 20000479 PARAMETER Experiment Name: Zm_Drought_P Parameter: Age (day) Value: 10
  misc_feature: MA Experiment 20000479 PARAMETER Experiment Name: Zm_Drought_P Parameter: Organism Value: Zea mays
  misc_feature: MA Experiment 20000479 PARAMETER Experiment Name: Zm_Drought_P Parameter: Plant Line Value: 35A19
  misc_feature: MA Experiment 20000479 PARAMETER Experiment Name: Zm_Drought_P Parameter: Timepoint (hr) Value: 48
  misc_feature: MA Experiment 20000479 PARAMETER Experiment Name: Zm_Drought_P Parameter: Tissue Value: Aerial
  misc_feature: MA Experiment 20000479 PARAMETER Experiment Name: Zm_Drought_P Parameter: Treatment Value: Drought vs. No Drought
  misc_feature: MA Experiment ID: 20000480 Result: Up-regulated in Transcription
  misc_feature: MA Experiment 20000480 PARAMETER Experiment Name: Zm_Drought_P Parameter: Age (day) Value: 11
  misc_feature: MA Experiment 20000480 PARAMETER Experiment Name: Zm_Drought_P Parameter: Organism Value: Zea mays
  misc_feature: MA Experiment 20000480 PARAMETER Experiment Name: Zm_Drought_P Parameter: Plant Line Value: 35A19
  misc_feature: MA Experiment 20000480 PARAMETER Experiment Name: Zm_Drought_P Parameter: Timepoint (hr) Value: 72
  misc_feature: MA Experiment 20000480 PARAMETER Experiment Name: Zm_Drought_P Parameter: Tissue Value: Aerial
  misc_feature: MA Experiment 20000480 PARAMETER Experiment Name: Zm_Drought_P Parameter: Treatment Value: Drought vs. No Drought
  misc_feature: MA Experiment ID: 20000535 Result: Down-regulated in Transcription
  misc_feature: MA Experiment 20000535 PARAMETER Experiment Name: Zm_Hybrid_Seed_Dev_P Parameter: DAP Value: 30 vs. 12
  misc_feature: MA Experiment 20000535 PARAMETER Experiment Name: Zm_Hybrid_Seed_Dev_P Parameter: Organism Value: Zea mays
  misc_feature: MA Experiment 20000535 PARAMETER Experiment Name: Zm_Hybrid_Seed_Dev_P Parameter: Plant Line Value: 35A19
  misc_feature: MA Experiment 20000535 PARAMETER Experiment Name: Zm_Hybrid_Seed_Dev_P Parameter: Tissue Value: Embryo vs. Unfert Floret
atgctacgccaagcgcgcaattaaccctcactaaagggaacaaaagctggagctccaccgcggtggcggccgctctagaactagtggatcccccgggctgcaggaattcgcacgagaccattacctagaacatcctaatcaaaaagatcgaaacgaaaaggcagagagggagggatctccgtctccacgccgcgtcctcccgcacgaatccgcgctccggccaacgggccaagccctagccacccccgcccattcatggtgggcgggccgtgagatctctagggaggcttgtcggcttcgtcgggcgggaggggaggagatgggcgcccggaacagcgctgccgccacgccggtgctgctcaacgtgtacgaccttacggccgcgaacgattacctctactggctcggcttcggcgtcttccactccggaatcgaagtccatggcacggaatatgggtttggagcccacgactacccatccagtggtgtgtttgaggtggaatcaaagagttgccctggctttatctacagaagaacagtgtggctaggcacaacagacatgtctcaggaagaattccgctcgtttattgaaaaacttgcaggtgattatcatggcgacacatatcatttaattaacaagaactgcaatcacttcacagatgatgtctgccagaacttaactgggaaacccatcccttcctgggtgaataggcttgcaagagtagggtcagttttcgattgccttcttccagaaagcgtacaagtttctcctgtaggtcgtgtcccaacgagtcggcgaatatctgatgatgatttgtattcaatacattcaccaatggccgacaaagatgacaatgatgaggacgaggccaaacacctgctgccagctccatccaacgaccagctttctgtagatgtaccgccaaagctagcgaaagatcttctctgaaccactccatgttcataggcgcctaccatacttcaactcatatagccattggtgctaaagtgatcctcaagatggcttgacacagatagggattgggcatatttgattaaagatgaagctctaatttcttgtggcttaccagtttgcagtttcaccttgctgtctcatctcagcaaacagttgtcatctatggtagtagtggcatgattgttaccctgccatttagcacatctggaaattgccaatttggaatgtggggttccggtacctgttaggaatcaggactgtcgatgcttgttgagccccagtgttgaaggcacatactgtaacatgttactatcaaaaacagtgtacatgtacatggctaccgagtatttgccacgaatccaaatgagcgaatctctgttgggctgcttaagcgcctgtagtgacatggaacatctttttgttccgggctattgaacatcgaacattcgaacccaaccatgtggttctgtcgctgatgcctgttatgctgtaataatgtgagattactttttgctgtc

SEQ ID NO: 12323 - protein, 209 aa, Zea mays subsp. mays
  peptide (1)..(209): Ceres Seq. ID no. 12383106
  misc_feature (10)..(120): Pfam Name: Eukaryotic protein of unknown function (DUF862) Pfam Description: Eukaryotic protein of unknown function (DUF862)
  misc_feature (1)..(120): Homolog of NCBI NO: 14140145 NR Description: putative protein [Oryza sativa]
  misc_feature (161)..(209): Homolog of NCBI NO: 14140145 NR Description: putative protein [Oryza sativa]
  misc_feature (1)..(199): Homolog of NCBI NO: 38346173 NR Description: OSJNBa0079A21.20 [Oryza sativa (japonica
  misc_feature (1)..(209): Homolog of NCBI NO: 15238059 NR Description: putative protein; protein id: At5g47310.1
  misc_feature (7)..(207): Homolog of NCBI NO: 30684058 NR Description: expressed protein [Arabidopsis thaliana] AT4g17486/AT4g17486 [Arabidopsis thaliana]
  misc_feature (11)..(156): Homolog of NCBI NO: 18401869 NR Description: expressed protein; protein id: At1g47740.1, by cDNA: 40816. [Arabidopsis thaliana] unknown protein [Arabidopsis thaliana]
  misc_feature (11)..(156): Homolog of NCBI NO: 21593644 NR Description: unknown [Arabidopsis thaliana]
  misc_feature (2)..(155): Homolog of NCBI NO: 18420889 NR Description: putative protein; protein id: At5g25170.1,
  misc_feature (11)..(164): Homolog of NCBI NO: 18412886 NR Description: expressed protein; protein id: At1g80690.1, by cDNA: 40037. [Arabidopsis thaliana]
  misc_feature (11)..(156): Homolog of NCBI NO: 9802596 NR Description: T2E6.19 [Arabidopsis thaliana]
MGARNSAAATPVLLNVYDLTAANDYLYWLGFGVFHSGIEVHGTEYGFGAHDYPSSGVFEVESKSCPGFIYRRTVWLGTTDMSQEEFRSFIEKLAGDYHGDTYHLINKNCNHFTDDVCQNLTGKPIPSWVNRLARVGSVFDCLLPESVQVSPVGRVPTSRRISDDDLYSIHSPMADKDDNDEDEAKHLLPAPSNDQLSVDVPPKLAKDLL

SEQ ID NO: 12324 - protein, 129 aa, Zea mays subsp. mays
  peptide (1)..(129): Ceres Seq. ID no. 12383107
  misc_feature (1)..(40): Homolog of NCBI NO: 14140145 NR Description: putative protein [Oryza sativa]
  misc_feature (81)..(129): Homolog of NCBI NO: 14140145 NR Description: putative protein [Oryza sativa]
  misc_feature (1)..(119): Homolog of NCBI NO: 38346173 NR Description: OSJNBa0079A21.20 [Oryza sativa (japonica
  misc_feature (1)..(129): Homolog of NCBI NO: 15238059 NR Description: putative protein; protein id: At5g47310.1
  misc_feature (1)..(127): Homolog of NCBI NO: 30684058 NR Description: expressed protein [Arabidopsis thaliana] AT4g17486/AT4g17486 [Arabidopsis thaliana]
  misc_feature (1)..(76): Homolog of NCBI NO: 18401869 NR Description: expressed protein; protein id: At1g47740.1, by cDNA: 40816. [Arabidopsis thaliana] unknown protein [Arabidopsis thaliana]
  misc_feature (1)..(76): Homolog of NCBI NO: 21593644 NR Description: unknown [Arabidopsis thaliana]
  misc_feature (1)..(75): Homolog of NCBI NO: 18420889 NR Description: putative protein; protein id: At5g25170.1,
  misc_feature (1)..(84): Homolog of NCBI NO: 18412886 NR Description: expressed protein; protein id: At1g80690.1, by cDNA: 40037. [Arabidopsis thaliana]
  misc_feature (1)..(76): Homolog of NCBI NO: 9802596 NR Description: T2E6.19 [Arabidopsis thaliana]
MSQEEFRSFIEKLAGDYHGDTYHLINKNCNHFTDDVCQNLTGKPIPSWVNRLARVGSVFDCLLPESVQVSPVGRVPTSRRISDDDLYSIHSPMADKDDNDEDEAKHLLPAPSNDQLSVDVPPKLAKDLL

SEQ ID NO: 12325 - DNA, 1140 bp, Zea mays subsp. mays
  misc_feature (1)..(1140): Ceres Seq. ID no. 12411567
  misc_feature: MA Experiment ID: 108526 Result: Up-regulated in Transcription
  misc_feature: MA Experiment 108526 PARAMETER Experiment Name: Zm_5mM_NO_P Parameter: Age (day) Value: 8
  misc_feature: MA Experiment 108526 PARAMETER Experiment Name: Zm_5mM_NO_P Parameter: Organism Value: Zea mays
  misc_feature: MA Experiment 108526 PARAMETER Experiment Name: Zm_5mM_NO_P Parameter: Plant Line Value: 35A19
  misc_feature: MA Experiment 108526 PARAMETER Experiment Name: Zm_5mM_NO_P Parameter: Timepoint (hr) Value: 1
  misc_feature: MA Experiment 108526 PARAMETER Experiment Name: Zm_5mM_NO_P Parameter: Tissue Value: Aerial
  misc_feature: MA Experiment 108526 PARAMETER Experiment Name: Zm_5mM_NO_P Parameter: Treatment Value: 5mM NO vs. No Treatment
  misc_feature: MA Experiment ID: 108527 Result: Up-regulated in Transcription
  misc_feature: MA Experiment 108527 PARAMETER Experiment Name: Zm_5mM_NO_P Parameter: Age (day) Value: 8
  misc_feature: MA Experiment 108527 PARAMETER Experiment Name: Zm_5mM_NO_P Parameter: Organism Value: Zea mays
  misc_feature: MA Experiment 108527 PARAMETER Experiment Name: Zm_5mM_NO_P Parameter: Plant Line Value: 35A19
  misc_feature: MA Experiment 108527 PARAMETER Experiment Name: Zm_5mM_NO_P Parameter: Timepoint (hr) Value: 6
  misc_feature: MA Experiment 108527 PARAMETER Experiment Name: Zm_5mM_NO_P Parameter: Tissue Value: Aerial
  misc_feature: MA Experiment 108527 PARAMETER Experiment Name: Zm_5mM_NO_P Parameter: Treatment Value: 5mM NO vs. No Treatment
  misc_feature: MA Experiment ID: 108559 Result: Up-regulated in Transcription
  misc_feature: MA Experiment 108559 PARAMETER Experiment Name: Zm_5mM_NO_P Parameter: Age (day) Value: 8
  misc_feature: MA Experiment 108559 PARAMETER Experiment Name: Zm_5mM_NO_P Parameter: Organism Value: Zea mays
  misc_feature: MA Experiment 108559 PARAMETER Experiment Name: Zm_5mM_NO_P Parameter: Plant Line Value: 35A19
  misc_feature: MA Experiment 108559 PARAMETER Experiment Name: Zm_5mM_NO_P Parameter: Timepoint (hr) Value: 12
  misc_feature: MA Experiment 108559 PARAMETER Experiment Name: Zm_5mM_NO_P Parameter: Tissue Value: Aerial
  misc_feature: MA Experiment 108559 PARAMETER Experiment Name: Zm_5mM_NO_P Parameter: Treatment Value: 5mM NO vs. No Treatment
  misc_feature: MA Experiment ID: 20000487 Result: Up-regulated in Transcription
  misc_feature: MA Experiment 20000487 PARAMETER Experiment Name: Zm_50mM_NH4NO3_L_to_H_P Parameter: Organism Value: Zea mays
  misc_feature: MA Experiment 20000487 PARAMETER Experiment Name: Zm_50mM_NH4NO3_L_to_H_P Parameter: Timepoint (hr) Value: 4
  misc_feature: MA Experiment 20000487 PARAMETER Experiment Name: Zm_50mM_NH4NO3_L_to_H_P Parameter: Tissue Value: Leaves
  misc_feature: MA Experiment 20000487 PARAMETER Experiment Name: Zm_50mM_NH4NO3_L_to_H_P Parameter: Treatment Value: 50mM NH4NO3 vs. 100mM Mannitol
  misc_feature: MA Experiment ID: 20000534 Result: Down-regulated in Transcription
  misc_feature: MA Experiment 20000534 PARAMETER Experiment Name: Zm_Hybrid_Pollen_P Parameter: Age (day) Value: 8
  misc_feature: MA Experiment 20000534 PARAMETER Experiment Name: Zm_Hybrid_Pollen_P Parameter: Organism Value: Zea mays
  misc_feature: MA Experiment 20000534 PARAMETER Experiment Name: Zm_Hybrid_Pollen_P Parameter: Plant Line Value: 35A19
  misc_feature: MA Experiment 20000534 PARAMETER Experiment Name: Zm_Hybrid_Pollen_P Parameter: Tissue Value: Pollen vs. Aerial
  misc_feature: MA Experiment ID: 20000626 Result: Down-regulated in Transcription
  misc_feature: MA Experiment 20000626 PARAMETER Experiment Name: Zm_Herbicide-Treatments_P Parameter: Timepoint (hr) Value: 12
  misc_feature: MA Experiment 20000626 PARAMETER Experiment Name: Zm_Herbicide-Treatments_P Parameter: Tissue Value: Aerial
  misc_feature: MA Experiment 20000626 PARAMETER Experiment Name: Zm_Herbicide-Treatments_P Parameter: Treatment Value: Roundup vs. No Treatment
  misc_feature: MA Experiment ID: 20000629 Result: Down-regulated in Transcription
  misc_feature: MA Experiment 20000629 PARAMETER Experiment Name: Zm_Herbicide-Treatments_P Parameter: Timepoint (hr) Value: 12
  misc_feature: MA Experiment 20000629 PARAMETER Experiment Name: Zm_Herbicide-Treatments_P Parameter: Tissue Value: Aerial
  misc_feature: MA Experiment 20000629 PARAMETER Experiment Name: Zm_Herbicide-Treatments_P Parameter: Treatment Value: Trimec vs. No Treatment
  misc_feature: MA Experiment ID: 20001613 Result: Up-regulated in Transcription
  misc_feature: MA Experiment 20001613 PARAMETER Experiment Name: Zm_50ppm_KNO3_L-to-H_P Parameter: Age (day) Value: 20
  misc_feature: MA Experiment 20001613 PARAMETER Experiment Name: Zm_50ppm_KNO3_L-to-H_P Parameter: Organism Value: Zea mays
  misc_feature: MA Experiment 20001613 PARAMETER Experiment Name: Zm_50ppm_KNO3_L-to-H_P Parameter: Plant Line Value: 35A19
  misc_feature: MA Experiment 20001613 PARAMETER Experiment Name: Zm_50ppm_KNO3_L-to-H_P Parameter: Timepoint (hr) Value: 24
  misc_feature: MA Experiment 20001613 PARAMETER Experiment Name: Zm_50ppm_KNO3_L-to-H_P Parameter: Tissue Value: Roots
  misc_feature: MA Experiment 20001613 PARAMETER Experiment Name: Zm_50ppm_KNO3_L-to-H_P Parameter: Treatment Value: 50ppm KNO3 vs. 50ppm KCl
aagaagagtggcaaacatgcactcaggcattggacttcggatggatgcaaatggcgaagccagtgatgaatttatatacagaagcaactgatggatcctacattgaggccaaggaaagtgccttggtgtggcaccatcaggatgctgacctaggctttggatcctcacaggcaaaggagatgcttgatcacctggaaagtgtactagcaaatgaaccagtctctgtcaagagtggccagttcattgttgaagtcaaaccacagggaataagcaagggaatagttgccgagaggatacttgcatcagtgaaggagagaggaaagcaggctgatttcttattgtgcatcggcgatgataggtctgatgaggacatgtttgaaaatattgctgatatcattgggaggaatttggttgctccaagaacagcactgtttgcgtgcactgtgggacaaaaaccaagcaaagccaaattctacctggatgatacattcgaagtggtcactatgctgagcgcactggcagatgccacaggtcctgaactggagactgattcggctgatgaatctgtcgcatatatctcatcacttgatattggtgacgaacaatcagaatccagtgataaaccagttgaagggtcttagccagttttctcttgcgttttcagaacatgatgattgtttcaatagtcaattctattctacacaattttctgatgggaactcaacgactaacaactggttctacgaatgctccagagtgaagcttctcaatctgctgtgctccaagttctccagttgggcaagatagtacagtctgttgctccaaggcgtagatccatatgttcatagctgacttacttggcacgttctttcactttctcattcctggttgaattaaaatgaaaacctcacagaagacaaagggagcgctgtttggctcattggctgaagtaatctggggggaggtataggagtggcgtatgtgaaaggagcctgtgcgcaggttgtgatatgattccttattaacacgacgttacaaagtggtgtcacttcttgaactaccagtagtaacaatcccaagagtgaggttcgaattgattaattaattgcttcaaagccagatctcggatggttttgctcc

SEQ ID NO: 12326 - protein, 212 aa, Zea mays subsp. mays
  peptide (1)..(212): Ceres Seq. ID no. 12411568
  misc_feature (1)..(163): Pfam Name: Trehalose-phosphatase Pfam Description: Trehalose-phosphatase
  misc_feature (1)..(211): Homolog of NCBI NO: 34909526 NR Description: putative trehalose-6-phosphate synthase homolog
  misc_feature (1)..(188): Homolog of NCBI NO: 34910846 NR Description: putative trehalose-6-phosphate synthase [Oryza
  misc_feature (1)..(189): Homolog of NCBI NO: 19568935 NR Description: putative trehalose synthase [Solanum tuberosum]
  misc_feature (1)..(176): Homolog of NCBI NO: 15221478 NR Description: trehalose-6-phosphate synthase, putative; protein At1g06410.1 [Arabidopsis thaliana] >gi|25347117|pir||A86200
  misc_feature (1)..(191): Homolog of NCBI NO: 27371966 NR Description: trehalose-6-phosphate synthase/phosphatase
  misc_feature (2)..(176): Homolog of NCBI NO: 25347119 NR Description: hypothetical protein T23K23.13 [imported] -
  misc_feature (2)..(197): Homolog of NCBI NO: 18414960 NR Description: trehalose-6-phosphate synthase like protein;
  misc_feature (2)..(197): Homolog of NCBI NO: 7488400 NR Description: trehalose-6-phosphate synthase homolog DL4920W -
  misc_feature (1)..(193): Homolog of NCBI NO: 7488401 NR Description: trehalose-6-phosphate synthase homolog F17O7.18 -
  misc_feature (1)..(193): Homolog of NCBI NO: 30698024 NR Description: alpha,alpha-trehalose-phosphate synthase,
EEWQTCTQALDFGWMQMAKPVMNLYTEATDGSYIEAKESALVWHHQDADLGFGSSQAKEMLDHLESVLANEPVSVKSGQFIVEVKPQGISKGIVAERILASVKERGKQADFLLCIGDDRSDEDMFENIADIIGRNLVAPRTALFACTVGQKPSKAKFYLDDTFEVVTMLSALADATGPELETDSADESVAYISSLDIGDEQSESSDKPVEGS

SEQ ID NO: 12327 - protein, 198 aa, Zea mays subsp. mays
  peptide (1)..(198): Ceres Seq. ID no. 12411569
  misc_feature (1)..(149): Pfam Name: Trehalose-phosphatase Pfam Description: Trehalose-phosphatase
  misc_feature (1)..(197): Homolog of NCBI NO: 34909526 NR Description: putative trehalose-6-phosphate synthase homolog
  misc_feature (1)..(174): Homolog of NCBI NO: 34910846 NR Description: putative trehalose-6-phosphate synthase [Oryza
  misc_feature (1)..(175): Homolog of NCBI NO: 19568935 NR Description: putative trehalose synthase [Solanum tuberosum]
  misc_feature (1)..(162): Homolog of NCBI NO: 15221478 NR Description: trehalose-6-phosphate synthase, putative; protein At1g06410.1 [Arabidopsis thaliana] >gi|25347117|pir||A86200
  misc_feature (1)..(177): Homolog of NCBI NO: 27371966 NR Description: trehalose-6-phosphate synthase/phosphatase
  misc_feature (1)..(162): Homolog of NCBI NO: 25347119 NR Description: hypothetical protein T23K23.13 [imported] -
  misc_feature (1)..(183): Homolog of NCBI NO: 18414960 NR Description: trehalose-6-phosphate synthase like protein;
  misc_feature (1)..(183): Homolog of NCBI NO: 7488400 NR Description: trehalose-6-phosphate synthase homolog DL4920W -
  misc_feature (1)..(179): Homolog of NCBI NO: 7488401 NR Description: trehalose-6-phosphate synthase homolog F17O7.18 -
  misc_feature (1)..(179): Homolog of NCBI NO: 30698024 NR Description: alpha,alpha-trehalose-phosphate synthase,
MQMAKPVMNLYTEATDGSYIEAKESALVWHHQDADLGFGSSQAKEMLDHLESVLANEPVSVKSGQFIVEVKPQGISKGIVAERILASVKERGKQADFLLCIGDDRSDEDMFENIADIIGRNLVAPRTALFACTVGQKPSKAKFYLDDTFEVVTMLSALADATGPELETDSADESVAYISSLDIGDEQSESSDKPVEGS

SEQ ID NO: 12328 - protein, 196 aa, Zea mays subsp. mays
  peptide (1)..(196): Ceres Seq. ID no. 12411570
  misc_feature (1)..(147): Pfam Name: Trehalose-phosphatase Pfam Description: Trehalose-phosphatase
  misc_feature (1)..(195): Homolog of NCBI NO: 34909526 NR Description: putative trehalose-6-phosphate synthase homolog
  misc_feature (1)..(172): Homolog of NCBI NO: 34910846 NR Description: putative trehalose-6-phosphate synthase [Oryza
  misc_feature (1)..(173): Homolog of NCBI NO: 19568935 NR Description: putative trehalose synthase [Solanum tuberosum]
  misc_feature (1)..(160): Homolog of NCBI NO: 15221478 NR Description: trehalose-6-phosphate synthase, putative; protein At1g06410.1 [Arabidopsis thaliana] >gi|25347117|pir||A86200
  misc_feature (1)..(175): Homolog of NCBI NO: 27371966 NR Description: trehalose-6-phosphate synthase/phosphatase
  misc_feature (1)..(160): Homolog of NCBI NO: 25347119 NR Description: hypothetical protein T23K23.13 [imported] -
  misc_feature (1)..(181): Homolog of NCBI NO: 18414960 NR Description: trehalose-6-phosphate synthase like protein;
  misc_feature (1)..(181): Homolog of NCBI NO: 7488400 NR Description: trehalose-6-phosphate synthase homolog DL4920W -
  misc_feature (1)..(177): Homolog of NCBI NO: 7488401 NR Description: trehalose-6-phosphate synthase homolog F17O7.18 -
  misc_feature (1)..(177): Homolog of NCBI NO: 30698024 NR Description: alpha,alpha-trehalose-phosphate synthase,
MAKPVMNLYTEATDGSYIEAKESALVWHHQDADLGFGSSQAKEMLDHLESVLANEPVSVKSGQFIVEVKPQGISKGIVAERILASVKERGKQADFLLCIGDDRSDEDMFENIADIIGRNLVAPRTALFACTVGQKPSKAKFYLDDTFEVVTMLSALADATGPELETDSADESVAYISSLDIGDEQSESSDKPVEGS

SEQ ID NO: 12329 - DNA, 1495 bp, Zea mays subsp. mays
  misc_feature (1)..(1495): Ceres Seq. ID no. 12411561
  misc_feature: MA Experiment ID: 108522 Result: Up-regulated in Transcription
  misc_feature: MA Experiment 108522 PARAMETER Experiment Name: Zm_42deg_Heat_P Parameter: Age (day) Value: 8
  misc_feature: MA Experiment 108522 PARAMETER Experiment Name: Zm_42deg_Heat_P Parameter: Organism Value: Zea mays
  misc_feature: MA Experiment 108522 PARAMETER Experiment Name: Zm_42deg_Heat_P Parameter: Plant Line Value: 35A19
  misc_feature: MA Experiment 108522 PARAMETER Experiment Name: Zm_42deg_Heat_P Parameter: Temperature (deg C) Value: 42 vs. 22
  misc_feature: MA Experiment 108522 PARAMETER Experiment Name: Zm_42deg_Heat_P Parameter: Timepoint (hr) Value: 1
  misc_feature: MA Experiment 108522 PARAMETER Experiment Name: Zm_42deg_Heat_P Parameter: Tissue Value: Aerial
  misc_feature: MA Experiment ID: 108523 Result: Up-regulated in Transcription
  misc_feature: MA Experiment 108523 PARAMETER Experiment Name: Zm_42deg_Heat_P Parameter: Age (day) Value: 8
  misc_feature: MA Experiment 108523 PARAMETER Experiment Name: Zm_42deg_Heat_P Parameter: Organism Value: Zea mays
  misc_feature: MA Experiment 108523 PARAMETER Experiment Name: Zm_42deg_Heat_P Parameter: Plant Line Value: 35A19
  misc_feature: MA Experiment 108523 PARAMETER Experiment Name: Zm_42deg_Heat_P Parameter: Temperature (deg C) Value: 42 vs. 22
  misc_feature: MA Experiment 108523 PARAMETER Experiment Name: Zm_42deg_Heat_P Parameter: Timepoint (hr) Value: 6
  misc_feature: MA Experiment 108523 PARAMETER Experiment Name: Zm_42deg_Heat_P Parameter: Tissue Value: Aerial
ctggatggctaggcccaaccaaacacgacggcccacgggtgcacctgaggcggcgcacgttgccgactcggctgtctcgtcttccttgtgcttcgcgcactcgccgcccctgcgccctgcgggcagtctcttcttgccctttctcctgtgcgcagccgcggcggacccaatctcgcattctcgcgttccgagatactgttgttctttcagggagatagatagattccgactgctcgccattggggctgccttggccgcgtgccatccgtcgcttcgtcgagctgcgtgcgggggcgctcctcgtcctcctcacgatggggggctggaaccggtcgctgtacgtgacgggccaccgtgaccgctccgccggcgcttcgcgtactcctctgcctccgccttcgcctgattacggagacaagcaccagcaagtcccattatgggagagggaattctgccgccacgttggcgacatcacttgggagcgtttctgtgaaaacaagcagtatgttggacaattccataatcacgagccttgggatgattcagcggcatttgattgtttccagaacgcaaaggcaaggttctgggcgagctaccatggccagccttctgacattcctttgctggacgacccggatctgtacatcgacaaggtcgaccaccaatgcgaagtcgacccggagttggtagctgatctggatagcgtagggctaccgttcgagtcggatgataatcccgcctcagccaaagggtggaccaatgcttgggccaacaacaagtgcacccagaacgggtctggaaactgggacgccttcgtagaaaagccagctgaagtcagtaagtgggactccgaggccaatctcgcatccaacacgacttggggcggccaggccaatgtagcaacacctgaggcggtttggagaggccaatctttcagtaaatggggcaatgatagcaacaccagccggggtgttcctctggagaagccgagctggcgtggctgtagcaagaaccgctacacacccaacagctggagcagcaactttcatagcagaccatccgacaataggtaccagcagctggaggatccgagctacacttctgggactggaaggaaatggaatggcggcgacggcggctggtacgtcaagcagaggaaccaggaccaggggcagcaccagcagccgaggagtggcagctggcagcaggaccaaagaagaaggagcaggcagtggcgtccggtgcacagcagggctccctaaaacggtccggcgtcttgatctcgtggcgagactcgcaggtgtcttcttttgtgcagtcagttttcagctgctgctggcaaagtggtgcctgtaaatagatgttttttgttgttgttttgtttgagttgtatgctgcagctgctccttcgcagctgcgtccttactttgcttatggtgcaatgttaatatgttataatgttagttaatatggggagcatcacagtttttggttc

SEQ ID NO: 12330 - protein, 315 aa, Zea mays subsp. mays
  peptide (1)..(315): Ceres Seq. ID no. 12411562
  misc_feature (1)..(296): Homolog of NCBI NO: 18414420 NR Description: putative protein; protein id: At5g03990.1, by cDNA: gi_15450997, supported by cDNA: gi_17978776 [Arabidopsis >gi|15450998|gb|AAK96770.1| putative protein [Arabidopsis
  misc_feature (39)..(296): Homolog of NCBI NO: 11357869 NR Description: hypothetical protein F8F6.200 - Arabidopsis >gi|7406409|emb|CAB85519.1| putative protein [Arabidopsis
  misc_feature (1)..(308): Homolog of NCBI NO: 30725308 NR Description: At3g51940 [Arabidopsis thaliana]
  misc_feature (1)..(308): Homolog of NCBI NO: 30693555 NR Description: expressed protein [Arabidopsis thaliana]
  misc_feature (39)..(308): Homolog of NCBI NO: 11357778 NR Description: hypothetical protein F4F15.50 - Arabidopsis >gi|4678923|emb|CAB41314.1| putative protein [Arabidopsis
  misc_feature (11)..(242): Homolog of NCBI NO: 34908952 NR Description: P0691E06.28 [Oryza sativa (japonica
MGGWNRSLYVTGHRDRSAGASRTPLPPPSPDYGDKHQQVPLWEREFCRHVGDITWERFCENKQYVGQFHNHEPWDDSAAFDCFQNAKARFWASYHGQPSDIPLLDDPDLYIDKVDHQCEVDPELVADLDSVGLPFESDDNPASAKGWTNAWANNKCTQNGSGNWDAFVEKPAEVSKWDSEANLASNTTWGGQANVATPEAVWRGQSFSKWGNDSNTSRGVPLEKPSWRGCSKNRYTPNSWSSNFHSRPSDNRYQQLEDPSYTSGTGRKWNGGDGGWYVKQRNQDQGQHQQPRSGSWQQDQRRRSRQWRPVHSRAP

SEQ ID NO: 12331 - DNA, 1745 bp, Zea mays subsp. mays
  misc_feature (1)..(1745): Ceres Seq. ID no. 12374204
  misc_feature: MA Experiment ID: 108556 Result: Down-regulated in Transcription
  misc_feature: MA Experiment 108556 PARAMETER Experiment Name: Zm_Drought_P Parameter: Age (day) Value: 9
  misc_feature: MA Experiment 108556 PARAMETER Experiment Name: Zm_Drought_P Parameter: Organism Value: Zea mays
  misc_feature: MA Experiment 108556 PARAMETER Experiment Name: Zm_Drought_P Parameter: Plant Line Value: 35A19
  misc_feature: MA Experiment 108556 PARAMETER Experiment Name: Zm_Drought_P Parameter: Timepoint (hr) Value: 24
  misc_feature: MA Experiment 108556 PARAMETER Experiment Name: Zm_Drought_P Parameter: Tissue Value: Aerial
  misc_feature: MA Experiment 108556 PARAMETER Experiment Name: Zm_Drought_P Parameter: Treatment Value: Drought vs. No Drought
  misc_feature: MA Experiment ID: 20000480 Result: Down-regulated in Transcription
  misc_feature: MA Experiment 20000480 PARAMETER Experiment Name: Zm_Drought_P Parameter: Age (day) Value: 11
  misc_feature: MA Experiment 20000480 PARAMETER Experiment Name: Zm_Drought_P Parameter: Organism Value: Zea mays
  misc_feature: MA Experiment 20000480 PARAMETER Experiment Name: Zm_Drought_P Parameter: Plant Line Value: 35A19
  misc_feature: MA Experiment 20000480 PARAMETER Experiment Name: Zm_Drought_P Parameter: Timepoint (hr) Value: 72
  misc_feature: MA Experiment 20000480 PARAMETER Experiment Name: Zm_Drought_P Parameter: Tissue Value: Aerial
  misc_feature: MA Experiment 20000480 PARAMETER Experiment Name: Zm_Drought_P Parameter: Treatment Value: Drought vs. No Drought
  misc_feature: MA Experiment ID: 20000535 Result: Down-regulated in Transcription
  misc_feature: MA Experiment 20000535 PARAMETER Experiment Name: Zm_Hybrid_Seed_Dev_P Parameter: DAP Value: 30 vs. 12
  misc_feature: MA Experiment 20000535 PARAMETER Experiment Name: Zm_Hybrid_Seed_Dev_P Parameter: Organism Value: Zea mays
  misc_feature: MA Experiment 20000535 PARAMETER Experiment Name: Zm_Hybrid_Seed_Dev_P Parameter: Plant Line Value: 35A19
  misc_feature: MA Experiment 20000535 PARAMETER Experiment Name: Zm_Hybrid_Seed_Dev_P Parameter: Tissue Value: Embryo vs. Unfert Floret
gtccttccctccgcctccgcccccgcccactcctggcttccaccactcctgtcacctcttcccgcgccgacgcagccgccatggaccccgtctccacatgggggctaaccccgctcgcgggcgccgacccggagatctacgacctcctggagcgcgagaagcggcgccagcgtcgcggcatcgagctcatcgcctccgagaacttcacctccttcgccgtcatggaggcgctcggctccgcgctcactaacaagtactccgagggcatgcccggcgcccgctactacggcggcaacgacgtcatcgacgagatcgagaacctctgccggtcacgcgcgctcgctgccttccaccttgacgccgcgtcctggggcgtcaacgtgcagccctactcgggctcccccgccaacttcgccgcctacaccgcgctgctcaacccgcacgaccggatcatggggctcgaccttccctccggcggacacctcactcacgggtactacacggccggcggtaagaagatctccgccacctcgatctactttgagagcctgccgtacaaggtgagcgccgcaacggggtacatcgactacgagaagctcgaggagaaggcacttgacttccgccccaagctcatcatctgcggtggcagtgcgtacccgagggactgggattacgccaggctcagggccgtcgccgacaaggtcggggccctgctgctctgcgacatggcgcacatcagcgggctcgtcgccgcgcaggaagctgcaaatccttttgaatattgtgatgtggttaccacaaccacgcacaagtccctcagagggccaagggctggcatgatcttctacaggaaaggccctaagccccccaagaagggccagcctgagggtgctgtttatgattacgaagacaagatcaactttgcagtgttcccatctctccaaggtggccctcacaaccaccagattgctgcacttgctgttgctctacagcaaactatgtcgcctggcttcaaggcctatgcaaagcaagtgaaggccaatgctgttgcaattggaaactatctcatgagcaagggctacaagatggtgactgatggaactgagaaccaccttgttctctgggatctccgcccccttggcttgactggaaacaaggtcgaaaagctatgtgatctttgccacatcacattgaacaagaatgctgtcttcggtgacagcagtgcattgtctccgggtggtgtccgcattggcgcgccagcaatgacctcgaggggtctactggagaaggatttcgagcagattggggagttcctccaccaggcagtgaccatctgcctgaacatccagaaggagtacggcaagctcctcaaggacttcaacaagggcctggtgaacaacaaggacatcgagaacctcaaggtccaggtggagaagtttgccgactccttcgacatgcctgggttcacgcttgagagcatgaaatacaaggagtagacatgcctcccatgcgcggcaaggtcctcctgtaccgatgtctttccttgtggtggcgcagggtgccatggcactgcactgccgccacacttacgatgatgatggtgggttatggattttgtctacaatgtcagcaggataggctcacaattgccccctgccctccggtttggtcgcctctcaggttttcatttggtagttgttcgcagggaaccatatgagaattgcaatgtcaatcaggtgtttgcc

SEQ ID NO: 12332 - protein, 497 aa, Zea mays subsp. mays
  peptide (1)..(497): Ceres Seq. ID no. 12374205
  misc_feature (38)..(438): Pfam Name: Serine hydroxymethyltransferase Pfam Description: Serine hydroxymethyltransferase
  misc_feature (27)..(497): Homolog of NCBI NO: 15236375 NR Description: hydroxymethyltransferase; protein id: supported by cDNA: 29662., supported by cDNA: gi_13358183, by cDNA: gi_13605526, supported by cDNA: gi_20334773 [Arabidopsis
  misc_feature (27)..(497): Homolog of NCBI NO: 21592544 NR Description: hydroxymethyltransferase [Arabidopsis thaliana]
  misc_feature (27)..(497): Homolog of NCBI NO: 11762130 NR Description: AT4g13930 [Arabidopsis thaliana]
  misc_feature (27)..(494): Homolog of NCBI NO: 15236371 NR Description: glycine hydroxymethyltransferase - like protein; id: At4g13890.1 [Arabidopsis thaliana] >gi|7433549|pir||T05258
  misc_feature (4)..(486): Homolog of NCBI NO: 18400090 NR Description: putative hydroxymethyltransferase; protein id: supported by cDNA: 122515. [Arabidopsis thaliana]
  misc_feature (4)..(486): Homolog of NCBI NO: 25286207 NR Description: probable hydroxymethyltransferase, 49598-47322 - Arabidopsis thaliana >gi|12324475|gb|AAG52195.1|AC021199_1
  misc_feature (4)..(486): Homolog of NCBI NO: 21537165 NR Description: putative hydroxymethyltransferase [Arabidopsis
  misc_feature (11)..(490): Homolog of NCBI NO: 15219182 NR Description: glycine hydroxymethyltransferase, putative; id: At1g22020.1 [Arabidopsis thaliana] F2E2.7 [Arabidopsis thaliana] >gi|21928157|gb|AAM78106.1|
  misc_feature (38)..(496): Homolog of NCBI NO: 17066746 NR Description: serine hydroxymethyltransferase [Chlamydomonas
  misc_feature (2)..(497): Homolog of NCBI NO: 462187 NR Description: SERINE HYDROXYMETHYLTRANSFERASE, MITOCHONDRIAL
PSLRLRPRPLLASTTPVTSSRADAAAMDPVSTWGLTPLAGADPEIYDLLEREKRRQRRGIELIASENFTSFAVMEALGSALTNKYSEGMPGARYYGGNDVIDEIENLCRSRALAAFHLDAASWGVNVQPYSGSPANFAAYTALLNPHDRIMGLDLPSGGHLTHGYYTAGGKKISATSIYFESLPYKVSAATGYIDYEKLEEKALDFRPKLIICGGSAYPRDWDYARLRAVADKVGALLLCDMAHISGLVAAQEAANPFEYCDVVTTTTHKSLRGPRAGMIFYRKGPKPPKKGQPEGAVYDYEDKINFAVFPSLQGGPHNHQIAALAVALQQTMSPGFKAYAKQVKANAVAIGNYLMSKGYKMVTDGTENHLVLWDLRPLGLTGNKVEKLCDLCHITLNKNAVFGDSSALSPGGVRIGAPAMTSRGLLEKDFEQIGEFLHQAVTICLNIQKEYGKLLKDFNKGLVNNKDIENLKVQVEKFADSFDMPGFTLESMKYKE

SEQ ID NO: 12333 - protein, 471 aa, Zea mays subsp. mays
  peptide (1)..(471): Ceres Seq. ID no. 12374206
  misc_feature (12)..(412): Pfam Name: Serine hydroxymethyltransferase Pfam Description: Serine hydroxymethyltransferase
  misc_feature (1)..(471): Homolog of NCBI NO: 15236375 NR Description: hydroxymethyltransferase; protein id: supported by cDNA: 29662., supported by cDNA: gi_13358183, by cDNA: gi_13605526, supported by cDNA: gi_20334773 [Arabidopsis
  misc_feature (1)..(471): Homolog of NCBI NO: 21592544 NR Description: hydroxymethyltransferase [Arabidopsis thaliana]
  misc_feature (1)..(471): Homolog of NCBI NO: 11762130 NR Description: AT4g13930 [Arabidopsis thaliana]
  misc_feature (1)..(468): Homolog of NCBI NO: 15236371 NR Description: glycine hydroxymethyltransferase - like protein; id: At4g13890.1 [Arabidopsis thaliana] >gi|7433549|pir||T05258
  misc_feature (1)..(460): Homolog of NCBI NO: 18400090 NR Description: putative hydroxymethyltransferase; protein id: supported by cDNA: 122515. [Arabidopsis thaliana]
  misc_feature (1)..(460): Homolog of NCBI NO: 25286207 NR Description: probable hydroxymethyltransferase, 49598-47322 - Arabidopsis thaliana >gi|12324475|gb|AAG52195.1|AC021199_1
  misc_feature (1)..(460): Homolog of NCBI NO: 21537165 NR Description: putative hydroxymethyltransferase [Arabidopsis
  misc_feature (1)..(464): Homolog of NCBI NO: 15219182 NR Description: glycine hydroxymethyltransferase, putative; id: At1g22020.1 [Arabidopsis thaliana] F2E2.7 [Arabidopsis thaliana] >gi|21928157|gb|AAM78106.1|
  misc_feature (12)..(470): Homolog of NCBI NO: 17066746 NR Description: serine hydroxymethyltransferase [Chlamydomonas
  misc_feature (1)..(471): Homolog of NCBI NO: 462187 NR Description: SERINE HYDROXYMETHYLTRANSFERASE, MITOCHONDRIAL
MDPVSTWGLTPLAGADPEIYDLLEREKRRQRRGIELIASENFTSFAVMEALGSALTNKYSEGMPGARYYGGNDVIDEIENLCRSRALAAFHLDAASWGVNVQPYSGSPANFAAYTALLNPHDRIMGLDLPSGGHLTHGYYTAGGKKISATSIYFESLPYKVSAATGYIDYEKLEEKALDFRPKLIICGGSAYPRDWDYARLRAVADKVGALLLCDMAHISGLVAAQEAANPFEYCDVVTTTTHKSLRGPRAGMIFYRKGPKPPKKGQPEGAVYDYEDKINFAVFPSLQGGPHNHQIAALAVALQQTMSPGFKAYAKQVKANAVAIGNYLMSKGYKMVTDGTENHLVLWDLRPLGLTGNKVEKLCDLCHITLNKNAVFGDSSALSPGGVRIGAPAMTSRGLLEKDFEQIGEFLHQAVTICLNIQKEYGKLLKDFNKGLVNNKDIENLKVQVEKFADSFDMPGFTLESMKYKE

SEQ ID NO: 12334 - protein, 424 aa, Zea mays subsp. mays
  peptide (1)..(424): Ceres Seq. ID no. 12374207
  misc_feature (1)..(365): Pfam Name: Serine hydroxymethyltransferase Pfam Description: Serine hydroxymethyltransferase
  misc_feature (1)..(424): Homolog of NCBI NO: 15236375 NR Description: hydroxymethyltransferase; protein id: supported by cDNA: 29662., supported by cDNA: gi_13358183, by cDNA: gi_13605526, supported by cDNA: gi_20334773 [Arabidopsis
  misc_feature (1)..(424): Homolog of NCBI NO: 21592544 NR Description: hydroxymethyltransferase [Arabidopsis thaliana]
  misc_feature (1)..(424): Homolog of NCBI NO: 11762130 NR Description: AT4g13930 [Arabidopsis thaliana]
  misc_feature (1)..(421): Homolog of NCBI NO: 15236371 NR Description: glycine hydroxymethyltransferase - like protein; id: At4g13890.1 [Arabidopsis thaliana] >gi|7433549|pir||T05258
  misc_feature (1)..(413): Homolog of NCBI NO: 18400090 NR Description: putative hydroxymethyltransferase; protein id: supported by cDNA: 122515. [Arabidopsis thaliana]
  misc_feature (1)..(413): Homolog of NCBI NO: 25286207 NR Description: probable hydroxymethyltransferase, 49598-47322 - Arabidopsis thaliana >gi|12324475|gb|AAG52195.1|AC021199_1
  misc_feature (1)..(413): Homolog of NCBI NO: 21537165 NR Description: putative hydroxymethyltransferase [Arabidopsis
  misc_feature (1)..(417): Homolog of NCBI NO: 15219182 NR Description: glycine hydroxymethyltransferase, putative; id: At1g22020.1 [Arabidopsis thaliana] F2E2.7 [Arabidopsis thaliana] >gi|21928157|gb|AAM78106.1|
  misc_feature (1)..(423): Homolog of NCBI NO: 17066746 NR Description: serine hydroxymethyltransferase [Chlamydomonas
  misc_feature (1)..(424): Homolog of NCBI NO: 462187 NR Description: SERINE HYDROXYMETHYLTRANSFERASE, MITOCHONDRIAL
MEALGSALTNKYSEGMPGARYYGGNDVIDEIENLCRSRALAAFHLDAASWGVNVQPYSGSPANFAAYTALLNPHDRIMGLDLPSGGHLTHGYYTAGGKKISATSIYFESLPYKVSAATGYIDYEKLEEKALDFRPKLIICGGSAYPRDWDYARLRAVADKVGALLLCDMAHISGLVAAQEAANPFEYCDVVTTTTHKSLRGPRAGMIFYRKGPKPPKKGQPEGAVYDYEDKINFAVFPSLQGGPHNHQIAALAVALQQTMSPGFKAYAKQVKANAVAIGNYLMSKGYKMVTDGTENHLVLWDLRPLGLTGNKVEKLCDLCHITLNKNAVFGDSSALSPGGVRIGAPAMTSRGLLEKDFEQIGEFLHQAVTICLNIQKEYGKLLKDFNKGLVNNKDIENLKVQVEKFADSFDMPGFTLESMKYKE

SEQ ID NO: 12335 - DNA, 1381 bp, Zea mays subsp. mays
  misc_feature (1)..(1381): Ceres Seq. ID no. 12351768
  misc_feature: MA Experiment ID: 20000534 Result: Down-regulated in Transcription
  misc_feature: MA Experiment 20000534 PARAMETER Experiment Name: Zm_Hybrid_Pollen_P Parameter: Age (day) Value: 8
  misc_feature: MA Experiment 20000534 PARAMETER Experiment Name: Zm_Hybrid_Pollen_P Parameter: Organism Value: Zea mays
  misc_feature: MA Experiment 20000534 PARAMETER Experiment Name: Zm_Hybrid_Pollen_P Parameter: Plant Line Value: 35A19
  misc_feature: MA Experiment 20000534 PARAMETER Experiment Name: Zm_Hybrid_Pollen_P Parameter: Tissue Value: Pollen vs. Aerial
aaaaaacctctaccttctatgagccaagtaaagagagaagccgataaactgtgtttcacgtcccggcgatgagcccccgtgtggtcctcctcttcctcgccgccctccgcccctgcgccgccctcgtccgccttcactccaccactttttccttcactttccttgacgccccagcgcgctttggcccccgagtgagcggcgatgggatctgcggctccctgcgtgccgctgacccggccgaggcgtgtgagaccatcaaagaccgcggcggccgccgcggcgcgggcaggaaggctttcgtgctgatcgcgaggggcaactgcagctttgaggagaaggtgcgggcggcgcagcaagcggggttcgacgcctccatcgtgtacgacgatgaggagaaggccagcctttactccatggttggtgaatctgatggcatacacatacctgcgatatttgtttccaagatggctggtgaaacactaaagaagtttgccaggggtgaagatgaagagtgctgtattaactcgtcgatggatgagactgcagggacagtgttggtaatgtcatttgtgtcacttgttgtcatcatgtcagttcttgcttcttttctatttgctcgaaactgccgacttctacgccatggagttgataatcacccaccttacgtcaagaaacaagtggtggaaaagtttccctgctcagcgtacagtgctccctgttctagtgaagataatttccaggaagcttgtgcaatttgcttagaagactacaataatggtgatatgcttagacatctcccatgcaagcatgaatttcacaagatctgtattgattcttggctcacaaaatggggcatcttctgccctatatgcaagctagaagtaacattgggcgggtaggcacacttcattactgcatccaagtgctggcagttctattgaagattgttgatcttttgatccattgcgaggttcaatattcattttaatgattgatctttgagaatgaagtacagatctcagttcctcaggttgggccttgtagtgtgctactagactactgcgttcaggttaatatttcgatcatctgtttgatatccttgtttggtgtgtggaagagctcaaggagctctgctgctgataaatgtcagcacttctgttgcagtgtattgccctgtattcctagagaaattaggtgttgtgtgcaagcaaagtgtaatcgtaagtccaatgtaaaccccttttataccaggttacgttaccttgctcattttattttgtgggcacagataaatgctcgttaattaggcaggggttgatcttactctaaaaaattgtcctaaggctcagaaataacgatgtttgaagatgcatttgttgcg

SEQ ID NO: 12336 - protein, 276 aa, Zea mays subsp. mays
  peptide (1)..(276): Ceres Seq. ID no. 12351769
  misc_feature (42)..(142): Pfam Name: PA domain Pfam Description: PA domain
  misc_feature (1)..(269): Homolog of NCBI NO: 22330577 NR Description: unknown protein; protein id: At1g71980.1, by cDNA: gi_17529199 [Arabidopsis thaliana] unknown protein [Arabidopsis thaliana]
  misc_feature (9)..(272): Homolog of NCBI NO: 15239276 NR Description: ReMembR-H2 protein JR700 (gb|AAF32325.1); protein At5g66160.1, supported by cDNA: gi_14334831, supported by cDNA:
  misc_feature (28)..(269): Homolog of NCBI NO: 25406132 NR Description: unknown protein F17M19.13 [imported] -
  misc_feature (6)..(275): Homolog of NCBI NO: 38637053 NR Description: putative ReMembR-H2 protein [Oryza sativa
  misc_feature (5)..(269): Homolog of NCBI NO: 6942149 NR Description: ReMembR-H2 protein JR702 [Arabidopsis thaliana]
  misc_feature (17)..(275): Homolog of NCBI NO: 19071633 NR Description: putative integral membrane protein [Oryza sativa
  misc_feature (6)..(269): Homolog of NCBI NO: 15219930 NR Description: putative RING zinc finger protein; protein id:
  misc_feature (6)..(269): Homolog of NCBI NO: 15219670 NR Description: integral membrane protein, putative; protein id:
  misc_feature (40)..(269): Homolog of NCBI NO: 15219668 NR Description: integral membrane protein, putative; protein id:
  misc_feature (6)..(269): Homolog of NCBI NO: 25403460 NR Description: protein F15O4.19 [imported] - Arabidopsis >gi|8778343|gb|AAF79351.1|AC007887_10 F15O4.19 [Arabidopsis
MSPRVVLLFLAALRPCAALVRLHSTTFSFTFLDAPARFGPRVSGDGICGSLRAADPAEACETIKDRGGRRGAGRKAFVLIARGNCSFEEKVRAAQQAGFDASIVYDDEEKASLYSMVGESDGIHIPAIFVSKMAGETLKKFARGEDEECCINSSMDETAGTVLVMSFVSLVVIMSVLASFLFARNCRLLRHGVDNHPPYVKKQVVEKFPCSAYSAPCSSEDNFQEACAICLEDYNNGDMLRHLPCKHEFHKICIDSWLTKWGIFCPICKLEVTLGG

SEQ ID NO: 12337 - protein, 161 aa, Zea mays subsp. mays
  peptide (1)..(161): Ceres Seq. ID no. 12351770
  misc_feature (112)..(153): Pfam Name: Zinc finger, C3HC4 type (RING finger) Pfam Description: Zinc finger, C3HC4 type (RING finger)
  misc_feature (1)..(154): Homolog of NCBI NO: 22330577 NR Description: unknown protein; protein id: At1g71980.1, by cDNA: gi_17529199 [Arabidopsis thaliana] unknown protein [Arabidopsis thaliana]
  misc_feature (1)..(157): Homolog of NCBI NO: 15239276 NR Description: ReMembR-H2 protein JR700 (gb|AAF32325.1); protein At5g66160.1, supported by cDNA: gi_14334831, supported by cDNA:
  misc_feature (1)..(154): Homolog of NCBI NO: 25406132 NR Description: unknown protein F17M19.13 [imported] -
  misc_feature (1)..(160): Homolog of NCBI NO: 38637053 NR Description: putative ReMembR-H2 protein [Oryza sativa
  misc_feature (1)..(154): Homolog of NCBI NO: 6942149 NR Description: ReMembR-H2 protein JR702 [Arabidopsis thaliana]
  misc_feature (1)..(160): Homolog of NCBI NO: 19071633 NR Description: putative integral membrane protein [Oryza sativa
  misc_feature (1)..(154): Homolog of NCBI NO: 15219930 NR Description: putative RING zinc finger protein; protein id:
  misc_feature (1)..(154): Homolog of NCBI NO: 15219670 NR Description: integral membrane protein, putative; protein id:
  misc_feature (1)..(154): Homolog of NCBI NO: 15219668 NR Description: integral membrane protein, putative; protein id:
  misc_feature (1)..(154): Homolog of NCBI NO: 25403460 NR Description: protein F15O4.19 [imported] - Arabidopsis >gi|8778343|gb|AAF79351.1|AC007887_10 F15O4.19 [Arabidopsis
MVGESDGIHIPAIFVSKMAGETLKKFARGEDEECCINSSMDETAGTVLVMSFVSLVVIMSVLASFLFARNCRLLRHGVDNHPPYVKKQVVEKFPCSAYSAPCSSEDNFQEACAICLEDYNNGDMLRHLPCKHEFHKICIDSWLTKWGIFCPICKLEVTLGG

SEQ ID NO: 12338 - protein, 144 aa, Zea mays subsp. mays
  peptide (1)..(144): Ceres Seq. ID no. 12351771
  misc_feature (95)..(136): Pfam Name: Zinc finger, C3HC4 type (RING finger) Pfam Description: Zinc finger, C3HC4 type (RING finger)
  misc_feature (1)..(137): Homolog of NCBI NO: 22330577 NR Description: unknown protein; protein id: At1g71980.1, by cDNA: gi_17529199 [Arabidopsis thaliana] unknown protein [Arabidopsis thaliana]
  misc_feature (1)..(140): Homolog of NCBI NO: 15239276 NR Description: ReMembR-H2 protein JR700 (gb|AAF32325.1); protein At5g66160.1, supported by cDNA: gi_14334831, supported by cDNA:
  misc_feature (1)..(137): Homolog of NCBI NO: 25406132 NR Description: unknown protein F17M19.13 [imported] -
  misc_feature (1)..(143): Homolog of NCBI NO: 38637053 NR Description: putative ReMembR-H2 protein [Oryza sativa
  misc_feature (1)..(137): Homolog of NCBI NO: 6942149 NR Description: ReMembR-H2 protein JR702 [Arabidopsis thaliana]
  misc_feature (1)..(143): Homolog of NCBI NO: 19071633 NR Description: putative integral membrane protein [Oryza sativa
  misc_feature (1)..(137): Homolog of NCBI NO: 15219930 NR Description: putative RING zinc finger protein; protein id:
  misc_feature (1)..(137): Homolog of NCBI NO: 15219670 NR Description: integral membrane protein, putative; protein id:
  misc_feature (1)..(137): Homolog of NCBI NO: 15219668 NR Description: integral membrane protein, putative; protein id:
  misc_feature (1)..(137): Homolog of NCBI NO: 25403460 NR Description: protein F15O4.19 [imported] - Arabidopsis >gi|8778343|gb|AAF79351.1|AC007887_10 F15O4.19 [Arabidopsis
MAGETLKKFARGEDEECCINSSMDETAGTVLVMSFVSLVVIMSVLASFLFARNCRLLRHGVDNHPPYVKKQVVEKFPCSAYSAPCSSEDNFQEACAICLEDYNNGDMLRHLPCKHEFHKICIDSWLTKWGIFCPICKLEVTLGG

SEQ ID NO: 12339 - DNA, 1362 bp, Zea mays subsp. mays
  misc_feature (1)..(1362): Ceres Seq. ID no. 12342370
  misc_feature: MA Experiment ID: 108529 Result: Up-regulated in Transcription
  misc_feature: MA Experiment 108529 PARAMETER Experiment Name: Zm_Imbibed_Seeds_P Parameter: Age (day) Value: 5 vs. 2
  misc_feature: MA Experiment 108529 PARAMETER Experiment Name: Zm_Imbibed_Seeds_P Parameter: Organism Value: Zea mays
  misc_feature: MA Experiment 108529 PARAMETER Experiment Name: Zm_Imbibed_Seeds_P Parameter: Plant Line Value: 35A19
  misc_feature: MA Experiment 108529 PARAMETER Experiment Name: Zm_Imbibed_Seeds_P Parameter: Tissue Value: Roots vs. Embryo
  misc_feature: MA Experiment ID: 108535 Result: Down-regulated in Transcription
  misc_feature: MA Experiment 108535 PARAMETER Experiment Name: Zm_Meristem_P Parameter: Age (day) Value: 8
  misc_feature: MA Experiment 108535 PARAMETER Experiment Name: Zm_Meristem_P Parameter: Organism Value: Zea mays
  misc_feature: MA Experiment 108535 PARAMETER Experiment Name: Zm_Meristem_P Parameter: Plant Line Value: 35A19
  misc_feature: MA Experiment 108535 PARAMETER Experiment Name: Zm_Meristem_P Parameter: Tissue Value: Root Meristem vs. Above Root Meristem
  misc_feature: MA Experiment ID: 108544 Result: Up-regulated in Transcription
  misc_feature: MA Experiment ID: 20000108 Result: Down-regulated in Transcription
  misc_feature: MA Experiment 20000108 PARAMETER Experiment Name: Zm_Root-Tips_P Parameter: Age (day) Value: 12
  misc_feature: MA Experiment 20000108 PARAMETER Experiment Name: Zm_Root-Tips_P Parameter: Organism Value: Zea mays
  misc_feature: MA Experiment 20000108 PARAMETER Experiment Name: Zm_Root-Tips_P Parameter: Tissue Value: Root tips vs. Root mid region    35
  misc_feature: MA Experiment 20000108 PARAMETER Experiment Name: Zm_Root-Tips_P Parameter: Tissue Value: Root tips vs. Root mid region   Sequence Listing-Misc Features (4)
ctacctttcatatactaccagggtgaacatttctgaagaggatgttttatattggaattccaaaggttttcttccatcactaagcatagatcaaatccgcgatgtagcacgtgtatttgtaaatgggaagcttgcaggtagtaaagttggtcattgggtctcactgaatcaaccgcttcaattagttcaaggacttaatgagttgacattgttatcggagattgttggcttgcagaactatggtgctttcttggagaaggatggtgctggatttagaggtcaagtaaaactcactggcttgtcgaatggggatatcgaccttactaattctctttggacatatcagattggtttgaaaggtgagttttcaaggatctattctcctgagtatcaaggatctgctgagtggagtagcatgcagaatgatgacacagtttcacccttcacatggttcaagactatgtttgatgctccagaaggtaatggccctgttgccattgatcttgggagcatgggaaagggccaggcttgggtgaatgggcatctcattgggcgctattggtcactagttgcgccagagtccgggtgtccatcgtcatgcaactacgcaggaacatacagtgatagcaagtgccgatcgaactgtggaatcgctacacaaagctggtaccacataccacgcgaatggttgcaagagtcaggcaatttattggtactcttcgaggaaacagggggagacccatctcagatatcgctggaggttcattacaccaagacaatctgctcaaaaatatctgagacttactatcctcccctttctgcctggtcacgtgccgccaacggtcgcccctcagtaaatacggtagcaccagagcttcgcttgcagtgcgatgacgggcatgtgatctcgaagattacatttgcgagttacgggacccctacaggaggttgccagaacttctctgtagggaattgccatgcatcgactactctagacttggtggtagaggcctgcgaaggcaagaacagatgcgcgatcagtgttaccaacgaagtattcggagatccatgccgcaaagtcgtcaaggatttggcagttgaagccgagtgctccccgccatcggttaaccaagaacctcgatacgatatatgatcacggtactgtattgtggtgctcaggtcttggaagagctatggtggacgttgccgcagctttgcagggccgtgcacaatggtcctgcatcgttgtctcctatacctctgcacccatattgtatgtaaacagtgacctacatgtaaaaactaaagaagaggagggattgaaaagaaatgagatggaaaaagaataaagttgcttttgct

SEQ ID NO: 12340 - protein, 383 aa, Zea mays subsp. mays
  peptide (1)..(383): Ceres Seq. ID no. 12342371
  misc_feature (1)..(253): Pfam Name: Glycosyl hydrolases family 35 Pfam Description: Glycosyl hydrolases family 35
  misc_feature (1)..(373): Homolog of NCBI NO: 7939617 NR Description: beta-galactosidase [Lycopersicon esculentum]
  misc_feature (1)..(372): Homolog of NCBI NO: 7488064 NR Description: probable beta-galactosidase (EC 3.2.1.23) F24L7.5
  misc_feature (1)..(372): Homolog of NCBI NO: 14517399 NR Description: At2g32810/F24L7.5 [Arabidopsis thaliana]
  misc_feature (1)..(372): Homolog of NCBI NO: 18403090 NR Description: glycosyl hydrolase family 35 protein id: At2g32810.1 [Arabidopsis thaliana]
  misc_feature (22)..(370): Homolog of NCBI NO: 14970841 NR Description: beta-galactosidase [Fragaria x ananassa]
  misc_feature (1)..(371): Homolog of NCBI NO: 6686888 NR Description: putative beta-galactosidase [Arabidopsis thaliana]
  misc_feature (1)..(371): Homolog of NCBI NO: 25326167 NR Description: probable beta-galactosidase [imported] -
  misc_feature (1)..(371): Homolog of NCBI NO: 30683905 NR Description: glycosyl hydrolase family 35 (beta-galactosidase)
  misc_feature (1)..(371): Homolog of NCBI NO: 7939623 NR Description: putative beta-galactosidase [Lycopersicon
  misc_feature (1)..(372): Homolog of NCBI NO: 18419821 NR Description: glycosyl hydrolase family 35 protein id: At4g36360.1, supported by cDNA: gi_15810492,
YLSYTTRVNISEEDVLYWNSKGFLPSLSIDQIRDVARVFVNGKLAGSKVGHWVSLNQPLQLVQGLNELTLLSEIVGLQNYGAFLEKDGAGFRGQVKLTGLSNGDIDLTNSLWTYQIGLKGEFSRIYSPEYQGSAEWSSMQNDDTVSPFTWFKTMFDAPEGNGPVAIDLGSMGKGQAWVNGHLIGRYWSLVAPESGCPSSCNYAGTYSDSKCRSNCGIATQSWYHIPREWLQESGNLLVLFEETGGDPSQISLEVHYTKTICSKISETYYPPLSAWSRAANGRPSVNTVAPELRLQCDDGHVISKITFASYGTPTGGCQNFSVGNCHASTTLDLVVEACEGKNRCAISVTNEVFGDPCRKVVKDLAVEAECSPPSVNQEPRYDI

SEQ ID NO: 12341 - protein, 245 aa, Zea mays subsp. mays
  peptide (1)..(245): Ceres Seq. ID no. 12342372
  misc_feature (1)..(115): Pfam Name: Glycosyl hydrolases family 35 Pfam Description: Glycosyl hydrolases family 35
  misc_feature (1)..(235): Homolog of NCBI NO: 7939617 NR Description: beta-galactosidase [Lycopersicon esculentum]
  misc_feature (1)..(234): Homolog of NCBI NO: 7488064 NR Description: probable beta-galactosidase (EC 3.2.1.23) F24L7.5
  misc_feature (1)..(234): Homolog of NCBI NO: 18403090 NR Description: glycosyl hydrolase family 35 protein id: At2g32810.1 [Arabidopsis thaliana]
  misc_feature (1)..(234): Homolog of NCBI NO: 14517399 NR Description: At2g32810/F24L7.5 [Arabidopsis thaliana]
  misc_feature (1)..(232): Homolog of NCBI NO: 14970841 NR Description: beta-galactosidase [Fragaria x ananassa]
  misc_feature (1)..(233): Homolog of NCBI NO: 6686888 NR Description: putative beta-galactosidase [Arabidopsis thaliana]
  misc_feature (1)..(233): Homolog of NCBI NO: 30683905 NR Description: glycosyl hydrolase family 35 (beta-galactosidase)
  misc_feature (1)..(233): Homolog of NCBI NO: 25326167 NR Description: probable beta-galactosidase [imported] -
  misc_feature (1)..(233): Homolog of NCBI NO: 7939623 NR Description: putative beta-galactosidase [Lycopersicon
  misc_feature (1)..(234): Homolog of NCBI NO: 18419821 NR Description: glycosyl hydrolase family 35 protein id: At4g36360.1, supported by cDNA: gi_15810492,
MQNDDTVSPFTWFKTMFDAPEGNGPVAIDLGSMGKGQAWVNGHLIGRYWSLVAPESGCPSSCNYAGTYSDSKCRSNCGIATQSWYHIPREWLQESGNLLVLFEETGGDPSQISLEVHYTKTICSKISETYYPPLSAWSRAANGRPSVNTVAPELRLQCDDGHVISKITFASYGTPTGGCQNFSVGNCHASTTLDLVVEACEGKNRCAISVTNEVFGDPCRKVVKDLAVEAECSPPSVNQEPRYDI

SEQ ID NO: 12342 - protein, 230 aa, Zea mays subsp. mays
  peptide (1)..(230): Ceres Seq. ID no. 12342373
  misc_feature (1)..(100): Pfam Name: Glycosyl hydrolases family 35 Pfam Description: Glycosyl hydrolases family 35
  misc_feature (1)..(220): Homolog of NCBI NO: 7939617 NR Description: beta-galactosidase [Lycopersicon esculentum]
  misc_feature (1)..(219): Homolog of NCBI NO: 7488064 NR Description: probable beta-galactosidase (EC 3.2.1.23) F24L7.5
  misc_feature (1)..(219): Homolog of NCBI NO: 18403090 NR Description: glycosyl hydrolase family 35 protein id: At2g32810.1 [Arabidopsis thaliana]
  misc_feature (1)..(219): Homolog of NCBI NO: 14517399 NR Description: At2g32810/F24L7.5 [Arabidopsis thaliana]
  misc_feature (1)..(217): Homolog of NCBI NO: 14970841 NR Description: beta-galactosidase [Fragaria x ananassa]
  misc_feature (1)..(218): Homolog of NCBI NO: 6686888 NR Description: putative beta-galactosidase [Arabidopsis thaliana]
  misc_feature (1)..(218): Homolog of NCBI NO: 25326167 NR Description: probable beta-galactosidase [imported] -
  misc_feature (1)..(218): Homolog of NCBI NO: 30683905 NR Description: glycosyl hydrolase family 35 (beta-galactosidase)
  misc_feature (1)..(218): Homolog of NCBI NO: 7939623 NR Description: putative beta-galactosidase [Lycopersicon
  misc_feature (1)..(219): Homolog of NCBI NO: 18419821 NR Description: glycosyl hydrolase family 35 protein id: At4g36360.1, supported by cDNA: gi_15810492,
MFDAPEGNGPVAIDLGSMGKGQAWVNGHLIGRYWSLVAPESGCPSSCNYAGTYSDSKCRSNCGIATQSWYHIPREWLQESGNLLVLFEETGGDPSQISLEVHYTKTICSKISETYYPPLSAWSRAANGRPSVNTVAPELRLQCDDGHVISKITFASYGTPTGGCQNFSVGNCHASTTLDLVVEACEGKNRCAISVTNEVFGDPCRKVVKDLAVEAECSPPSVNQEPRYDI

SEQ ID NO: 12343 - DNA, 2068 bp, Zea mays subsp. mays
  misc_feature (1)..(2068): Ceres Seq. ID no. 12342374
aacaatccagttctcctttcgccggaatctgtccctcctccccctcctccccgcctctgcgggtactggaccaccgtggagcgggcattcatccaggctaggtccattccttcctttgctcgtaagtgaccctgatttttgctctacgagtttgtttcgtgctccattgaatctaaatcccactccgcatttgcggattcatgccctactactattacaacccctttcatccatccattcctcgactaggttctcttctccatcgcggaagctccacccgagttgacgccagaagagaatcggtgccctagggtgttctcgcagaattattttccagaagatttgcagatcgagtcgaaccctatgccccacgttaagcctgccgccggcctgcccccttaccaccaccgggcgctccctggccccgggcagggtccagttcccacgggacatgggatgatgcaccgggaggtccgtgatcagtacgggcccgctggggccgaggatgcacctaccaccgctggggcacgggcccgctccgttcccctacgacatgctgcctccgctgcccccaccggaggtcctggagcagaagcttgtggcacagcacggggagatgcagaagctggttatagagaacggccggcttgctgcaagccacgcctcgctgaggaaagagctagccgcggcgcagcaggagctgcagaggctgcaggcgcagggggaggccgcgaaagccgctgaggaggaggagatgaggggcctccttgacaaggttgggaagatggaggccgacctgaaggcccgtgagtccgtgaaggtggagctgcagcaggctcatgctgaggcgcagagccttgtggccatgaggcagaacatggtggcagacgtgcagaagctgagcaaggacctgcagaggaacctcggtgaggcacagcagctccccgcgctcttggctgaacgggatgttgcaaggcaagaaaatcagcatctcaggagtacttatgattacgaaaggaaactcagggtggatcactctgaatctttgcagacgatgaagaggaattatgactccatggttacggagcttgaaaaacttcgtgctgagttgagggacacatctaatcttgacaaaagtggttttttctacaatagcaccacccaaaaggccgatggtatatctagccatctttctgttggacaaattgcttatgatactggctatggaagtacacaggcaagggcaactcctaccggtctggcagacttaagtggagtccctggaggcgctggccttcgttctggattcgacccatcaagaggcaatgcatacgatggctctcatgttgccaatttcagctcttcaaaaactaggacccatgatgcatcaaggggtgccactggctttgactctctcaagggttctgggtatgatgcttcaaaggcgcatgtaactggacaggcgtcagctacagcggctcatgggggcattgctggttactacgggtccaatcaggcagcacatgcgtggggacaatctgcatcgccctacggatctgtacaggtgccaccatcctacgcatctgggtcaaacacatcctatggcgcagcagcagcagcagcagtgcgtccctatggttcagctcaggcgcaaccatcatatggacaaacgcaggcaccatctgcgtatgggcacacacagctaccatcatcctacagtctagcacaggcgcagtctcccttcaccgctgcgcaggggtcctcgccctatgggttggctgcgcagcctccagcctatggatctgggcgagcaggctccaatgctggcagttacgaagctcctcaaggacgtaaataagttcgcgccaaatttgcatacttggccacttgcgaaagagagctttgttacaccgagtccaaatcctttctgttgctacttaaaccttgtttaactgtgatgtcagaggaacctgttacagccgataaaacgattctctgtaaacgtattatcgtgaccgatgatgccgatgcatttttttgttcagtagagtaggccatttgggaacgc

SEQ ID NO: 12344 - protein, 450 aa, Zea mays subsp. mays
  peptide (1)..(450): Ceres Seq. ID no. 12342375
  misc_feature (1)..(245): Homolog of NCBI NO: 18400511 NR Description: expressed protein; protein id: At3g14750.1, by cDNA: gi_14334819, supported by cDNA: gi_15293200 [Arabidopsis >gi|14334820|gb|AAK59588.1| unknown protein [Arabidopsis
  misc_feature (1)..(291): Homolog of NCBI NO: 28876008 NR Description: hypothetical protein [Oryza sativa (japonica
  misc_feature (1)..(212): Homolog of NCBI NO: 33146484 NR Description: myosin-like protein [Oryza sativa (japonica
  misc_feature (9)..(246): Homolog of NCBI NO: 38175471 NR Description: myosin-like protein [Oryza sativa (japonica
  misc_feature (69)..(450): Homolog of NCBI NO: 5441873 NR Description: hypothetical protein [Oryza sativa (japonica
  misc_feature (1)..(401): Homolog of NCBI NO: 5441873 NR Description: hypothetical protein [Oryza sativa (japonica
  misc_feature (1)..(241): Homolog of NCBI NO: 25404669 NR Description: hypothetical protein F5A8.8 [imported] - thaliana >gi|4204281|gb|AAD10662.1| Hypothetical protein
  misc_feature (1)..(241): Homolog of NCBI NO: 30697468 NR Description: expressed protein [Arabidopsis thaliana]
  misc_feature (25)..(395): Homolog of NCBI NO: 38605778 NR Description: OSJNBa0044K18.21 [Oryza sativa (japonica
  misc_feature (1)..(245): Homolog of NCBI NO: 9294396 NR Description: gb|AAD10662.1~gene_id:MIE1.26~similar to unknown
MHLPPLGHGPAPFPYDMLPPLPPPEVLEQKLVAQHGEMQKLVIENGRLAASHASLRKELAAAQQELQRLQAQGEAAKAAEEEEMRGLLDKVGKMEADLKARESVKVELQQAHAEAQSLVAMRQNMVADVQKLSKDLQRNLGEAQQLPALLAERDVARQENQHLRSTYDYERKLRVDHSESLQTMKRNYDSMVTELEKLRAELRDTSNLDKSGFFYNSTTQKADGISSHLSVGQIAYDTGYGSTQARATPTGLADLSGVPGGAGLRSGFDPSRGNAYDGSHVANFSSSKTRTHDASRGATGFDSLKGSGYDASKAHVTGQASATAAHGGIAGYYGSNQAAHAWGQSASPYGSVQVPPSYASGSNTSYGAAAAAAVRPYGSAQAQPSYGQTQAPSAYGHTQLPSSYSLAQAQSPFTAAQGSSPYGLAAQPPAYGSGRAGSNAGSYEAPQGRK

SEQ ID NO: 12345 - protein, 434 aa, Zea mays subsp. mays
  peptide (1)..(434): Ceres Seq. ID no. 12342376
  misc_feature (53)..(434): Homolog of NCBI NO: 5441873 NR Description: hypothetical protein [Oryza sativa (japonica
  misc_feature (1)..(385): Homolog of NCBI NO: 5441873 NR Description: hypothetical protein [Oryza sativa (japonica
  misc_feature (1)..(225): Homolog of NCBI NO: 25404669 NR Description: hypothetical protein F5A8.8 [imported] - thaliana >gi|4204281|gb|AAD10662.1| Hypothetical protein
  misc_feature (1)..(225): Homolog of NCBI NO: 30697468 NR Description: expressed protein [Arabidopsis thaliana]
  misc_feature (9)..(379): Homolog of NCBI NO: 38605778 NR Description: OSJNBa0044K18.21 [Oryza sativa (japonica
  misc_feature (1)..(229): Homolog of NCBI NO: 9294396 NR Description: gb|AAD10662.1~gene_id:MIE1.26~similar to unknown
  misc_feature (1)..(229): Homolog of NCBI NO: 18400511 NR Description: expressed protein; protein id: At3g14750.1, by cDNA: gi_14334819, supported by cDNA: gi_15293200 [Arabidopsis >gi|14334820|gb|AAK59588.1| unknown protein [Arabidopsis
  misc_feature (1)..(275): Homolog of NCBI NO: 28876008 NR Description: hypothetical protein [Oryza sativa (japonica
  misc_feature (1)..(196): Homolog of NCBI NO: 33146484 NR Description: myosin-like protein [Oryza sativa (japonica
  misc_feature (1)..(230): Homolog of NCBI NO: 38175471 NR Description: myosin-like protein [Oryza sativa (japonica
MLPPLPPPEVLEQKLVAQHGEMQKLVIENGRLAASHASLRKELAAAQQELQRLQAQGEAAKAAEEEEMRGLLDKVGKMEADLKARESVKVELQQAHAEAQSLVAMRQNMVADVQKLSKDLQRNLGEAQQLPALLAERDVARQENQHLRSTYDYERKLRVDHSESLQTMKRNYDSMVTELEKLRAELRDTSNLDKSGFFYNSTTQKADGISSHLSVGQIAYDTGYGSTQARATPTGLADLSGVPGGAGLRSGFDPSRGNAYDGSHVANFSSSKTRTHDASRGATGFDSLKGSGYDASKAHVTGQASATAAHGGIAGYYGSNQAAHAWGQSASPYGSVQVPPSYASGSNTSYGAAAAAAVRPYGSAQAQPSYGQTQAPSAYGHTQLPSSYSLAQAQSPFTAAQGSSPYGLAAQPPAYGSGRAGSNAGSYEAPQGRK

SEQ ID NO: 12346 - protein, 413 aa, Zea mays subsp. mays
  peptide (1)..(413): Ceres Seq. ID no. 12342377
  misc_feature (32)..(413): Homolog of NCBI NO: 5441873 NR Description: hypothetical protein [Oryza sativa (japonica
  misc_feature (1)..(364): Homolog of NCBI NO: 5441873 NR Description: hypothetical protein [Oryza sativa (japonica
  misc_feature (1)..(204): Homolog of NCBI NO: 25404669 NR Description: hypothetical protein F5A8.8 [imported] - thaliana >gi|4204281|gb|AAD10662.1| Hypothetical protein
  misc_feature (1)..(204): Homolog of NCBI NO: 30697468 NR Description: expressed protein [Arabidopsis thaliana]
  misc_feature (1)..(358): Homolog of NCBI NO: 38605778 NR Description: OSJNBa0044K18.21 [Oryza sativa (japonica
  misc_feature (1)..(208): Homolog of NCBI NO: 9294396 NR Description: gb|AAD10662.1~gene_id:MIE1.26~similar to unknown
  misc_feature (1)..(208): Homolog of NCBI NO: 18400511 NR Description: expressed protein; protein id: At3g14750.1, by cDNA: gi_14334819, supported by cDNA: gi_15293200 [Arabidopsis >gi|14334820|gb|AAK59588.1| unknown protein [Arabidopsis
  misc_feature (1)..(254): Homolog of NCBI NO: 28876008 NR Description: hypothetical protein [Oryza sativa (japonica
  misc_feature (1)..(175): Homolog of NCBI NO: 33146484 NR Description: myosin-like protein [Oryza sativa (japonica
  misc_feature (1)..(209): Homolog of NCBI NO: 38175471 NR Description: myosin-like protein [Oryza sativa (japonica
MQKLVIENGRLAASHASLRKELAAAQQELQRLQAQGEAAKAAEEEEMRGLLDKVGKMEADLKARESVKVELQQAHAEAQSLVAMRQNMVADVQKLSKDLQRNLGEAQQLPALLAERDVARQENQHLRSTYDYERKLRVDHSESLQTMKRNYDSMVTELEKLRAELRDTSNLDKSGFFYNSTTQKADGISSHLSVGQIAYDTGYGSTQARATPTGLADLSGVPGGAGLRSGFDPSRGNAYDGSHVANFSSSKTRTHDASRGATGFDSLKGSGYDASKAHVTGQASATAAHGGIAGYYGSNQAAHAWGQSASPYGSVQVPPSYASGSNTSYGAAAAAAVRPYGSAQAQPSYGQTQAPSAYGHTQLPSSYSLAQAQSPFTAAQGSSPYGLAAQPPAYGSGRAGSNAGSYEAPQGRK

SEQ ID NO: 12347 - DNA, 1288 bp, Zea mays subsp. mays
  misc_feature (1)..(1288): Ceres Seq. ID no. 12353469
  misc_feature: MA Experiment ID: 108522 Result: Up-regulated in Transcription
  misc_feature: MA Experiment 108522 PARAMETER Experiment Name: Zm_42deg_Heat_P Parameter: Age (day) Value: 8
  misc_feature: MA Experiment 108522 PARAMETER Experiment Name: Zm_42deg_Heat_P Parameter: Organism Value: Zea mays
  misc_feature: MA Experiment 108522 PARAMETER Experiment Name: Zm_42deg_Heat_P Parameter: Plant Line Value: 35A19
  misc_feature: MA Experiment 108522 PARAMETER Experiment Name: Zm_42deg_Heat_P Parameter: Temperature (deg C) Value: 42 vs. 22
  misc_feature: MA Experiment 108522 PARAMETER Experiment Name: Zm_42deg_Heat_P Parameter: Timepoint (hr) Value: 1
  misc_feature: MA Experiment 108522 PARAMETER Experiment Name: Zm_42deg_Heat_P Parameter: Tissue Value: Aerial
  misc_feature: MA Experiment ID: 108523 Result: Up-regulated in Transcription
  misc_feature: MA Experiment 108523 PARAMETER Experiment Name: Zm_42deg_Heat_P Parameter: Age (day) Value: 8
  misc_feature: MA Experiment 108523 PARAMETER Experiment Name: Zm_42deg_Heat_P Parameter: Organism Value: Zea mays
  misc_feature: MA Experiment 108523 PARAMETER Experiment Name: Zm_42deg_Heat_P Parameter: Plant Line Value: 35A19
  misc_feature: MA Experiment 108523 PARAMETER Experiment Name: Zm_42deg_Heat_P Parameter: Temperature (deg C) Value: 42 vs. 22
  misc_feature: MA Experiment 108523 PARAMETER Experiment Name: Zm_42deg_Heat_P Parameter: Timepoint (hr) Value: 6
  misc_feature: MA Experiment 108523 PARAMETER Experiment Name: Zm_42deg_Heat_P Parameter: Tissue Value: Aerial
  misc_feature: MA Experiment ID: 108527 Result: Up-regulated in Transcription
  misc_feature: MA Experiment 108527 PARAMETER Experiment Name: Zm_5mM_NO_P Parameter: Age (day) Value: 8
  misc_feature: MA Experiment 108527 PARAMETER Experiment Name: Zm_5mM_NO_P Parameter: Organism Value: Zea mays
  misc_feature: MA Experiment 108527 PARAMETER Experiment Name: Zm_5mM_NO_P Parameter: Plant Line Value: 35A19
  misc_feature: MA Experiment 108527 PARAMETER Experiment Name: Zm_5mM_NO_P Parameter: Timepoint (hr) Value: 6
  misc_feature: MA Experiment 108527 PARAMETER Experiment Name: Zm_5mM_NO_P Parameter: Tissue Value: Aerial
  misc_feature: MA Experiment 108527 PARAMETER Experiment Name: Zm_5mM_NO_P Parameter: Treatment Value: 5mM NO vs. No Treatment
  misc_feature: MA Experiment ID: 108559 Result: Up-regulated in Transcription
  misc_feature: MA Experiment 108559 PARAMETER Experiment Name: Zm_5mM_NO_P Parameter: Age (day) Value: 8
  misc_feature: MA Experiment 108559 PARAMETER Experiment Name: Zm_5mM_NO_P Parameter: Organism Value: Zea mays
  misc_feature: MA Experiment 108559 PARAMETER Experiment Name: Zm_5mM_NO_P Parameter: Plant Line Value: 35A19
  misc_feature: MA Experiment 108559 PARAMETER Experiment Name: Zm_5mM_NO_P Parameter: Timepoint (hr) Value: 12
  misc_feature: MA Experiment 108559 PARAMETER Experiment Name: Zm_5mM_NO_P Parameter: Tissue Value: Aerial
  misc_feature: MA Experiment 108559 PARAMETER Experiment Name: Zm_5mM_NO_P Parameter: Treatment Value: 5mM NO vs. No Treatment
  misc_feature: MA Experiment ID: 108688 Result: Down-regulated in Transcription
  misc_feature: MA Experiment 108688 PARAMETER Experiment Name: Zm_Embryos-Flowers__P Parameter: Tissue Value: Immature Flowers vs. Aerial+
  misc_feature: MA Experiment ID: 108689 Result: Up-regulated in Transcription
  misc_feature: MA Experiment 108689 PARAMETER Experiment Name: Zm_Drought_Roots_P Parameter: Age (day) Value: 9
  misc_feature: MA Experiment 108689 PARAMETER Experiment Name: Zm_Drought_Roots_P Parameter: Organism Value: Zea mays
  misc_feature: MA Experiment 108689 PARAMETER Experiment Name: Zm_Drought_Roots_P Parameter: Plant Line Value: 35A19
  misc_feature: MA Experiment 108689 PARAMETER Experiment Name: Zm_Drought_Roots_P Parameter: Timepoint (hr) Value: 24
  misc_feature: MA Experiment 108689 PARAMETER Experiment Name: Zm_Drought_Roots_P Parameter: Tissue Value: Roots
  misc_feature: MA Experiment 108689 PARAMETER Experiment Name: Zm_Drought_Roots_P Parameter: Treatment Value: Drought vs. No Drought
  misc_feature: MA Experiment ID: 20000478 Result: Down-regulated in Transcription
  misc_feature: MA Experiment 20000478 PARAMETER Experiment Name: Zm_5mM_SA_P Parameter: Age (day) Value: 11
  misc_feature: MA Experiment 20000478 PARAMETER Experiment Name: Zm_5mM_SA_P Parameter: Organism Value: Zea mays
  misc_feature: MA Experiment 20000478 PARAMETER Experiment Name: Zm_5mM_SA_P Parameter: Plant Line Value: 35A19
  misc_feature: MA Experiment 20000478 PARAMETER Experiment Name: Zm_5mM_SA_P Parameter: Timepoint (hr) Value: 72
  misc_feature: MA Experiment 20000478 PARAMETER Experiment Name: Zm_5mM_SA_P Parameter: Tissue Value: Aerial
  misc_feature: MA Experiment 20000478 PARAMETER Experiment Name: Zm_5mM_SA_P Parameter: Treatment Value: 5mM SA vs. No Treatment
agccgcacaatccatccatccatctattctccagtccacccattccattccactaccgacgcccagaattcacgcgaacgcacacgcacccacacgacacatccagatgatgcttagggtttccccgtccccggccgccgcggtgccaacccagctctccggtgcgcccgcgacccctgctcccgtcgtcagggtggcggcgccgcgcggagtcgcctcgccgtccgctggcgccgcgtgcagggccgcgggcaaggggaaggaggtgctcagcggggtggtgttccagcccttcgaggagatcaagggggagctcgccctcgtgccccagtccccagacaagtcgctcgcgcgccacaagttcgtcgatgactgcgaggccgcactcaacgagcagatcaacgtggagtacaacgcctcgtatgcataccactccctcttcgcctatttcgaccgcgacaacgtggctctcaaaggatttgccaagttcttcaaggaatccagcgacgaggagagggagcacgctgaaaagctcatggagtaccagaacaaacgtggaggcagggtgaggctccaatcgattgtgacgcctttaaccgagtttgaccaccctgagaaaggagatgctctgtacgctatggagctggctctggccctggaaaagctggtcaatgaaaagctgcacaacctgcatggtgtggcaacaaggtgcaatgatcctcagctgacagacttcatcgagagtgagttcctcgaggagcagggtgaagccataaacaagatctccaagtatgtcgcccagctgaggagagtgggcaaggggcacggggtgtggcacttcgatcagatgctgcttgaggaagaggcctaaaaagaaggaacggacagatgaatgaaggaaacaagtgtgtaatgttgatcaggcggaggaataatgggtcaactgacaactctgggtcggtggatttgtagttggtttgggttttttagttgtagaacggtgttgcccccctcctagagagggatgaacacattatgcatgcgatgtgtcagttcggtcggtgctatgctcgttgggatttgattgtcggaaataaaacatgggtgatgaatgtgtaccctccctaatctatgtcttggtgatgaagttgagaaagctgcgggtgttgtaggtggatttgtagagttttttcttcagttggttaggttcgctgttgcctacctcatttgcccctcatcatcgccgtaatttatttatttataatataaaagatccagattttccccc

SEQ ID NO: 12348 - protein, 289 aa, Zea mays subsp. mays
  peptide (1)..(289): Ceres Seq. ID no. 12353470
  misc_feature (5)..(289): Homolog of NCBI NO: 82687 NR Description: ferritin 1 precursor (clone FM1) - maize
  misc_feature (36)..(289): Homolog of NCBI NO: 29840836 NR Description: Ferritin 1, chloroplast precursor (ZmFer1)
  misc_feature (36)..(289): Homolog of NCBI NO: 1103628 NR Description: ferritin [Zea mays]
  misc_feature (6)..(289): Homolog of NCBI NO: 82688 NR Description: ferritin 2 precursor (clone FM2) - maize
  misc_feature (36)..(289): Homolog of NCBI NO: 29840837 NR Description: Ferritin 2, chloroplast precursor (ZmFer2)
  misc_feature (36)..(289): Homolog of NCBI NO: 1103630 NR Description: ferritin [Zea mays]
  misc_feature (39)..(289): Homolog of NCBI NO: 21686526 NR Description: ferritin [Oryza sativa (japonica cultivar-group)]
  misc_feature (39)..(289): Homolog of NCBI NO: 21686528 NR Description: ferritin [Oryza sativa (japonica cultivar-group)]
  misc_feature (39)..(289): Homolog of NCBI NO: 14091661 NR Description: ferritin [Oryza sativa]
AAQSIHPSILQSTHSIPLPTPRIHANAHAPTRHIQMMLRVSPSPAAAVPTQLSGAPATPAPVVRVAAPRGVASPSAGAACRAAGKGKEVLSGVVFQPFEEIKGELALVPQSPDKSLARHKFVDDCEAALNEQINVEYNASYAYHSLFAYFDRDNVALKGFAKFFKESSDEEREHAEKLMEYQNKRGGRVRLQSIVTPLTEFDHPEKGDALYAMELALALEKLVNEKLHNLHGVATRCNDPQLTDFIESEFLEEQGEAINKISKYVAQLRRVGKGHGVWHFDQMLLEEEA

SEQ ID NO: 12349 - protein, 254 aa, Zea mays subsp. mays
  peptide (1)..(254): Ceres Seq. ID no. 12353471
  misc_feature (1)..(254): Homolog of NCBI NO: 82687 NR Description: ferritin 1 precursor (clone FM1) - maize
  misc_feature (1)..(254): Homolog of NCBI NO: 29840836 NR Description: Ferritin 1, chloroplast precursor (ZmFer1)
  misc_feature (1)..(254): Homolog of NCBI NO: 1103628 NR Description: ferritin [Zea mays]
  misc_feature (1)..(254): Homolog of NCBI NO: 82688 NR Description: ferritin 2 precursor (clone FM2) - maize
  misc_feature (1)..(254): Homolog of NCBI NO: 29840837 NR Description: Ferritin 2, chloroplast precursor (ZmFer2)
  misc_feature (1)..(254): Homolog of NCBI NO: 1103630 NR Description: ferritin [Zea mays]
  misc_feature (4)..(254): Homolog of NCBI NO: 21686526 NR Description: ferritin [Oryza sativa (japonica cultivar-group)]
  misc_feature (4)..(254): Homolog of NCBI NO: 21686528 NR Description: ferritin [Oryza sativa (japonica cultivar-group)]
  misc_feature (4)..(254): Homolog of NCBI NO: 14091661 NR Description: ferritin [Oryza sativa]
MMLRVSPSPAAAVPTQLSGAPATPAPVVRVAAPRGVASPSAGAACRAAGKGKEVLSGVVFQPFEEIKGELALVPQSPDKSLARHKFVDDCEAALNEQINVEYNASYAYHSLFAYFDRDNVALKGFAKFFKESSDEEREHAEKLMEYQNKRGGRVRLQSIVTPLTEFDHPEKGDALYAMELALALEKLVNEKLHNLHGVATRCNDPQLTDFIESEFLEEQGEAINKISKYVAQLRRVGKGHGVWHFDQMLLEEEA

SEQ ID NO: 12350 - protein, 253 aa, Zea mays subsp. mays
  peptide (1)..(253): Ceres Seq. ID no. 12353472
  misc_feature (1)..(253): Homolog of NCBI NO: 82687 NR Description: ferritin 1 precursor (clone FM1) - maize
  misc_feature (1)..(253): Homolog of NCBI NO: 29840836 NR Description: Ferritin 1, chloroplast precursor (ZmFer1)
  misc_feature (1)..(253): Homolog of NCBI NO: 1103628 NR Description: ferritin [Zea mays]
  misc_feature (1)..(253): Homolog of NCBI NO: 82688 NR Description: ferritin 2 precursor (clone FM2) - maize
  misc_feature (1)..(253): Homolog of NCBI NO: 29840837 NR Description: Ferritin 2, chloroplast precursor (ZmFer2)
  misc_feature (1)..(253): Homolog of NCBI NO: 1103630 NR Description: ferritin [Zea mays]
  misc_feature (3)..(253): Homolog of NCBI NO: 21686526 NR Description: ferritin [Oryza sativa (japonica cultivar-group)]
  misc_feature (3)..(253): Homolog of NCBI NO: 21686528 NR Description: ferritin [Oryza sativa (japonica cultivar-group)]
  misc_feature (3)..(253): Homolog of NCBI NO: 14091661 NR Description: ferritin [Oryza sativa]
MLRVSPSPAAAVPTQLSGAPATPAPVVRVAAPRGVASPSAGAACRAAGKGKEVLSGVVFQPFEEIKGELALVPQSPDKSLARHKFVDDCEAALNEQINVEYNASYAYHSLFAYFDRDNVALKGFAKFFKESSDEEREHAEKLMEYQNKRGGRVRLQSIVTPLTEFDHPEKGDALYAMELALALEKLVNEKLHNLHGVATRCNDPQLTDFIESEFLEEQGEAINKISKYVAQLRRVGKGHGVWHFDQMLLEEEA

SEQ ID NO: 12351 - DNA, 3391 bp, Zea mays subsp. mays
  misc_feature (1)..(3391): Ceres Seq. ID no. 12359662
  misc_feature: MA Experiment ID: 108522 Result: Down-regulated in Transcription
  misc_feature: MA Experiment 108522 PARAMETER Experiment Name: Zm_42deg_Heat_P Parameter: Age (day) Value: 8
  misc_feature: MA Experiment 108522 PARAMETER Experiment Name: Zm_42deg_Heat_P Parameter: Organism Value: Zea mays
  misc_feature: MA Experiment 108522 PARAMETER Experiment Name: Zm_42deg_Heat_P Parameter: Plant Line Value: 35A19
  misc_feature: MA Experiment 108522 PARAMETER Experiment Name: Zm_42deg_Heat_P Parameter: Temperature (deg C) Value: 42 vs. 22
  misc_feature: MA Experiment 108522 PARAMETER Experiment Name: Zm_42deg_Heat_P Parameter: Timepoint (hr) Value: 1
  misc_feature: MA Experiment 108522 PARAMETER Experiment Name: Zm_42deg_Heat_P Parameter: Tissue Value: Aerial
  misc_feature: MA Experiment ID: 108526 Result: Up-regulated in Transcription
  misc_feature: MA Experiment 108526 PARAMETER Experiment Name: Zm_5mM_NO_P Parameter: Age (day) Value: 8
  misc_feature: MA Experiment 108526 PARAMETER Experiment Name: Zm_5mM_NO_P Parameter: Organism Value: Zea mays
  misc_feature: MA Experiment 108526 PARAMETER Experiment Name: Zm_5mM_NO_P Parameter: Plant Line Value: 35A19
  misc_feature: MA Experiment 108526 PARAMETER Experiment Name: Zm_5mM_NO_P Parameter: Timepoint (hr) Value: 1
  misc_feature: MA Experiment 108526 PARAMETER Experiment Name: Zm_5mM_NO_P Parameter: Tissue Value: Aerial
  misc_feature: MA Experiment 108526 PARAMETER Experiment Name: Zm_5mM_NO_P Parameter: Treatment Value: 5mM NO vs. No Treatment
  misc_feature: MA Experiment ID: 108556 Result: Down-regulated in Transcription
  misc_feature: MA Experiment 108556 PARAMETER Experiment Name: Zm_Drought_P Parameter: Age (day) Value: 9
  misc_feature: MA Experiment 108556 PARAMETER Experiment Name: Zm_Drought_P Parameter: Organism Value: Zea mays
  misc_feature: MA Experiment 108556 PARAMETER Experiment Name: Zm_Drought_P Parameter: Plant Line Value: 35A19
  misc_feature: MA Experiment 108556 PARAMETER Experiment Name: Zm_Drought_P Parameter: Timepoint (hr) Value: 24
  misc_feature: MA Experiment 108556 PARAMETER Experiment Name: Zm_Drought_P Parameter: Tissue Value: Aerial
  misc_feature: MA Experiment 108556 PARAMETER Experiment Name: Zm_Drought_P Parameter: Treatment Value: Drought vs. No Drought
  misc_feature: MA Experiment ID: 108597 Result: Down-regulated in Transcription
  misc_feature: MA Experiment 108597 PARAMETER Experiment Name: Zm_100uM_ABA_P Parameter: Age (day) Value: 9
  misc_feature: MA Experiment 108597 PARAMETER Experiment Name: Zm_100uM_ABA_P Parameter: Organism Value: Zea mays
  misc_feature: MA Experiment 108597 PARAMETER Experiment Name: Zm_100uM_ABA_P Parameter: Plant Line Value: 35A19
  misc_feature: MA Experiment 108597 PARAMETER Experiment Name: Zm_100uM_ABA_P Parameter: Timepoint (hr) Value: 24
  misc_feature: MA Experiment 108597 PARAMETER Experiment Name: Zm_100uM_ABA_P Parameter: Tissue Value: Aerial
  misc_feature: MA Experiment 108597 PARAMETER Experiment Name: Zm_100uM_ABA_P Parameter: Treatment Value: 100uM ABA vs. No Treatment
  misc_feature: MA Experiment ID: 108687 Result: Down-regulated in Transcription
  misc_feature: MA Experiment 108687 PARAMETER Experiment Name: Zm_Embryos-Flowers__P Parameter: Tissue Value: Embryo vs. Aerial+
  misc_feature: MA Experiment ID: 108689 Result: Down-regulated in Transcription
  misc_feature: MA Experiment 108689 PARAMETER Experiment Name: Zm_Drought_Roots_P Parameter: Age (day) Value: 9
  misc_feature: MA Experiment 108689 PARAMETER Experiment Name: Zm_Drought_Roots_P Parameter: Organism Value: Zea mays
  misc_feature: MA Experiment 108689 PARAMETER Experiment Name: Zm_Drought_Roots_P Parameter: Plant Line Value: 35A19
  misc_feature: MA Experiment 108689 PARAMETER Experiment Name: Zm_Drought_Roots_P Parameter: Timepoint (hr) Value: 24
  misc_feature: MA Experiment 108689 PARAMETER Experiment Name: Zm_Drought_Roots_P Parameter: Tissue Value: Roots
  misc_feature: MA Experiment 108689 PARAMETER Experiment Name: Zm_Drought_Roots_P Parameter: Treatment Value: Drought vs. No Drought
  misc_feature: MA Experiment ID: 20000478 Result: Down-regulated in Transcription
  misc_feature: MA Experiment 20000478 PARAMETER Experiment Name: Zm_5mM_SA_P Parameter: Age (day) Value: 11
  misc_feature: MA Experiment 20000478 PARAMETER Experiment Name: Zm_5mM_SA_P Parameter: Organism Value: Zea mays
  misc_feature: MA Experiment 20000478 PARAMETER Experiment Name: Zm_5mM_SA_P Parameter: Plant Line Value: 35A19
  misc_feature: MA Experiment 20000478 PARAMETER Experiment Name: Zm_5mM_SA_P Parameter: Timepoint (hr) Value: 72
  misc_feature: MA Experiment 20000478 PARAMETER Experiment Name: Zm_5mM_SA_P Parameter: Tissue Value: Aerial
  misc_feature: MA Experiment 20000478 PARAMETER Experiment Name: Zm_5mM_SA_P Parameter: Treatment Value: 5mM SA vs. No Treatment
  misc_feature: MA Experiment ID: 20000480 Result: Down-regulated in Transcription
  misc_feature: MA Experiment 20000480 PARAMETER Experiment Name: Zm_Drought_P Parameter: Age (day) Value: 11
  misc_feature: MA Experiment 20000480 PARAMETER Experiment Name: Zm_Drought_P Parameter: Organism Value: Zea mays
  misc_feature: MA Experiment 20000480 PARAMETER Experiment Name: Zm_Drought_P Parameter: Plant Line Value: 35A19
  misc_feature: MA Experiment 20000480 PARAMETER Experiment Name: Zm_Drought_P Parameter: Timepoint (hr) Value: 72
  misc_feature: MA Experiment 20000480 PARAMETER Experiment Name: Zm_Drought_P Parameter: Tissue Value: Aerial
  misc_feature: MA Experiment 20000480 PARAMETER Experiment Name: Zm_Drought_P Parameter: Treatment Value: Drought vs. No Drought
  misc_feature: MA Experiment ID: 20000488 Result: Up-regulated in Transcription
  misc_feature: MA Experiment 20000488 PARAMETER Experiment Name: Zm_50mM_NH4NO3_L_to_H_P Parameter: Organism Value: Zea mays
  misc_feature: MA Experiment 20000488 PARAMETER Experiment Name: Zm_50mM_NH4NO3_L_to_H_P Parameter: Timepoint (hr) Value: 8
  misc_feature: MA Experiment 20000488 PARAMETER Experiment Name: Zm_50mM_NH4NO3_L_to_H_P Parameter: Tissue Value: Leaves
  misc_feature: MA Experiment 20000488 PARAMETER Experiment Name: Zm_50mM_NH4NO3_L_to_H_P Parameter: Treatment Value: 50mM NH4NO3 vs. 100mM Mannitol
  misc_feature: MA Experiment ID: 20000492 Result: Down-regulated in Transcription
  misc_feature: MA Experiment 20000492 PARAMETER Experiment Name: Zm_Hybrid_Seed_Dev_P Parameter: DAP Value: 12
  misc_feature: MA Experiment 20000492 PARAMETER Experiment Name: Zm_Hybrid_Seed_Dev_P Parameter: Organism Value: Zea mays
  misc_feature: MA Experiment 20000492 PARAMETER Experiment Name: Zm_Hybrid_Seed_Dev_P Parameter: Plant Line Value: 35A19
  misc_feature: MA Experiment 20000492 PARAMETER Experiment Name: Zm_Hybrid_Seed_Dev_P Parameter: Tissue Value: Fert Kernel vs. Unfert Floret
  misc_feature: MA Experiment ID: 20000535 Result: Down-regulated in Transcription
  misc_feature: MA Experiment 20000535 PARAMETER Experiment Name: Zm_Hybrid_Seed_Dev_P Parameter: DAP Value: 30 vs. 12
  misc_feature: MA Experiment 20000535 PARAMETER Experiment Name: Zm_Hybrid_Seed_Dev_P Parameter: Organism Value: Zea mays
  misc_feature: MA Experiment 20000535 PARAMETER Experiment Name: Zm_Hybrid_Seed_Dev_P Parameter: Plant Line Value: 35A19
  misc_feature: MA Experiment 20000535 PARAMETER Experiment Name: Zm_Hybrid_Seed_Dev_P Parameter: Tissue Value: Embryo vs. Unfert Floret
  misc_feature: MA Experiment ID: 20001608 Result: Up-regulated in Transcription
  misc_feature: MA Experiment 20001608 PARAMETER Experiment Name: Zm_50ppm_KNO3_L-to-H_P Parameter: Age (day) Value: 21
  misc_feature: MA Experiment 20001608 PARAMETER Experiment Name: Zm_50ppm_KNO3_L-to-H_P Parameter: Organism Value: Zea mays
  misc_feature: MA Experiment 20001608 PARAMETER Experiment Name: Zm_50ppm_KNO3_L-to-H_P Parameter: Plant Line Value: 35A19
  misc_feature: MA Experiment 20001608 PARAMETER Experiment Name: Zm_50ppm_KNO3_L-to-H_P Parameter: Timepoint (hr) Value: 48
  misc_feature: MA Experiment 20001608 PARAMETER Experiment Name: Zm_50ppm_KNO3_L-to-H_P Parameter: Tissue Value: Shoots
  misc_feature: MA Experiment 20001608 PARAMETER Experiment Name: Zm_50ppm_KNO3_L-to-H_P Parameter: Treatment Value: 50ppm KNO3 vs. 50ppm KCl
  misc_feature: MA Experiment ID: 20001610 Result: Up-regulated in Transcription
  misc_feature: MA Experiment 20001610 PARAMETER Experiment Name: Zm_50ppm_KNO3_L-to-H_P Parameter: Age (day) Value: 19
  misc_feature: MA Experiment 20001610 PARAMETER Experiment Name: Zm_50ppm_KNO3_L-to-H_P Parameter: Organism Value: Zea mays
  misc_feature: MA Experiment 20001610 PARAMETER Experiment Name: Zm_50ppm_KNO3_L-to-H_P Parameter: Plant Line Value: 35A19
  misc_feature: MA Experiment 20001610 PARAMETER Experiment Name: Zm_50ppm_KNO3_L-to-H_P Parameter: Timepoint (hr) Value: 2
  misc_feature: MA Experiment 20001610 PARAMETER Experiment Name: Zm_50ppm_KNO3_L-to-H_P Parameter: Tissue Value: Roots
  misc_feature: MA Experiment 20001610 PARAMETER Experiment Name: Zm_50ppm_KNO3_L-to-H_P Parameter: Treatment Value: 50ppm KNO3 vs. 50ppm KCl
aatcattcccctctgcagccgccggccctcagcaagcaagcaagggacagacgcggcggggatgggcagcggggtccgggcgctgatgcgccggaagcaggtagactccgagcggacgcgcgccgccggcagcgcccaccagctccgcaaggagctctccgtcacccagctcgtcgccatcggtgttgggtcgacgattggagctggcgtctacgtccttgttggcacagttgcgcgggagcattccgggccggcattgacgctttcatttctgatagccggaatagcagctgcgctttcagccttctgctatgcggagctggctagccgttgcccttcggcaggaagcgcctatcattattcgtacatctgcgttggcgaaggagttgcatggttgattggctgggctttgatacttgaatacacgattggtggatcagccgttgcccgtggcatttctcctaatctagccttattttttggaggacaggatagtctgccatggattttagcacgacatgagatcccatggcttgatgtcgttgtagatccttgtgcttctttcctcgttttcgtcgtcactggccttctctgtgtggggataaaagagagttcatttgtgcaaggagttgtgacggtcttaaattgctttgtgatgttatttgttatcatagccggtagctacatcggcttccaaacaggatgggttggctacaaggttgctggcggatttttcccttatggagcgaatggaatgcttgccgggtcagcaactgtcttcttcgcctacataggatttgattcagttgccagcacggctgaggaggtgaaaaatccacaacgagatctgccactgggaatcggaacagcattgtcgatttgctgttccttgtacatgttggtttcagttgttattgttggtctggtaccatactttgctatggacccagacacccctatttcatctgcttttgccaaacatgggatgcactgggcaatgtatcttgtaacaactggtgctgttcttgctctctgctcaaccttgatgggatctatattgccacagccaagaatattgatggccatggcacgagatggcctgctaccatcattcttctctgatgtccataagacgacacaagttccagtcaaaagcacagtagtgactggcatctgtgcagctgctcttgctttcttcatggatgtctctcaactggctggaatggttagtgtaggcacgctactcgcgttcactatagttgctgtgtccatcttgattcttagatacgttcctccagatgaggtacccctcccatcttccctgcaagcatcattccgcttgagccaagaaaatgacgaggaaaagctgaggggtacccttggagatgatgatcatgagcaaggctcagctgaaataagtgatgttgtagtaaaaccaatcactgaccccctgatcgagaagcagctatacgcaagcaatttgagtgaggcaaaacggcgtaagaccgcggcatgcagcatcacatctgtttgcataggggttctgatcctcacgacgtcagcctcggcaacattcttgcccttcccggtgagatgctccgtttgtgttttgggtggcatgctcctcctagctggtctgggcatgctctgctggattgaccaagatgatgggaggcactcctttggccactccggaggattcatctgtccgtttgttcccttgctgccggtaatgtgtatcctcataaatacatacttgttaataaatcttggtggcggcacgtggatgcgagtgggggtgtggctagtgatgggggtgttcgtctacattttctatggccgcacccacagctcgttgacggatgtcgtgtatgtccctgtggccgaggcgaatgagatatacgggtcatcctcttcgttagggtttgtggcgtaaagagagatggaaggagatgtttgttgaagcctatcttgagccagtcatggtacttctcacaaaaacctcaaagatcctgactggagcaggtacctgcttgagctattgtgttgcaggcatgggtttgaagaattcttcgacgttctgcacaagcttgttttcgtcatcttcgacaacagagccatgccgtcaaatgggcactttacctttcctgcctcacccccctaagtgtgagcagcaggtttcagctggtcactcatcgagctcctctctgcttttaagtggtgataccggtttagatgtggctgaacagtcagatgatctgaacgacttgctcaatctttcgggagatgcttctgatggcagcttccatggagaaaacaatgccttagcttttgacgaacagatggaatttcagttcctgtctgagcagctagaaattgccatcactgacaatgagaagaatcctcatttagatgacatatacggcacaccaccacagctgtcatcacttccagtatcatcttgctccaatcagaatctagggtcaccagttaaagtccagcttagctcatctcagtcatcttctagctctgcaacagctaacaagtcaagattgaggtggacacttgagcttcatgagcgttttgtggaggccgtgaaaaagcttgaaggtcctgaaaaagcaactcccaaaggtgtgctgaaactaatgaaggtagaaggtctaacaatttatcatgtgaagagccatctgcagaagtatcggcttgcaaaatatattcctgagcctaaagacgataagaaggcttcctcggaggataaaaaagcacaattaggaaagggcagcattgattcaagcaaaaacaagaatttacaagtggcagaagctctaaggatgcaaatagaggttcagaaacagcttcatgaacaattagaggtgcaaaggcagttgcagctacggatagaggaacatgcaagatacttgcagaaaatactagaagagcagcagaaggccggcaatgtgccactaaaagctccaaccaaagcacaagcaacaaagtcgtcacctgaatcgacgtcagacgagagaactgaatccgaggtagacaccatttctccgcggccacccaagaacaggaacccgggtgtagacgcagaatgcaaatcgccgggaaggatcaagcgaacgaaggttcaggctgatcttgaaaacgagggcctgtgttcatagcgagggctcatgttcgtagctgtgcgggctcgccagtgattttctgaacatttgcacttcccgttttagttcaggagctatttgttactgtttgtaacttgaacagccgtagtatctccagcgatctgttgatatcttggcgtgaattggacttgacatcttagccattgtattatatagtaattcgcctttggaatggaaatggaataggtttatgtttg

SEQ ID NO: 12352 - protein, 644 aa, Zea mays subsp. mays
  peptide (1)..(644): Ceres Seq. ID no. 12359663
  misc_feature (20)..(644): Homolog of NCBI NO: 29244640 NR Description: putative cationic amino acid transporter [Oryza
  misc_feature (25)..(634): Homolog of NCBI NO: 30696198 NR Description: expressed protein [Arabidopsis thaliana]
  misc_feature (25)..(634): Homolog of NCBI NO: 23306414 NR Description: Unknown protein [Arabidopsis thaliana]
  misc_feature (21)..(637): Homolog of NCBI NO: 30693001 NR Description: cationic amino acid transporter -related protein thaliana] >gi|26450566|dbj|BAC42395.1| putative cationic amino
  misc_feature (21)..(637): Homolog of NCBI NO: 10178213 NR Description: cationic amino acid transporter-like protein
  misc_feature (25)..(626): Homolog of NCBI NO: 22330822 NR Description: putative cationic amino acid transporter; protein At3g03720.1, supported by cDNA: gi_17064863 [Arabidopsis >gi|17064864|gb|AAL32586.1| putative cationic amino acid
  misc_feature (25)..(626): Homolog of NCBI NO: 6006869 NR Description: putative cationic amino acid transporter
  misc_feature (62)..(630): Homolog of NCBI NO: 37534696 NR Description: putative cationic amino acid transporter -like
  misc_feature (183)..(617): Homolog of NCBI NO: 6981556 NR Description: solute carrier family 7 member A1 (amino acid cationic 1) [Rattus norvegicus] >gi|1589917|gb|AAC52898.1|
  misc_feature (183)..(617): Homolog of NCBI NO: 18181964 NR Description: ecotropic retrovirus receptor [Rattus norvegicus]
IIPLCSRRPSASKQGTDAAGMGSGVRALMRRKQVDSERTRAAGSAHQLRKELSVTQLVAIGVGSTIGAGVYVLVGTVAREHSGPALTLSFLIAGIAAALSAFCYAELASRCPSAGSAYHYSYICVGEGVAWLIGWALILEYTIGGSAVARGISPNLALFFGGQDSLPWILARHEIPWLDVVVDPCASFLVFVVTGLLCVGIKESSFVQGVVTVLNCFVMLFVIIAGSYIGFQTGWVGYKVAGGFFPYGANGMLAGSATVFFAYIGFDSVASTAEEVKNPQRDLPLGIGTALSICCSLYMLVSVVIVGLVPYFAMDPDTPISSAFAKHGMHWAMYLVTTGAVLALCSTLMGSILPQPRILMAMARDGLLPSFFSDVHKTTQVPVKSTVVTGICAAALAFFMDVSQLAGMVSVGTLLAFTIVAVSILILRYVPPDEVPLPSSLQASFRLSQENDEEKLRGTLGDDDHEQGSAEISDVVVKPITDPLIEKQLYASNLSEAKRRKTAACSITSVCIGVLILTTSASATFLPFPVRCSVCVLGGMLLLAGLGMLCWIDQDDGRHSFGHSGGFICPFVPLLPVMCILINTYLLINLGGGTWMRVGVWLVMGVFVYIFYGRTHSSLTDVVYVPVAEANEIYGSSSSLGFVA

SEQ ID NO: 12353 - protein, 624 aa, Zea mays subsp. mays
  peptide (1)..(624): Ceres Seq. ID no. 12359664
  misc_feature (1)..(624): Homolog of NCBI NO: 29244640 NR Description: putative cationic amino acid transporter [Oryza
  misc_feature (5)..(614): Homolog of NCBI NO: 30696198 NR Description: expressed protein [Arabidopsis thaliana]
  misc_feature (5)..(614): Homolog of NCBI NO: 23306414 NR Description: Unknown protein [Arabidopsis thaliana]
  misc_feature (1)..(617): Homolog of NCBI NO: 30693001 NR Description: cationic amino acid transporter -related protein thaliana] >gi|26450566|dbj|BAC42395.1| putative cationic amino
  misc_feature (1)..(617): Homolog of NCBI NO: 10178213 NR Description: cationic amino acid transporter-like protein
  misc_feature (5)..(606): Homolog of NCBI NO: 22330822 NR Description: putative cationic amino acid transporter; protein At3g03720.1, supported by cDNA: gi_17064863 [Arabidopsis >gi|17064864|gb|AAL32586.1| putative cationic amino acid
  misc_feature (5)..(606): Homolog of NCBI NO: 6006869 NR Description: putative cationic amino acid transporter
  misc_feature (42)..(610): Homolog of NCBI NO: 37534696 NR Description: putative cationic amino acid transporter -like
  misc_feature (163)..(597): Homolog of NCBI NO: 6981556 NR Description: solute carrier family 7 member A1 (amino acid cationic 1) [Rattus norvegicus] >gi|1589917|gb|AAC52898.1|
  misc_feature (163)..(597): Homolog of NCBI NO: 18181964 NR Description: ecotropic retrovirus receptor [Rattus norvegicus]
MGSGVRALMRRKQVDSERTRAAGSAHQLRKELSVTQLVAIGVGSTIGAGVYVLVGTVAREHSGPALTLSFLIAGIAAALSAFCYAELASRCPSAGSAYHYSYICVGEGVAWLIGWALILEYTIGGSAVARGISPNLALFFGGQDSLPWILARHEIPWLDVVVDPCASFLVFVVTGLLCVGIKESSFVQGVVTVLNCFVMLFVIIAGSYIGFQTGWVGYKVAGGFFPYGANGMLAGSATVFFAYIGFDSVASTAEEVKNPQRDLPLGIGTALSICCSLYMLVSVVIVGLVPYFAMDPDTPISSAFAKHGMHWAMYLVTTGAVLALCSTLMGSILPQPRILMAMARDGLLPSFFSDVHKTTQVPVKSTVVTGICAAALAFFMDVSQLAGMVSVGTLLAFTIVAVSILILRYVPPDEVPLPSSLQASFRLSQENDEEKLRGTLGDDDHEQGSAEISDVVVKPITDPLIEKQLYASNLSEAKRRKTAACSITSVCIGVLILTTSASATFLPFPVRCSVCVLGGMLLLAGLGMLCWIDQDDGRHSFGHSGGFICPFVPLLPVMCILINTYLLINLGGGTWMRVGVWLVMGVFVYIFYGRTHSSLTDVVYVPVAEANEIYGSSSSLGFVA

SEQ ID NO: 12354 - protein, 616 aa, Zea mays subsp. mays
  peptide (1)..(616): Ceres Seq. ID no. 12359665
  misc_feature (1)..(616): Homolog of NCBI NO: 29244640 NR Description: putative cationic amino acid transporter [Oryza
  misc_feature (1)..(606): Homolog of NCBI NO: 30696198 NR Description: expressed protein [Arabidopsis thaliana]
  misc_feature (1)..(606): Homolog of NCBI NO: 23306414 NR Description: Unknown protein [Arabidopsis thaliana]
  misc_feature (1)..(609): Homolog of NCBI NO: 30693001 NR Description: cationic amino acid transporter -related protein thaliana] >gi|26450566|dbj|BAC42395.1| putative cationic amino
  misc_feature (1)..(609): Homolog of NCBI NO: 10178213 NR Description: cationic amino acid transporter-like protein
  misc_feature (1)..(598): Homolog of NCBI NO: 22330822 NR Description: putative cationic amino acid transporter; protein At3g03720.1, supported by cDNA: gi_17064863 [Arabidopsis >gi|17064864|gb|AAL32586.1| putative cationic amino acid
  misc_feature (1)..(598): Homolog of NCBI NO: 6006869 NR Description: putative cationic amino acid transporter
  misc_feature (34)..(602): Homolog of NCBI NO: 37534696 NR Description: putative cationic amino acid transporter -like
  misc_feature (155)..(589): Homolog of NCBI NO: 6981556 NR Description: solute carrier family 7 member A1 (amino acid cationic 1) [Rattus norvegicus] >gi|1589917|gb|AAC52898.1|
  misc_feature (155)..(589): Homolog of NCBI NO: 18181964 NR Description: ecotropic retrovirus receptor [Rattus norvegicus]
MRRKQVDSERTRAAGSAHQLRKELSVTQLVAIGVGSTIGAGVYVLVGTVAREHSGPALTLSFLIAGIAAALSAFCYAELASRCPSAGSAYHYSYICVGEGVAWLIGWALILEYTIGGSAVARGISPNLALFFGGQDSLPWILARHEIPWLDVVVDPCASFLVFVVTGLLCVGIKESSFVQGVVTVLNCFVMLFVIIAGSYIGFQTGWVGYKVAGGFFPYGANGMLAGSATVFFAYIGFDSVASTAEEVKNPQRDLPLGIGTALSICCSLYMLVSVVIVGLVPYFAMDPDTPISSAFAKHGMHWAMYLVTTGAVLALCSTLMGSILPQPRILMAMARDGLLPSFFSDVHKTTQVPVKSTVVTGICAAALAFFMDVSQLAGMVSVGTLLAFTIVAVSILILRYVPPDEVPLPSSLQASFRLSQENDEEKLRGTLGDDDHEQGSAEISDVVVKPITDPLIEKQLYASNLSEAKRRKTAACSITSVCIGVLILTTSASATFLPFPVRCSVCVLGGMLLLAGLGMLCWIDQDDGRHSFGHSGGFICPFVPLLPVMCILINTYLLINLGGGTWMRVGVWLVMGVFVYIFYGRTHSSLTDVVYVPVAEANEIYGSSSSLGFVA

SEQ ID NO: 12355 - DNA, 1577 bp, Zea mays subsp. mays
  misc_feature (1)..(1577): Ceres Seq. ID no. 12408300
  misc_feature: MA Experiment ID: 108527 Result: Down-regulated in Transcription
  misc_feature: MA Experiment 108527 PARAMETER Experiment Name: Zm_5mM_NO_P Parameter: Age (day) Value: 8
  misc_feature: MA Experiment 108527 PARAMETER Experiment Name: Zm_5mM_NO_P Parameter: Organism Value: Zea mays
  misc_feature: MA Experiment 108527 PARAMETER Experiment Name: Zm_5mM_NO_P Parameter: Plant Line Value: 35A19
  misc_feature: MA Experiment 108527 PARAMETER Experiment Name: Zm_5mM_NO_P Parameter: Timepoint (hr) Value: 6
  misc_feature: MA Experiment 108527 PARAMETER Experiment Name: Zm_5mM_NO_P Parameter: Tissue Value: Aerial
  misc_feature: MA Experiment 108527 PARAMETER Experiment Name: Zm_5mM_NO_P Parameter: Treatment Value: 5mM NO vs. No Treatment
  misc_feature: MA Experiment ID: 108530 Result: Up-regulated in Transcription
  misc_feature: MA Experiment 108530 PARAMETER Experiment Name: Zm_Imbibed_Seeds_P Parameter: Age (day) Value: 6 vs. 2
  misc_feature: MA Experiment 108530 PARAMETER Experiment Name: Zm_Imbibed_Seeds_P Parameter: Organism Value: Zea mays
  misc_feature: MA Experiment 108530 PARAMETER Experiment Name: Zm_Imbibed_Seeds_P Parameter: Plant Line Value: 35A19
  misc_feature: MA Experiment 108530 PARAMETER Experiment Name: Zm_Imbibed_Seeds_P Parameter: Tissue Value: Aerial vs. Embryo
  misc_feature: MA Experiment ID: 108559 Result: Down-regulated in Transcription
  misc_feature: MA Experiment 108559 PARAMETER Experiment Name: Zm_5mM_NO_P Parameter: Age (day) Value: 8
  misc_feature: MA Experiment 108559 PARAMETER Experiment Name: Zm_5mM_NO_P Parameter: Organism Value: Zea mays
  misc_feature: MA Experiment 108559 PARAMETER Experiment Name: Zm_5mM_NO_P Parameter: Plant Line Value: 35A19
  misc_feature: MA Experiment 108559 PARAMETER Experiment Name: Zm_5mM_NO_P Parameter: Timepoint (hr) Value: 12
  misc_feature: MA Experiment 108559 PARAMETER Experiment Name: Zm_5mM_NO_P Parameter: Tissue Value: Aerial
  misc_feature: MA Experiment 108559 PARAMETER Experiment Name: Zm_5mM_NO_P Parameter: Treatment Value: 5mM NO vs. No Treatment
ataggaacacacgaatacgcgaccacacgttcacctcggccatgatccaccaacacagcagctccctccctgaaatctcattcccatgaatttccacacggccagcttctgcgcttccgcggcgataggcctcccaacagcccccaaaatatcggcttcgttggctactggtcgctttgcctgccgcagtgagagatgtctggagacctggaccttcagatctcctgctatctgccttcttgctgctacccccacacgctgcaccctcacagacaccatggatccgagctccgacatcatactcgacactccgttcttccgcatctacagcgaccgccgcatcgaccgcttggtcgggcaccgataccgtgccggccggctttgatcccgccaccggcgtcacctccaaagatgtcgttttagacagcaactccggcctctacgttcgcctgtacctcccggacacggctaccgggtctgaccactactccaagaaattccccgtgctagtctacttccacggcggcggctttgtcacccactcggcagcgtctccgccctatcagcccttcctcaacacccttgccgcgaaggccggcttgctcatcgtctccgtgaactaccgcctcgcgccagagcacccgcttccggcaggttacgaggactccttccgcgcgctcaagtgggcggcctctggaagcggggacccctggctatcacatcacggcgacctgggccgcatcttcctggccggggacagctccggcgggaactttgtccacaacgtcgctatgatggccgccgcgtcagagttgcaaatcgagggcgcggtcctcctgcacgccgggttcgctggcaagcagcgcatcgacggagagaaaccagagtcagtggcgctgacgcagaagctgtgggggatcgtgtgccccgaggcgacggacggcgtggacgacccgcggatgaaccccttggccgccgcggcgcccagcctgcgaaacctgccgtgcgagagggtgctcgtctgcgcggcagagctggactcgctgcgggcgaggaacagggcgtactacgacgccctcgcggcaagcgggtggggtggcacggtggagtggctcgagtctaagggcaagcagcacgccttcttcctctacgactccggctgcggcgaggccgtggagctcatggatcgactggtcgcgttctttgctgggaacttgaattcgtcatgtgtggatgtgaccacacatcacacgaccacatccggtgagaccctgagatgaatggaacaaacgaagatgcagctcattgctcaatcgaaataactgagctcagtcctcaaaacaatgaaaaaagaggaagaacagctgagatcggatccttgtactgatcagtttatgttatcgcttgggtcatcaatttctactagttgtgtgcccgtgcgttgcaacggaaacatataataccattgatagcttatgtacgttgggatgaacatcgacatatatctgaccggatcttcttcttccttggggatctggagaaaagcctgttcgaaagccaaacatgttaagacctgt

SEQ ID NO: 12356 - protein, 162 aa, Zea mays subsp. mays
  peptide (1)..(162): Ceres Seq. ID no. 12408301
  misc_feature (1)..(139): Homolog of NCBI NO: 38344841 NR Description: OSJNBa0064H22.22 [Oryza sativa (japonica
  misc_feature (1)..(144): Homolog of NCBI NO: 18401743 NR Description: expressed protein; protein id: At1g47480.1, by cDNA: 111056. [Arabidopsis thaliana] >gi|25405208|pir||A96515
  misc_feature (1)..(144): Homolog of NCBI NO: 21536771 NR Description: unknown [Arabidopsis thaliana]
  misc_feature (1)..(140): Homolog of NCBI NO: 18086341 NR Description: AT3g48690/T8P19_200 [Arabidopsis thaliana]
  misc_feature (1)..(140): Homolog of NCBI NO: 15228425 NR Description: putative protein; protein id: At3g48690.1, by cDNA: gi_18086340 [Arabidopsis thaliana]
  misc_feature (1)..(141): Homolog of NCBI NO: 15228426 NR Description: putative protein; protein id: At3g48700.1
  misc_feature (1)..(137): Homolog of NCBI NO: 15227669 NR Description: putative esterase; protein id: At2g03550.1
  misc_feature (1)..(137): Homolog of NCBI NO: 28393060 NR Description: putative esterase [Arabidopsis thaliana]
  misc_feature (1)..(161): Homolog of NCBI NO: 34393323 NR Description: putative cell death associated protein [Oryza
  misc_feature (1)..(140): Homolog of NCBI NO: 21537287 NR Description: putative esterase [Arabidopsis thaliana]
MMAAASELQIEGAVLLHAGFAGKQRIDGEKPESVALTQKLWGIVCPEATDGVDDPRMNPLAAAAPSLRNLPCERVLVCAAELDSLRARNRAYYDALAASGWGGTVEWLESKGKQHAFFLYDSGCGEAVELMDRLVAFFAGNLNSSCVDVTTHHTTTSGETLR

SEQ ID NO: 12357 - protein, 161 aa, Zea mays subsp. mays
  peptide (1)..(161): Ceres Seq. ID no. 12408302
  misc_feature (1)..(138): Homolog of NCBI NO: 38344841 NR Description: OSJNBa0064H22.22 [Oryza sativa (japonica
  misc_feature (1)..(143): Homolog of NCBI NO: 18401743 NR Description: expressed protein; protein id: At1g47480.1, by cDNA: 111056. [Arabidopsis thaliana] >gi|25405208|pir||A96515
  misc_feature (1)..(143): Homolog of NCBI NO: 21536771 NR Description: unknown [Arabidopsis thaliana]
  misc_feature (1)..(139): Homolog of NCBI NO: 18086341 NR Description: AT3g48690/T8P19_200 [Arabidopsis thaliana]
  misc_feature (1)..(139): Homolog of NCBI NO: 15228425 NR Description: putative protein; protein id: At3g48690.1, by cDNA: gi_18086340 [Arabidopsis thaliana]
  misc_feature (1)..(140): Homolog of NCBI NO: 15228426 NR Description: putative protein; protein id: At3g48700.1
  misc_feature (1)..(136): Homolog of NCBI NO: 15227669 NR Description: putative esterase; protein id: At2g03550.1
  misc_feature (1)..(136): Homolog of NCBI NO: 28393060 NR Description: putative esterase [Arabidopsis thaliana]
  misc_feature (1)..(160): Homolog of NCBI NO: 34393323 NR Description: putative cell death associated protein [Oryza
  misc_feature (1)..(139): Homolog of NCBI NO: 21537287 NR Description: putative esterase [Arabidopsis thaliana]
MAAASELQIEGAVLLHAGFAGKQRIDGEKPESVALTQKLWGIVCPEATDGVDDPRMNPLAAAAPSLRNLPCERVLVCAAELDSLRARNRAYYDALAASGWGGTVEWLESKGKQHAFFLYDSGCGEAVELMDRLVAFFAGNLNSSCVDVTTHHTTTSGETLR

SEQ ID NO: 12358 - protein, 106 aa, Zea mays subsp. mays
  peptide (1)..(106): Ceres Seq. ID no. 12408303
  misc_feature (1)..(83): Homolog of NCBI NO: 38344841 NR Description: OSJNBa0064H22.22 [Oryza sativa (japonica
  misc_feature (1)..(88): Homolog of NCBI NO: 18401743 NR Description: expressed protein; protein id: At1g47480.1, by cDNA: 111056. [Arabidopsis thaliana] >gi|25405208|pir||A96515
  misc_feature (1)..(88): Homolog of NCBI NO: 21536771 NR Description: unknown [Arabidopsis thaliana]
  misc_feature (1)..(84): Homolog of NCBI NO: 18086341 NR Description: AT3g48690/T8P19_200 [Arabidopsis thaliana]
  misc_feature (1)..(84): Homolog of NCBI NO: 15228425 NR Description: putative protein; protein id: At3g48690.1, by cDNA: gi_18086340 [Arabidopsis thaliana]
  misc_feature (1)..(85): Homolog of NCBI NO: 15228426 NR Description: putative protein; protein id: At3g48700.1
  misc_feature (1)..(81): Homolog of NCBI NO: 15227669 NR Description: putative esterase; protein id: At2g03550.1
  misc_feature (1)..(81): Homolog of NCBI NO: 28393060 NR Description: putative esterase [Arabidopsis thaliana]
  misc_feature (1)..(105): Homolog of NCBI NO: 34393323 NR Description: putative cell death associated protein [Oryza
  misc_feature (1)..(84): Homolog of NCBI NO: 21537287 NR Description: putative esterase [Arabidopsis thaliana]
MNPLAAAAPSLRNLPCERVLVCAAELDSLRARNRAYYDALAASGWGGTVEWLESKGKQHAFFLYDSGCGEAVELMDRLVAFFAGNLNSSCVDVTTHHTTTSGETLR

SEQ ID NO: 12359 - DNA, 1153 bp, Zea mays subsp. mays
  misc_feature (1)..(1153): Ceres Seq. ID no. 12374047
  misc_feature: MA Experiment ID: 108522 Result: Up-regulated in Transcription
  misc_feature: MA Experiment 108522 PARAMETER Experiment Name: Zm_42deg_Heat_P Parameter: Age (day) Value: 8
  misc_feature: MA Experiment 108522 PARAMETER Experiment Name: Zm_42deg_Heat_P Parameter: Organism Value: Zea mays
  misc_feature: MA Experiment 108522 PARAMETER Experiment Name: Zm_42deg_Heat_P Parameter: Plant Line Value: 35A19
  misc_feature: MA Experiment 108522 PARAMETER Experiment Name: Zm_42deg_Heat_P Parameter: Temperature (deg C) Value: 42 vs. 22
  misc_feature: MA Experiment 108522 PARAMETER Experiment Name: Zm_42deg_Heat_P Parameter: Timepoint (hr) Value: 1
  misc_feature: MA Experiment 108522 PARAMETER Experiment Name: Zm_42deg_Heat_P Parameter: Tissue Value: Aerial
  misc_feature: MA Experiment ID: 108523 Result: Up-regulated in Transcription
  misc_feature: MA Experiment 108523 PARAMETER Experiment Name: Zm_42deg_Heat_P Parameter: Age (day) Value: 8
  misc_feature: MA Experiment 108523 PARAMETER Experiment Name: Zm_42deg_Heat_P Parameter: Organism Value: Zea mays
  misc_feature: MA Experiment 108523 PARAMETER Experiment Name: Zm_42deg_Heat_P Parameter: Plant Line Value: 35A19
  misc_feature: MA Experiment 108523 PARAMETER Experiment Name: Zm_42deg_Heat_P Parameter: Temperature (deg C) Value: 42 vs. 22
  misc_feature: MA Experiment 108523 PARAMETER Experiment Name: Zm_42deg_Heat_P Parameter: Timepoint (hr) Value: 6
  misc_feature: MA Experiment 108523 PARAMETER Experiment Name: Zm_42deg_Heat_P Parameter: Tissue Value: Aerial
  misc_feature: MA Experiment ID: 20000479 Result: Up-regulated in Transcription
  misc_feature: MA Experiment 20000479 PARAMETER Experiment Name: Zm_Drought_P Parameter: Age (day) Value: 10
  misc_feature: MA Experiment 20000479 PARAMETER Experiment Name: Zm_Drought_P Parameter: Organism Value: Zea mays
  misc_feature: MA Experiment 20000479 PARAMETER Experiment Name: Zm_Drought_P Parameter: Plant Line Value: 35A19
  misc_feature: MA Experiment 20000479 PARAMETER Experiment Name: Zm_Drought_P Parameter: Timepoint (hr) Value: 48
  misc_feature: MA Experiment 20000479 PARAMETER Experiment Name: Zm_Drought_P Parameter: Tissue Value: Aerial
  misc_feature: MA Experiment 20000479 PARAMETER Experiment Name: Zm_Drought_P Parameter: Treatment Value: Drought vs. No Drought
  misc_feature: MA Experiment ID: 20000480 Result: Up-regulated in Transcription
  misc_feature: MA Experiment 20000480 PARAMETER Experiment Name: Zm_Drought_P Parameter: Age (day) Value: 11
  misc_feature: MA Experiment 20000480 PARAMETER Experiment Name: Zm_Drought_P Parameter: Organism Value: Zea mays
  misc_feature: MA Experiment 20000480 PARAMETER Experiment Name: Zm_Drought_P Parameter: Plant Line Value: 35A19
  misc_feature: MA Experiment 20000480 PARAMETER Experiment Name: Zm_Drought_P Parameter: Timepoint (hr) Value: 72
  misc_feature: MA Experiment 20000480 PARAMETER Experiment Name: Zm_Drought_P Parameter: Tissue Value: Aerial
  misc_feature: MA Experiment 20000480 PARAMETER Experiment Name: Zm_Drought_P Parameter: Treatment Value: Drought vs. No Drought
agggtgattggggagcttgtcaaggtgctgaagattacacctgtacctgttgtgtttgcgtcgttttcgggagggccaaaagggtgcacatacaaggttttcagctgatcgagagaagatgtgaagggcaactaagcatggatgagtaccagctcgtacaagattgtctatgcggacaaatgtatgattcaagccctgtggattttgtcagtgacttgggcactcgcttcctcctcgatccaagtgtcctgaagatgtctgaacctcctcgtgtcttgtcatggatgactaagggcattgcctcaggtcttgatgttcttttcataaacaaatttgaagaacaacgtaaagattattgggaaacactatactcatcggtgcattttggtccaatactaatactctgctcagaggatgatcaacttgctacatattcagttgttcaaaattttggccagcatctgctagagcttggtggtgatgtgagcctaattaaatggcatagttctccgcatgtcggccactacaagcaccatcctgaggaatacagagctgctgtgacggagctcctaaagaaagcctcgacgctctacgcgagcagacgacaactcaacggacacgccgtgggcacaagcgagcacaccgacgcgcctgcatccacctccaagtccaacccacacagagatgccgcgagttctgtcggtcgtagcaggctgattcaagcaccggccgatccagccggccagtttccttccataccgagctccatggagtaccacgagagcagcagccaaggtccgccgcagccggagctgttcagcatgcccggcgtggagagctcgggcctgcgttgtgcggtgctggggcaggcgctgtacggtgtctgtgttccgaaggacgtagaagacggctgggacctcgcgccgccttccgcgtcgtcggatgcgttgtggggtgctgctgctgctgccgcgccgcctcgccgtggtagcttccgtccgatgagatgtgtacggcgctcgagattgtgatattgtgcgtgcgttttagtttaaaaattaaggtgagcaacaaatattgagaacggagggagtagtacgtattctctatacaaatcaatataaatatggtgatcgtaatggtctattcctct

SEQ ID NO: 12360 - protein, 342 aa, Zea mays subsp. mays
  peptide (1)..(342): Ceres Seq. ID no. 12374048
  misc_feature (23)..(304): Pfam Name: Eukaryotic protein of unknown function (DUF829) Pfam Description: Eukaryotic protein of unknown function (DUF829)
  misc_feature (14)..(306): Homolog of NCBI NO: 18397898 NR Description: unknown protein; protein id: At2g15695.1 thaliana] >gi|20197706|gb|AAM15216.1| unknown protein
  misc_feature (34)..(306): Homolog of NCBI NO: 15241450 NR Description: putative protein; protein id: At5g44250.1, by cDNA: 27195., supported by cDNA: gi_15450861 [Arabidopsis >gi|9759526|dbj|BAB10992.1| contains similarity to unknown
  misc_feature (14)..(306): Homolog of NCBI NO: 25411656 NR Description: hypothetical protein At2g15690 [imported] -
GDWGACQGAEDYTCTCCVCVVFGRAKRVHIQGFQLIERRCEGQLSMDEYQLVQDCLCGQMYDSSPVDFVSDLGTRFLLDPSVLKMSEPPRVLSWMTKGIASGLDVLFINKFEEQRKDYWETLYSSVHFGPILILCSEDDQLATYSVVQNFGQHLLELGGDVSLIKWHSSPHVGHYKHHPEEYRAAVTELLKKASTLYASRRQLNGHAVGTSEHTDAPASTSKSNPHRDAASSVGRSRLIQAPADPAGQFPSIPSSMEYHESSSQGPPQPELFSMPGVESSGLRCAVLGQALYGVCVPKDVEDGWDLAPPSASSDALWGAAAAAAPPRRGSFRPMRCVRRSRL

SEQ ID NO: 12361 - protein, 297 aa, Zea mays subsp. mays
  peptide (1)..(297): Ceres Seq. ID no. 12374049
  misc_feature (1)..(259): Pfam Name: Eukaryotic protein of unknown function (DUF829) Pfam Description: Eukaryotic protein of unknown function (DUF829)
  misc_feature (1)..(261): Homolog of NCBI NO: 18397898 NR Description: unknown protein; protein id: At2g15695.1 thaliana] >gi|20197706|gb|AAM15216.1| unknown protein
  misc_feature (1)..(261): Homolog of NCBI NO: 15241450 NR Description: putative protein; protein id: At5g44250.1, by cDNA: 27195., supported by cDNA: gi_15450861 [Arabidopsis >gi|9759526|dbj|BAB10992.1| contains similarity to unknown
  misc_feature (1)..(261): Homolog of NCBI NO: 25411656 NR Description: hypothetical protein At2g15690 [imported] -
MDEYQLVQDCLCGQMYDSSPVDFVSDLGTRFLLDPSVLKMSEPPRVLSWMTKGIASGLDVLFINKFEEQRKDYWETLYSSVHFGPILILCSEDDQLATYSVVQNFGQHLLELGGDVSLIKWHSSPHVGHYKHHPEEYRAAVTELLKKASTLYASRRQLNGHAVGTSEHTDAPASTSKSNPHRDAASSVGRSRLIQAPADPAGQFPSIPSSMEYHESSSQGPPQPELFSMPGVESSGLRCAVLGQALYGVCVPKDVEDGWDLAPPSASSDALWGAAAAAAPPRRGSFRPMRCVRRSRL

SEQ ID NO: 12362 - protein, 283 aa, Zea mays subsp. mays
  peptide (1)..(283): Ceres Seq. ID no. 12374050
  misc_feature (1)..(245): Pfam Name: Eukaryotic protein of unknown function (DUF829) Pfam Description: Eukaryotic protein of unknown function (DUF829)
  misc_feature (1)..(247): Homolog of NCBI NO: 18397898 NR Description: unknown protein; protein id: At2g15695.1 thaliana] >gi|20197706|gb|AAM15216.1| unknown protein
  misc_feature (1)..(247): Homolog of NCBI NO: 15241450 NR Description: putative protein; protein id: At5g44250.1, by cDNA: 27195., supported by cDNA: gi_15450861 [Arabidopsis >gi|9759526|dbj|BAB10992.1| contains similarity to unknown
  misc_feature (1)..(247): Homolog of NCBI NO: 25411656 NR Description: hypothetical protein At2g15690 [imported] -
MYDSSPVDFVSDLGTRFLLDPSVLKMSEPPRVLSWMTKGIASGLDVLFINKFEEQRKDYWETLYSSVHFGPILILCSEDDQLATYSVVQNFGQHLLELGGDVSLIKWHSSPHVGHYKHHPEEYRAAVTELLKKASTLYASRRQLNGHAVGTSEHTDAPASTSKSNPHRDAASSVGRSRLIQAPADPAGQFPSIPSSMEYHESSSQGPPQPELFSMPGVESSGLRCAVLGQALYGVCVPKDVEDGWDLAPPSASSDALWGAAAAAAPPRRGSFRPMRCVRRSRL

SEQ ID NO: 12363 - DNA, 2075 bp, Zea mays subsp. mays
  misc_feature (1)..(2075): Ceres Seq. ID no. 12341294
  misc_feature: MA Experiment ID: 108529 Result: Up-regulated in Transcription
  misc_feature: MA Experiment 108529 PARAMETER Experiment Name: Zm_Imbibed_Seeds_P Parameter: Age (day) Value: 5 vs. 2
  misc_feature: MA Experiment 108529 PARAMETER Experiment Name: Zm_Imbibed_Seeds_P Parameter: Organism Value: Zea mays
  misc_feature: MA Experiment 108529 PARAMETER Experiment Name: Zm_Imbibed_Seeds_P Parameter: Plant Line Value: 35A19
  misc_feature: MA Experiment 108529 PARAMETER Experiment Name: Zm_Imbibed_Seeds_P Parameter: Tissue Value: Roots vs. Embryo
  misc_feature: MA Experiment ID: 108535 Result: Down-regulated in Transcription
  misc_feature: MA Experiment 108535 PARAMETER Experiment Name: Zm_Meristem_P Parameter: Age (day) Value: 8
  misc_feature: MA Experiment 108535 PARAMETER Experiment Name: Zm_Meristem_P Parameter: Organism Value: Zea mays
  misc_feature: MA Experiment 108535 PARAMETER Experiment Name: Zm_Meristem_P Parameter: Plant Line Value: 35A19
  misc_feature: MA Experiment 108535 PARAMETER Experiment Name: Zm_Meristem_P Parameter: Tissue Value: Root Meristem vs. Above Root Meristem
  misc_feature: MA Experiment ID: 108536 Result: Up-regulated in Transcription
  misc_feature: MA Experiment 108536 PARAMETER Experiment Name: Zm_Meristem_P Parameter: Age (day) Value: 8
  misc_feature: MA Experiment 108536 PARAMETER Experiment Name: Zm_Meristem_P Parameter: Organism Value: Zea mays
  misc_feature: MA Experiment 108536 PARAMETER Experiment Name: Zm_Meristem_P Parameter: Plant Line Value: 35A19
  misc_feature: MA Experiment 108536 PARAMETER Experiment Name: Zm_Meristem_P Parameter: Tissue Value: Shoot Meristem vs. Above Shoot Meristem
  misc_feature: MA Experiment ID: 108547 Result: Up-regulated in Transcription
  misc_feature: MA Experiment 108547 PARAMETER Experiment Name: Zm_Imbibed_Seeds_P Parameter: Age (day) Value: 4 vs. 2
  misc_feature: MA Experiment 108547 PARAMETER Experiment Name: Zm_Imbibed_Seeds_P Parameter: Organism Value: Zea mays
  misc_feature: MA Experiment 108547 PARAMETER Experiment Name: Zm_Imbibed_Seeds_P Parameter: Plant Line Value: 35A19
  misc_feature: MA Experiment 108547 PARAMETER Experiment Name: Zm_Imbibed_Seeds_P Parameter: Tissue Value: Aerial vs. Embryo
  misc_feature: MA Experiment ID: 108687 Result: Down-regulated in Transcription
  misc_feature: MA Experiment 108687 PARAMETER Experiment Name: Zm_Embryos-Flowers__P Parameter: Tissue Value: Embryo vs. Aerial+
  misc_feature: MA Experiment ID: 20000535 Result: Down-regulated in Transcription
  misc_feature: MA Experiment 20000535 PARAMETER Experiment Name: Zm_Hybrid_Seed_Dev_P Parameter: DAP Value: 30 vs. 12
  misc_feature: MA Experiment 20000535 PARAMETER Experiment Name: Zm_Hybrid_Seed_Dev_P Parameter: Organism Value: Zea mays
  misc_feature: MA Experiment 20000535 PARAMETER Experiment Name: Zm_Hybrid_Seed_Dev_P Parameter: Plant Line Value: 35A19
  misc_feature: MA Experiment 20000535 PARAMETER Experiment Name: Zm_Hybrid_Seed_Dev_P Parameter: Tissue Value: Embryo vs. Unfert Floret
gttttttccgttcatccatccatacgtttcgtttgttccacctgcgcaactgcgacggggataagtacgtcttccagatgacgacggcggcatggccgcggccacgcttcctcgtcctcccccagcctggattcctccgctcggtctgccacggcctctgcgcccgctgtctcttctgcttcctgctgctcctcgccttcgcctgcagctccagctccggacgggtggtggtcaccagcttgcctggcttcgacggcgacctccccttccacctcgaaacagggtgcgcgtgcccgcgtggcgtgtctactagtagtatcctccttcttcttcttcattcattcatcctggtggtgtactactagactactactagtagctcacgcgcgcggcacatgtagatgtagcctctaaccaccgttgctgccctgaaactcaaaacgaaggtacgtggaggtggaggaggacgccggcgtggagctcttctactacttcgtccaggccgagtccggcgccgccgccgccgccgatgacacccctttcctcttctggctcaccggcggcgaccgctgctccgtcttcagcggcctcgcctacgagatcggtcccatcagattcgtcctggaaccctacaacggcaccctgccgcgcctgcgatacaaccacaactcgtggtcaaaggtgtcacatatcctcttcgtcgattcaccggttggagctggattttccttctcgagagatcccaaaggctacgatgtcggagacatctcggcctcactgcagctacaggaattcctcatcaagtggttcagtgatcatcccgagtacctcgcgaatcctttctacattggcggggactcctatgtcggaaaaatcgtgccgttcctcaggcagatgatttcagaaggtattgaacttggaagaagacccttccctaacctcaaggtatgtccatcatacatttctctccggaatggaagatgctatatcgacgtgggatactagctagtctatatccaagaaattaattgtagtcggtcacttaggctgatgatatgcaggttctgaatttgtcatgatcagggctatctggtgggtaacccaatcacgggcgaaagtatagatttcacttccagagtgccctacgctcatggagtcggtatcatatcagatcaattgtatgagacgatattggggcattgccaaggagaggactacactagtcctgcaaacgctctgtgtgctcaggctctggacactttcaacaatctcatcaacgaagtccagaacgcccagatcttactggacacgtgcgtctacgcgtctcctgcgccaaacgttctcagcagaccggtggacggtggtagaaggatcctgagggcggcggggatgggaggaggggcgacgctgaaccatccgccagctcgtcctcggtttggctgcatcacctacggctactacctgtcgtatttctgggcgaacgatgaacgcactcgaacagctcttgggatcaagaagggaacagtggacgagtgggtgaggtgtcacgacgcagacctgccgtacacgatcgacctcaagagcgccatcaagtaccaccggaacctgacgtccagaggctaccgcgccctggtgtacagcggcgaccatgacctgctggtgccacacctgggcacccaggcatgggtcaggtccctcaacttccccgtcgtcgacgactggagggcgtggcatctcggtggccaagccgccgggttcacgataaattactcaaacaacatgacgttcgcgacgatcaaaggtggcgggcacacggcgccggagtacgagccggagaggtgtttcgccatgttcagccgctggatactcgaccgtccactctaatctccactcgtacattgccggattcttgcaccatgaccatgattgatggactgtgtggattgcagttcataggtggaataaaatggatgatttctgtgaatggataggtctgccaactaggcaactttgtgtaaattaactaggtctgtgtcagcgcgctttaacgtaatatatgcggggataaatcgtgc

SEQ ID NO: 12364 - protein, 164 aa, Zea mays subsp. mays
  peptide (1)..(164): Ceres Seq. ID no. 12341295
  misc_feature (18)..(159): Pfam Name: Serine carboxypeptidase Pfam Description: Serine carboxypeptidase
  misc_feature (1)..(164): Homolog of NCBI NO: 28273379 NR Description: putative serine carboxypeptidase I [Oryza sativa
  misc_feature (1)..(159): Homolog of NCBI NO: 28273383 NR Description: putative serine carboxypeptidase [Oryza sativa
  misc_feature (1)..(164): Homolog of NCBI NO: 30682773 NR Description: serine carboxypeptidase -related [Arabidopsis >gi|17380718|gb|AAL36189.1| putative carboxypeptidase thaliana] >gi|20259065|gb|AAM14248.1| putative carboxypeptidase
  misc_feature (1)..(164): Homolog of NCBI NO: 15418807 NR Description: sinapoylglucose:choline sinapoyltransferase
  misc_feature (5)..(164): Homolog of NCBI NO: 37530314 NR Description: putative serine carboxypeptidase [Oryza sativa
  misc_feature (18)..(164): Homolog of NCBI NO: 15228300 NR Description: putative glucose acyltransferase; protein id: [Arabidopsis thaliana] >gi|8567775|gb|AAF76347.1| glucose putative [Arabidopsis thaliana]
  misc_feature (20)..(164): Homolog of NCBI NO: 9758992 NR Description: serine carboxypeptidase [Arabidopsis thaliana]
  misc_feature (18)..(164): Homolog of NCBI NO: 15219429 NR Description: putative serine carboxypeptidase; protein id: [Arabidopsis thaliana] >gi|25289788|pir||A96759 protein serine
  misc_feature (18)..(159): Homolog of NCBI NO: 15219427 NR Description: putative serine carboxypeptidase; protein id: [Arabidopsis thaliana] >gi|25289777|pir||H96758 protein serine
  misc_feature (18)..(164): Homolog of NCBI NO: 8777303 NR Description: serine carboxypeptidase [Arabidopsis thaliana]
MGGGATLNHPPARPRFGCITYGYYLSYFWANDERTRTALGIKKGTVDEWVRCHDADLPYTIDLKSAIKYHRNLTSRGYRALVYSGDHDLLVPHLGTQAWVRSLNFPVVDDWRAWHLGGQAAGFTINYSNNMTFATIKGGGHTAPEYEPERCFAMFSRWILDRPL

SEQ ID NO: 12365 - protein, 122 aa, Zea mays subsp. mays
  peptide (1)..(122): Ceres Seq. ID no. 12341296
  misc_feature (1)..(122): Homolog of NCBI NO: 11359723 NR Description: proteophosphoglycan, membrane-associated - Leishmania major (fragment) >gi|5420389|emb|CAB46680.1|
  misc_feature (1)..(122): Homolog of NCBI NO: 13592175 NR Description: ppg3 [Leishmania major]
  misc_feature (1)..(120): Homolog of NCBI NO: 13592175 NR Description: ppg3 [Leishmania major]
  misc_feature (1)..(122): Homolog of NCBI NO: 13592175 NR Description: ppg3 [Leishmania major]
  misc_feature (1)..(92): Homolog of NCBI NO: 11359723 NR Description: proteophosphoglycan, membrane-associated - Leishmania major (fragment) >gi|5420389|emb|CAB46680.1|
  misc_feature (1)..(120): Homolog of NCBI NO: 13592175 NR Description: ppg3 [Leishmania major]
  misc_feature (1)..(120): Homolog of NCBI NO: 13592175 NR Description: ppg3 [Leishmania major]
  misc_feature (1)..(120): Homolog of NCBI NO: 13592175 NR Description: ppg3 [Leishmania major]
  misc_feature (1)..(120): Homolog of NCBI NO: 13592175 NR Description: ppg3 [Leishmania major]
  misc_feature (1)..(120): Homolog of NCBI NO: 13592175 NR Description: ppg3 [Leishmania major]
MTPLSSSGSPAATAAPSSAASPTRSVPSDSSWNPTTAPCRACDTTTTRGQRCHISSSSIHRLELDFPSREIPKATMSETSRPHCSYRNSSSSGSVIIPSTSRILSTLAGTPMSEKSCRSSGR

SEQ ID NO: 12366 - protein, 120 aa, Zea mays subsp. mays
  peptide (1)..(120): Ceres Seq. ID no. 12341297
  misc_feature (54)..(94): Homolog of NCBI NO: 28273379 NR Description: putative serine carboxypeptidase I [Oryza sativa
  misc_feature (57)..(94): Homolog of NCBI NO: 28273383 NR Description: putative serine carboxypeptidase [Oryza sativa
  misc_feature (60)..(94): Homolog of NCBI NO: 30682773 NR Description: serine carboxypeptidase -related [Arabidopsis >gi|17380718|gb|AAL36189.1| putative carboxypeptidase thaliana] >gi|20259065|gb|AAM14248.1| putative carboxypeptidase
  misc_feature (60)..(94): Homolog of NCBI NO: 15418807 NR Description: sinapoylglucose:choline sinapoyltransferase
  misc_feature (55)..(94): Homolog of NCBI NO: 37530314 NR Description: putative serine carboxypeptidase [Oryza sativa
  misc_feature (61)..(94): Homolog of NCBI NO: 15228300 NR Description: putative glucose acyltransferase; protein id: [Arabidopsis thaliana] >gi|8567775|gb|AAF76347.1| glucose putative [Arabidopsis thaliana]
  misc_feature (60)..(94): Homolog of NCBI NO: 9758992 NR Description: serine carboxypeptidase [Arabidopsis thaliana]
  misc_feature (72)..(94): Homolog of NCBI NO: 15219429 NR Description: putative serine carboxypeptidase; protein id: [Arabidopsis thaliana] >gi|25289788|pir||A96759 protein serine
  misc_feature (76)..(94): Homolog of NCBI NO: 15219427 NR Description: putative serine carboxypeptidase; protein id: [Arabidopsis thaliana] >gi|25289777|pir||H96758 protein serine
  misc_feature (76)..(94): Homolog of NCBI NO: 8777303 NR Description: serine carboxypeptidase [Arabidopsis thaliana]
FFRSSIHTFRLFHLRNCDGDKYVFQMTTAAWPRPRFLVLPQPGFLRSVCHGLCARCLFCFLLLLAFACSSSSGRVVVTSLPGFDGDLPFHLETGCACPRGVSTSSILLLLLHSFILVVYY

SEQ ID NO: 12367 - DNA, 1038 bp, Zea mays subsp. mays
  misc_feature (1)..(1038): Ceres Seq. ID no. 12353503
  misc_feature: MA Experiment ID: 20000534 Result: Down-regulated in Transcription
  misc_feature: MA Experiment 20000534 PARAMETER Experiment Name: Zm_Hybrid_Pollen_P Parameter: Age (day) Value: 8
  misc_feature: MA Experiment 20000534 PARAMETER Experiment Name: Zm_Hybrid_Pollen_P Parameter: Organism Value: Zea mays
  misc_feature: MA Experiment 20000534 PARAMETER Experiment Name: Zm_Hybrid_Pollen_P Parameter: Plant Line Value: 35A19
  misc_feature: MA Experiment 20000534 PARAMETER Experiment Name: Zm_Hybrid_Pollen_P Parameter: Tissue Value: Pollen vs. Aerial
cggatatgatgatatgtgggctaagacaattcttgaaacttacgatgcagaggaagatgatggtaggtactctggtggatcctctcctgaatcaactggttctgttgaaacctccatatcgtcccattttggaggcatgaactatccatcactgttcagttcaaaaccgtcaagtcatggggcctcacaacaaacgatacgtgaagaaccaccctcatattcgacgtcagtactacagaggaaggaatcatttgaaaacccccttggagggggtggaggacgaagtttcggatcccacgaggatgaagataagagttctggtaaccctcagtctgggaaagctttgtatgacttcacagcaggcggtgatgatgagctgagtttaaactctggagaagaagtggagattgaatacgaggtcgatggttggtattatgtgaagaaaaggaggcctggaagggatggaaagatggcaggtctggttcctgttctgtatgtgagttcatgataacagccgtgtgtatcgtttcccacacttgtggaagctgtttggagttcatgggcttaacaaaaaggcacactggaatgctcccgagagatcttcgcataaactcgtgcccgtcgtataggcacgtggccttgtggaagcaggtcatatccagtcatcttggggttcgtatgatgctgcagtgctgttcctgggaaagatttacgtgttgatttgtctggacccacaccactagtcattcaattgattgttttttgttgctaaggtggagactcttcagaggttaaaccgttcatctgtgccattttgctgccgtctgtgttcaagaaggcaatttcgtcgtctccagttcgtgttgtgcgatatatattctagtaaaattgtagaggcatcatttccccggcatatattattttggtcgtgtatggtgtgattctggtggtaaaatagtgtcattaatgttgtgtatatttgtttccgggtggattacagagtatataactataagggggtgtttggtttaagaaatc

SEQ ID NO: 12368 - protein, 168 aa, Zea mays subsp. mays
  peptide (1)..(168): Ceres Seq. ID no. 12353504
  misc_feature (112)..(167): Pfam Name: SH3 domain Pfam Description: SH3 domain
  misc_feature (18)..(168): Homolog of NCBI NO: 34902004 NR Description: unknown protein [Oryza sativa (japonica
  misc_feature (1)..(167): Homolog of NCBI NO: 15225702 NR Description: unknown protein; protein id: At2g07360.1
  misc_feature (1)..(167): Homolog of NCBI NO: 29824397 NR Description: unknown protein [Arabidopsis thaliana]
GYDDMWAKTILETYDAEEDDGRYSGGSSPESTGSVETSISSHFGGMNYPSLFSSKPSSHGASQQTIREEPPSYSTSVLQRKESFENPLGGGGGRSFGSHEDEDKSSGNPQSGKALYDFTAGGDDELSLNSGEEVEIEYEVDGWYYVKKRRPGRDGKMAGLVPVLYVSS

SEQ ID NO: 12369 - protein, 164 aa, Zea mays subsp. mays
  peptide (1)..(164): Ceres Seq. ID no. 12353505
  misc_feature (108)..(163): Pfam Name: SH3 domain Pfam Description: SH3 domain
  misc_feature (14)..(164): Homolog of NCBI NO: 34902004 NR Description: unknown protein [Oryza sativa (japonica
  misc_feature (1)..(163): Homolog of NCBI NO: 15225702 NR Description: unknown protein; protein id: At2g07360.1
  misc_feature (1)..(163): Homolog of NCBI NO: 29824397 NR Description: unknown protein [Arabidopsis thaliana]
MWAKTILETYDAEEDDGRYSGGSSPESTGSVETSISSHFGGMNYPSLFSSKPSSHGASQQTIREEPPSYSTSVLQRKESFENPLGGGGGRSFGSHEDEDKSSGNPQSGKALYDFTAGGDDELSLNSGEEVEIEYEVDGWYYVKKRRPGRDGKMAGLVPVLYVSS

SEQ ID NO: 12370 - protein, 123 aa, Zea mays subsp. mays
  peptide (1)..(123): Ceres Seq. ID no. 12353506
  misc_feature (67)..(122): Pfam Name: SH3 domain Pfam Description: SH3 domain
  misc_feature (1)..(123): Homolog of NCBI NO: 34902004 NR Description: unknown protein [Oryza sativa (japonica
  misc_feature (1)..(122): Homolog of NCBI NO: 15225702 NR Description: unknown protein; protein id: At2g07360.1
  misc_feature (1)..(122): Homolog of NCBI NO: 29824397 NR Description: unknown protein [Arabidopsis thaliana]
MNYPSLFSSKPSSHGASQQTIREEPPSYSTSVLQRKESFENPLGGGGGRSFGSHEDEDKSSGNPQSGKALYDFTAGGDDELSLNSGEEVEIEYEVDGWYYVKKRRPGRDGKMAGLVPVLYVSS

SEQ ID NO: 12371 - DNA, 1160 bp, Zea mays subsp. mays
  misc_feature (1)..(1160): Ceres Seq. ID no. 12413910
  misc_feature: MA Experiment ID: 108522 Result: Down-regulated in Transcription
  misc_feature: MA Experiment 108522 PARAMETER Experiment Name: Zm_42deg_Heat_P Parameter: Age (day) Value: 8
  misc_feature: MA Experiment 108522 PARAMETER Experiment Name: Zm_42deg_Heat_P Parameter: Organism Value: Zea mays
  misc_feature: MA Experiment 108522 PARAMETER Experiment Name: Zm_42deg_Heat_P Parameter: Plant Line Value: 35A19
  misc_feature: MA Experiment 108522 PARAMETER Experiment Name: Zm_42deg_Heat_P Parameter: Temperature (deg C) Value: 42 vs. 22
  misc_feature: MA Experiment 108522 PARAMETER Experiment Name: Zm_42deg_Heat_P Parameter: Timepoint (hr) Value: 1
  misc_feature: MA Experiment 108522 PARAMETER Experiment Name: Zm_42deg_Heat_P Parameter: Tissue Value: Aerial
acctccaccacctgccgcgccggccggcgagcctcttcctcttcctccggtcgctccccttcccatctccatcttgatttcgattctctggtggctgggaaagcctgcgagagcgcgataaccggaaagatctgagctgctgcaaccgatctccggcgccatggggttcctcgaggacttccaagccagtgttgaagcattgccatctatgctgcatcggaactattcattaatgcgagagttggataaaagtttgcatggtgtgcaactagaaaatgagcagcgctgtcaacaagaaatagaggacattaagcatggacttgaatctggaagtattacatatgacccagcaaaattgaaattttccgaagaagcaatggaggagcagaaacattgtgttagaattgctgacgagaaggtggctttagccactcagacttatgacttagttgatgctcacatccaacagctagatcagtttatgaggaagcttgaagaaatccggcaaggaaaagaggcagctgctgctgttactgcagggactgctgttgctactactgccactccaaccgtgaatgctggagcgacaactgctgatgctaatccgaagagtggacgatctggcgaaagaggcagagggggtcggaagaaggccaaggtacccacggagcagtcagtgccagtgccagtgccactgccacctattgacttagagttgcctgtggatcctaacgaaccgacatactgcctctgcaaccaagtcagctatggtgagatggtggcatgcgacaatcctaattgcaaaatcgagtggtatcactatggctgtgtgggcgtcaaggagcaacccaagggaaagtggtattgcccaaactgcatcggattccagaagaagcgaaaaggcaagtgatatgcagtccacaggctgctgtgctagtgtgtccttgcttgttaattgtgttgctgatgttgggtaacaaatgtagtagtagttgctgcctgtgacagtgcataccgttgtagatccagtgttctgtacatgttactcctccttcggtgctcgtagtttagggccatcaaccatttgttaacttcatggcctttttggcgattcatgccccttgtatgggtttcgcaatatcatgtctccttttcctggt

SEQ ID NO: 12372 - protein, 249 aa, Zea mays subsp. mays
  peptide (1)..(249): Ceres Seq. ID no. 12413911
  misc_feature (195)..(239): Pfam Name: PHD-finger Pfam Description: PHD-finger
  misc_feature (1)..(249): Homolog of NCBI NO: 29367421 NR Description: putative PHD-finger protein [Oryza sativa
  misc_feature (1)..(249): Homolog of NCBI NO: 18404002 NR Description: PHD-finger protein, putative; protein id: supported by cDNA: 95660. [Arabidopsis thaliana]
  misc_feature (76)..(249): Homolog of NCBI NO: 28393138 NR Description: putative PHD-finger protein [Arabidopsis thaliana]
  misc_feature (1)..(163): Homolog of NCBI NO: 19921252 NR Description: CG9293-PA [Drosophila melanogaster]
  misc_feature (139)..(246): Homolog of NCBI NO: 19921252 NR Description: CG9293-PA [Drosophila melanogaster]
  misc_feature (3)..(249): Homolog of NCBI NO: 21313552 NR Description: RIKEN cDNA 1810018M11 [Mus musculus] unnamed protein product [Mus musculus]
  misc_feature (3)..(246): Homolog of NCBI NO: 26327491 NR Description: unnamed protein product [Mus musculus]
  misc_feature (3)..(246): Homolog of NCBI NO: 19111152 NR Description: ING1-like protein; DNA segment, Chr 6, Wayne University 147, expressed [Mus musculus] unnamed protein product [Mus musculus]
  misc_feature (3)..(246): Homolog of NCBI NO: 34858458 NR Description: similar to ING1-like protein; DNA segment, Chr 6,
  misc_feature (3)..(249): Homolog of NCBI NO: 18644730 NR Description: p28 ING5 [Homo sapiens] p28 ING5 [Homo sapiens] >gi|18677022|dbj|BAB85078.1| unnamed
MGFLEDFQASVEALPSMLHRNYSLMRELDKSLHGVQLENEQRCQQEIEDIKHGLESGSITYDPAKLKFSEEAMEEQKHCVRIADEKVALATQTYDLVDAHIQQLDQFMRKLEEIRQGKEAAAAVTAGTAVATTATPTVNAGATTADANPKSGRSGERGRGGRKKAKVPTEQSVPVPVPLPPIDLELPVDPNEPTYCLCNQVSYGEMVACDNPNCKIEWYHYGCVGVKEQPKGKWYCPNCIGFQKKRKGK

SEQ ID NO: 12373 - protein, 233 aa, Zea mays subsp. mays
  peptide (1)..(233): Ceres Seq. ID no. 12413912
  misc_feature (179)..(223): Pfam Name: PHD-finger Pfam Description: PHD-finger
  misc_feature (1)..(233): Homolog of NCBI NO: 29367421 NR Description: putative PHD-finger protein [Oryza sativa
  misc_feature (1)..(233): Homolog of NCBI NO: 18404002 NR Description: PHD-finger protein, putative; protein id: supported by cDNA: 95660. [Arabidopsis thaliana]
  misc_feature (60)..(233): Homolog of NCBI NO: 28393138 NR Description: putative PHD-finger protein [Arabidopsis thaliana]
  misc_feature (1)..(147): Homolog of NCBI NO: 19921252 NR Description: CG9293-PA [Drosophila melanogaster]
  misc_feature (123)..(230): Homolog of NCBI NO: 19921252 NR Description: CG9293-PA [Drosophila melanogaster]
  misc_feature (1)..(233): Homolog of NCBI NO: 21313552 NR Description: RIKEN cDNA 1810018M11 [Mus musculus] unnamed protein product [Mus musculus]
  misc_feature (1)..(230): Homolog of NCBI NO: 26327491 NR Description: unnamed protein product [Mus musculus]
  misc_feature (1)..(230): Homolog of NCBI NO: 19111152 NR Description: ING1-like protein; DNA segment, Chr 6, Wayne University 147, expressed [Mus musculus] unnamed protein product [Mus musculus]
  misc_feature (1)..(230): Homolog of NCBI NO: 34858458 NR Description: similar to ING1-like protein; DNA segment, Chr 6,
  misc_feature (1)..(233): Homolog of NCBI NO: 18644730 NR Description: p28 ING5 [Homo sapiens] p28 ING5 [Homo sapiens] >gi|18677022|dbj|BAB85078.1| unnamed
MLHRNYSLMRELDKSLHGVQLENEQRCQQEIEDIKHGLESGSITYDPAKLKFSEEAMEEQKHCVRIADEKVALATQTYDLVDAHIQQLDQFMRKLEEIRQGKEAAAAVTAGTAVATTATPTVNAGATTADANPKSGRSGERGRGGRKKAKVPTEQSVPVPVPLPPIDLELPVDPNEPTYCLCNQVSYGEMVACDNPNCKIEWYHYGCVGVKEQPKGKWYCPNCIGFQKKRKGK

SEQ ID NO: 12374 - protein, 225 aa, Zea mays subsp. mays
  peptide (1)..(225): Ceres Seq. ID no. 12413913
  misc_feature (171)..(215): Pfam Name: PHD-finger Pfam Description: PHD-finger
  misc_feature (1)..(225): Homolog of NCBI NO: 29367421 NR Description: putative PHD-finger protein [Oryza sativa
  misc_feature (1)..(225): Homolog of NCBI NO: 18404002 NR Description: PHD-finger protein, putative; protein id: supported by cDNA: 95660. [Arabidopsis thaliana]
  misc_feature (52)..(225): Homolog of NCBI NO: 28393138 NR Description: putative PHD-finger protein [Arabidopsis thaliana]
  misc_feature (1)..(139): Homolog of NCBI NO: 19921252 NR Description: CG9293-PA [Drosophila melanogaster]
  misc_feature (115)..(222): Homolog of NCBI NO: 19921252 NR Description: CG9293-PA [Drosophila melanogaster]
  misc_feature (1)..(225): Homolog of NCBI NO: 21313552 NR Description: RIKEN cDNA 1810018M11 [Mus musculus] unnamed protein product [Mus musculus]
  misc_feature (1)..(222): Homolog of NCBI NO: 26327491 NR Description: unnamed protein product [Mus musculus]
  misc_feature (1)..(222): Homolog of NCBI NO: 19111152 NR Description: ING1-like protein; DNA segment, Chr 6, Wayne University 147, expressed [Mus musculus] unnamed protein product [Mus musculus]
  misc_feature (1)..(222): Homolog of NCBI NO: 34858458 NR Description: similar to ING1-like protein; DNA segment, Chr 6,
  misc_feature (1)..(225): Homolog of NCBI NO: 18644730 NR Description: p28 ING5 [Homo sapiens] p28 ING5 [Homo sapiens] >gi|18677022|dbj|BAB85078.1| unnamed
MRELDKSLHGVQLENEQRCQQEIEDIKHGLESGSITYDPAKLKFSEEAMEEQKHCVRIADEKVALATQTYDLVDAHIQQLDQFMRKLEEIRQGKEAAAAVTAGTAVATTATPTVNAGATTADANPKSGRSGERGRGGRKKAKVPTEQSVPVPVPLPPIDLELPVDPNEPTYCLCNQVSYGEMVACDNPNCKIEWYHYGCVGVKEQPKGKWYCPNCIGFQKKRKGK

SEQ ID NO: 12375 - DNA, 1009 bp, Zea mays subsp. mays
  misc_feature (1)..(1009): Ceres Seq. ID no. 12349674
  misc_feature: MA Experiment ID: 108529 Result: Up-regulated in Transcription
  misc_feature: MA Experiment 108529 PARAMETER Experiment Name: Zm_Imbibed_Seeds_P Parameter: Age (day) Value: 5 vs. 2
  misc_feature: MA Experiment 108529 PARAMETER Experiment Name: Zm_Imbibed_Seeds_P Parameter: Organism Value: Zea mays
  misc_feature: MA Experiment 108529 PARAMETER Experiment Name: Zm_Imbibed_Seeds_P Parameter: Plant Line Value: 35A19
  misc_feature: MA Experiment 108529 PARAMETER Experiment Name: Zm_Imbibed_Seeds_P Parameter: Tissue Value: Roots vs. Embryo
  misc_feature: MA Experiment ID: 108530 Result: Up-regulated in Transcription
  misc_feature: MA Experiment 108530 PARAMETER Experiment Name: Zm_Imbibed_Seeds_P Parameter: Age (day) Value: 6 vs. 2
  misc_feature: MA Experiment 108530 PARAMETER Experiment Name: Zm_Imbibed_Seeds_P Parameter: Organism Value: Zea mays
  misc_feature: MA Experiment 108530 PARAMETER Experiment Name: Zm_Imbibed_Seeds_P Parameter: Plant Line Value: 35A19
  misc_feature: MA Experiment 108530 PARAMETER Experiment Name: Zm_Imbibed_Seeds_P Parameter: Tissue Value: Aerial vs. Embryo
  misc_feature: MA Experiment ID: 108535 Result: Down-regulated in Transcription
  misc_feature: MA Experiment 108535 PARAMETER Experiment Name: Zm_Meristem_P Parameter: Age (day) Value: 8
  misc_feature: MA Experiment 108535 PARAMETER Experiment Name: Zm_Meristem_P Parameter: Organism Value: Zea mays
  misc_feature: MA Experiment 108535 PARAMETER Experiment Name: Zm_Meristem_P Parameter: Plant Line Value: 35A19
  misc_feature: MA Experiment 108535 PARAMETER Experiment Name: Zm_Meristem_P Parameter: Tissue Value: Root Meristem vs. Above Root Meristem
  misc_feature: MA Experiment ID: 108687 Result: Down-regulated in Transcription
  misc_feature: MA Experiment 108687 PARAMETER Experiment Name: Zm_Embryos-Flowers__P Parameter: Tissue Value: Embryo vs. Aerial+
  misc_feature: MA Experiment ID: 20000492 Result: Down-regulated in Transcription
  misc_feature: MA Experiment 20000492 PARAMETER Experiment Name: Zm_Hybrid_Seed_Dev_P Parameter: DAP Value: 12
  misc_feature: MA Experiment 20000492 PARAMETER Experiment Name: Zm_Hybrid_Seed_Dev_P Parameter: Organism Value: Zea mays
  misc_feature: MA Experiment 20000492 PARAMETER Experiment Name: Zm_Hybrid_Seed_Dev_P Parameter: Plant Line Value: 35A19
  misc_feature: MA Experiment 20000492 PARAMETER Experiment Name: Zm_Hybrid_Seed_Dev_P Parameter: Tissue Value: Fert Kernel vs. Unfert Floret
  misc_feature: MA Experiment ID: 20000535 Result: Down-regulated in Transcription
  misc_feature: MA Experiment 20000535 PARAMETER Experiment Name: Zm_Hybrid_Seed_Dev_P Parameter: DAP Value: 30 vs. 12
  misc_feature: MA Experiment 20000535 PARAMETER Experiment Name: Zm_Hybrid_Seed_Dev_P Parameter: Organism Value: Zea mays
  misc_feature: MA Experiment 20000535 PARAMETER Experiment Name: Zm_Hybrid_Seed_Dev_P Parameter: Plant Line Value: 35A19
  misc_feature: MA Experiment 20000535 PARAMETER Experiment Name: Zm_Hybrid_Seed_Dev_P Parameter: Tissue Value: Embryo vs. Unfert Floret
aaaacatcaaccccaaccccaacgactccaagtcaagagagcggcaagagcacgtgccggccgccgatcaaatccaccgagcaatcgcgcgcggccgccgagctgccaaggcggcggcggcggtcggtcggtctgcgatatacgatggcggcggcctactacggaggtcctccggcggcgccggcggcgccggcccccgtggcggtggtgtccccgcagttctgtgcgccgtacgtggtgcccctgacggtgaccaagaaggccatcagcctctccgacggagacttcaccatcaccgacgccaacggcgccaccgtgctgcaggtcaagggcgccgtcttcagtatccgccaccgccgcgtcctccttgacgccgccggccagcccatcctcaccatgctggagaaggtattcagcatgcacaacagatgggaggtgttcagaggggacagctcgaacgagagcgacctgctcttcaccgcgaagaaatcctcgatattccagctgaagacggagatggacatcttcctggcctccaacaccgcgcagcaggcgtgcgacttcaagatcaagggcagctacttcgagaggtcgtgcgccttctacctcggcaactccagcagcatgatcgcccagatgaaccgccagtttaccgtcaccaatgtgctgcttggaagggacacgtttggcgtcactgtgttcccgcacgttgactacgtgttcgtcgctgctcttgttgtgatactggatgagattcatagggaacggtccgactgaggaacacaccacaccaccaagcttctccaccgttgctcgaccatgctatgcgcatgtatcatcatcactgcaggttattcttgtcaattatatatatactttccatgtatgtatgtaagtattaatgggttaatacactacctcccgatgtatttgttttatatatgtttgaatatagacataaaaaccaaacagctattattttgagatgaaaggagtactatttagtgtc

SEQ ID NO: 12376 - protein, 258 aa, Zea mays subsp. mays
  peptide (1)..(258): Ceres Seq. ID no. 12349675
  misc_feature (69)..(248): Pfam Name: Protein of unknown function (DUF567) Pfam Description: Protein of unknown function (DUF567)
  misc_feature (57)..(258): Homolog of NCBI NO: 27818079 NR Description: OSJNBa0086N05.7 [Oryza sativa (japonica
  misc_feature (47)..(255): Homolog of NCBI NO: 30679390 NR Description: expressed protein [Arabidopsis thaliana]
  misc_feature (56)..(249): Homolog of NCBI NO: 9665105 NR Description: Hypothetical protein [Arabidopsis thaliana]
  misc_feature (66)..(258): Homolog of NCBI NO: 17979321 NR Description: unknown protein [Arabidopsis thaliana]
  misc_feature (66)..(258): Homolog of NCBI NO: 15225960 NR Description: unknown protein; protein id: At2g14560.1, by cDNA: gi_17979320 [Arabidopsis thaliana]
  misc_feature (47)..(213): Homolog of NCBI NO: 18413737 NR Description: expressed protein; protein id: At5g01750.1,
  misc_feature (69)..(249): Homolog of NCBI NO: 15217694 NR Description: unknown protein; protein id: At1g33840.1
  misc_feature (47)..(213): Homolog of NCBI NO: 21553506 NR Description: unknown [Arabidopsis thaliana]
  misc_feature (56)..(217): Homolog of NCBI NO: 25352417 NR Description: hypothetical protein T3M13.14 - Arabidopsis
  misc_feature (69)..(253): Homolog of NCBI NO: 15228906 NR Description: hypothetical protein; protein id: At3g16900.1 thaliana] >gi|7670020|dbj|BAA94974.1|
KTSTPTPTTPSQESGKSTCRPPIKSTEQSRAAAELPRRRRRSVGLRYTMAAAYYGGPPAAPAAPAPVAVVSPQFCAPYVVPLTVTKKAISLSDGDFTITDANGATVLQVKGAVFSIRHRRVLLDAAGQPILTMLEKVFSMHNRWEVFRGDSSNESDLLFTAKKSSIFQLKTEMDIFLASNTAQQACDFKIKGSYFERSCAFYLGNSSSMIAQMNRQFTVTNVLLGRDTFGVTVFPHVDYVFVAALVVILDEIHRERSD

SEQ ID NO: 12377 - protein, 210 aa, Zea mays subsp. mays
  peptide (1)..(210): Ceres Seq. ID no. 12349676
  misc_feature (21)..(200): Pfam Name: Protein of unknown function (DUF567) Pfam Description: Protein of unknown function (DUF567)
  misc_feature (9)..(210): Homolog of NCBI NO: 27818079 NR Description: OSJNBa0086N05.7 [Oryza sativa (japonica
  misc_feature (1)..(207): Homolog of NCBI NO: 30679390 NR Description: expressed protein [Arabidopsis thaliana]
  misc_feature (8)..(201): Homolog of NCBI NO: 9665105 NR Description: Hypothetical protein [Arabidopsis thaliana]
  misc_feature (18)..(210): Homolog of NCBI NO: 17979321 NR Description: unknown protein [Arabidopsis thaliana]
  misc_feature (18)..(210): Homolog of NCBI NO: 15225960 NR Description: unknown protein; protein id: At2g14560.1, by cDNA: gi_17979320 [Arabidopsis thaliana]
  misc_feature (1)..(165): Homolog of NCBI NO: 18413737 NR Description: expressed protein; protein id: At5g01750.1,
  misc_feature (21)..(201): Homolog of NCBI NO: 15217694 NR Description: unknown protein; protein id: At1g33840.1
  misc_feature (1)..(165): Homolog of NCBI NO: 21553506 NR Description: unknown [Arabidopsis thaliana]
  misc_feature (8)..(169): Homolog of NCBI NO: 25352417 NR Description: hypothetical protein T3M13.14 - Arabidopsis
  misc_feature (21)..(205): Homolog of NCBI NO: 15228906 NR Description: hypothetical protein; protein id: At3g16900.1 thaliana] >gi|7670020|dbj|BAA94974.1|
MAAAYYGGPPAAPAAPAPVAVVSPQFCAPYVVPLTVTKKAISLSDGDFTITDANGATVLQVKGAVFSIRHRRVLLDAAGQPILTMLEKVFSMHNRWEVFRGDSSNESDLLFTAKKSSIFQLKTEMDIFLASNTAQQACDFKIKGSYFERSCAFYLGNSSSMIAQMNRQFTVTNVLLGRDTFGVTVFPHVDYVFVAALVVILDEIHRERSD

SEQ ID NO: 12378 - DNA, 1116 bp, Zea mays subsp. mays
  misc_feature (1)..(1116): Ceres Seq. ID no. 12367240
  misc_feature: MA Experiment ID: 108543 Result: Up-regulated in Transcription
  misc_feature: MA Experiment ID: 108689 Result: Down-regulated in Transcription
  misc_feature: MA Experiment 108689 PARAMETER Experiment Name: Zm_Drought_Roots_P Parameter: Age (day) Value: 9
  misc_feature: MA Experiment 108689 PARAMETER Experiment Name: Zm_Drought_Roots_P Parameter: Organism Value: Zea mays
  misc_feature: MA Experiment 108689 PARAMETER Experiment Name: Zm_Drought_Roots_P Parameter: Plant Line Value: 35A19
  misc_feature: MA Experiment 108689 PARAMETER Experiment Name: Zm_Drought_Roots_P Parameter: Timepoint (hr) Value: 24
  misc_feature: MA Experiment 108689 PARAMETER Experiment Name: Zm_Drought_Roots_P Parameter: Tissue Value: Roots
  misc_feature: MA Experiment 108689 PARAMETER Experiment Name: Zm_Drought_Roots_P Parameter: Treatment Value: Drought vs. No Drought
  misc_feature: MA Experiment ID: 20000478 Result: Down-regulated in Transcription
  misc_feature: MA Experiment 20000478 PARAMETER Experiment Name: Zm_5mM_SA_P Parameter: Age (day) Value: 11
  misc_feature: MA Experiment 20000478 PARAMETER Experiment Name: Zm_5mM_SA_P Parameter: Organism Value: Zea mays
  misc_feature: MA Experiment 20000478 PARAMETER Experiment Name: Zm_5mM_SA_P Parameter: Plant Line Value: 35A19
  misc_feature: MA Experiment 20000478 PARAMETER Experiment Name: Zm_5mM_SA_P Parameter: Timepoint (hr) Value: 72
  misc_feature: MA Experiment 20000478 PARAMETER Experiment Name: Zm_5mM_SA_P Parameter: Tissue Value: Aerial
  misc_feature: MA Experiment 20000478 PARAMETER Experiment Name: Zm_5mM_SA_P Parameter: Treatment Value: 5mM SA vs. No Treatment
  misc_feature: MA Experiment ID: 20000479 Result: Down-regulated in Transcription
  misc_feature: MA Experiment 20000479 PARAMETER Experiment Name: Zm_Drought_P Parameter: Age (day) Value: 10
  misc_feature: MA Experiment 20000479 PARAMETER Experiment Name: Zm_Drought_P Parameter: Organism Value: Zea mays
  misc_feature: MA Experiment 20000479 PARAMETER Experiment Name: Zm_Drought_P Parameter: Plant Line Value: 35A19
  misc_feature: MA Experiment 20000479 PARAMETER Experiment Name: Zm_Drought_P Parameter: Timepoint (hr) Value: 48
  misc_feature: MA Experiment 20000479 PARAMETER Experiment Name: Zm_Drought_P Parameter: Tissue Value: Aerial
  misc_feature: MA Experiment 20000479 PARAMETER Experiment Name: Zm_Drought_P Parameter: Treatment Value: Drought vs. No Drought
  misc_feature: MA Experiment ID: 20000480 Result: Down-regulated in Transcription
  misc_feature: MA Experiment 20000480 PARAMETER Experiment Name: Zm_Drought_P Parameter: Age (day) Value: 11
  misc_feature: MA Experiment 20000480 PARAMETER Experiment Name: Zm_Drought_P Parameter: Organism Value: Zea mays
  misc_feature: MA Experiment 20000480 PARAMETER Experiment Name: Zm_Drought_P Parameter: Plant Line Value: 35A19
  misc_feature: MA Experiment 20000480 PARAMETER Experiment Name: Zm_Drought_P Parameter: Timepoint (hr) Value: 72
  misc_feature: MA Experiment 20000480 PARAMETER Experiment Name: Zm_Drought_P Parameter: Tissue Value: Aerial
  misc_feature: MA Experiment 20000480 PARAMETER Experiment Name: Zm_Drought_P Parameter: Treatment Value: Drought vs. No Drought
  misc_feature: MA Experiment ID: 20000535 Result: Down-regulated in Transcription
  misc_feature: MA Experiment 20000535 PARAMETER Experiment Name: Zm_Hybrid_Seed_Dev_P Parameter: DAP Value: 30 vs. 12
  misc_feature: MA Experiment 20000535 PARAMETER Experiment Name: Zm_Hybrid_Seed_Dev_P Parameter: Organism Value: Zea mays
  misc_feature: MA Experiment 20000535 PARAMETER Experiment Name: Zm_Hybrid_Seed_Dev_P Parameter: Plant Line Value: 35A19
  misc_feature: MA Experiment 20000535 PARAMETER Experiment Name: Zm_Hybrid_Seed_Dev_P Parameter: Tissue Value: Embryo vs. Unfert Floret
  misc_feature: MA Experiment ID: 20000626 Result: Down-regulated in Transcription
  misc_feature: MA Experiment 20000626 PARAMETER Experiment Name: Zm_Herbicide-Treatments_P Parameter: Timepoint (hr) Value: 12
  misc_feature: MA Experiment 20000626 PARAMETER Experiment Name: Zm_Herbicide-Treatments_P Parameter: Tissue Value: Aerial
  misc_feature: MA Experiment 20000626 PARAMETER Experiment Name: Zm_Herbicide-Treatments_P Parameter: Treatment Value: Roundup vs. No Treatment
aacacacacattctgcgtggatttggctcgggggtcccgacagatctcagatgagagatctcgggcgttaggtttctggagcgtgctaatgaggtgctgatttggtgctgtgcagaatggaggcggaggagcgcgtggcggaggcgtcaagccgcagtacgggttccggccgacggagcccgcggggttcggcggcggcaggggcgatgcgaccaccgacatccctctggacaccatgaacgattcgaagggcaaggcgaaggagctgtctcagtgggagtcagatctcaggaggagggagtcggatatcaggaggagggaggaagctctcaagagcgctggggtgcccatggaggacaagaactggccgcctttcttcccaatcatccaccatgatattgccaatgagataccagcaaacgctcagaagttgcagtatcttgcgtttgcgagctggcttggtattgtgctttgcctcttttggaattttattgctgtcatagtctgttggatcagagggggagattctaaactatttttcctggctaccatctatggtatgcttggcatccctttgtcctacttgatgtggtatagacctctgtaccgagcaatgagaactgacagtgctttcagctttggatggtttttcctttgttacctgctccatattggtttttgcatatttgctgccattgctcctgcagttgtattccgtggaaaatcattaacgggtatactggcagcgatcgacaccttttctgatcatgcaatagttgggatcttttactttgtcggatttgccttgttttgcttggagacacttgtgagcatatgggttcttcagaaagtatacatgtacttcagagggcacaagtaggctatggaagcacttgcaatagtcaaccaactaccatctcatctgattgccatgtggttttgtatgttaggacaacgtatatttttccgtttgcattgtggagggtaagtacgactatatgtataattttcggtttgcatggtggagggtaaatacgactatattgtagcgtctctctcgactgatctgtttttaaccccaattctttgctcatatacaaattgtgctttgtatgc

SEQ ID NO: 12379 - protein, 214 aa, Zea mays subsp. mays
  peptide (1)..(214): Ceres Seq. ID no. 12367241
  misc_feature (40)..(214): Pfam Name: SCAMP family Pfam Description: SCAMP family
  misc_feature (1)..(214): Homolog of NCBI NO: 38347080 NR Description: OSJNBa0006A01.21 [Oryza sativa (japonica
  misc_feature (1)..(214): Homolog of NCBI NO: 15222550 NR Description: secretory carrier membrane protein, putative; id: At1g32050.1, supported by cDNA: 34837. [Arabidopsis thaliana]
  misc_feature (1)..(204): Homolog of NCBI NO: 38567965 NR Description: OSJNBa0093F12.6 [Oryza sativa (japonica
  misc_feature (1)..(212): Homolog of NCBI NO: 15219893 NR Description: secretory carrier membrane protein; protein id: supported by cDNA: 27197., supported by cDNA: gi_15027862, by cDNA: gi_19310672, supported by cDNA: gi_7109227 [Arabidopsis
  misc_feature (1)..(214): Homolog of NCBI NO: 15226410 NR Description: putative secretory carrier-associated membrane protein id: At2g20840.1 [Arabidopsis thaliana]
  misc_feature (1)..(212): Homolog of NCBI NO: 3941289 NR Description: similarity to SCAMP37 [Pisum sativum]
  misc_feature (1)..(212): Homolog of NCBI NO: 15220305 NR Description: secretory carrier membrane protein, putative;
  misc_feature (1)..(214): Homolog of NCBI NO: 7109232 NR Description: secretory carrier membrane protein [Oryza sativa]
  misc_feature (1)..(214): Homolog of NCBI NO: 34899754 NR Description: putative secretory carrier membrane protein
  misc_feature (1)..(214): Homolog of NCBI NO: 18379111 NR Description: expressed protein; protein id: At1g03550.1, by cDNA: 30006. [Arabidopsis thaliana] F21B7.17 [Arabidopsis thaliana] >gi|21592580|gb|AAM64529.1|
MNDSKGKAKELSQWESDLRRRESDIRRREEALKSAGVPMEDKNWPPFFPIIHHDIANEIPANAQKLQYLAFASWLGIVLCLFWNFIAVIVCWIRGGDSKLFFLATIYGMLGIPLSYLMWYRPLYRAMRTDSAFSFGWFFLCYLLHIGFCIFAAIAPAVVFRGKSLTGILAAIDTFSDHAIVGIFYFVGFALFCLETLVSIWVLQKVYMYFRGHK

SEQ ID NO: 12380 - protein, 176 aa, Zea mays subsp. mays; identical to SEQ ID NO: 6569
  peptide (1)..(176): Ceres Seq. ID no. 12367242
  misc_feature (2)..(176): Pfam Name: SCAMP family Pfam Description: SCAMP family
  misc_feature (1)..(174): Homolog of NCBI NO: 3941289 NR Description: similarity to SCAMP37 [Pisum sativum]
  misc_feature (1)..(174): Homolog of NCBI NO: 15220305 NR Description: secretory carrier membrane protein, putative;
  misc_feature (1)..(176): Homolog of NCBI NO: 7109232 NR Description: secretory carrier membrane protein [Oryza sativa]
  misc_feature (1)..(176): Homolog of NCBI NO: 15222550 NR Description: secretory carrier membrane protein, putative; id: At1g32050.1, supported by cDNA: 34837. [Arabidopsis thaliana]
  misc_feature (1)..(174): Homolog of NCBI NO: 15219893 NR Description: secretory carrier membrane protein; protein id: supported by cDNA: 27197., supported by cDNA: gi_15027862, by cDNA: gi_19310672, supported by cDNA: gi_7109227 [Arabidopsis
  misc_feature (1)..(176): Homolog of NCBI NO: 15226410 NR Description: putative secretory carrier-associated membrane protein id: At2g20840.1 [Arabidopsis thaliana]
  misc_feature (1)..(166): Homolog of NCBI NO: 38567965 NR Description: OSJNBa0093F12.6 [Oryza sativa (japonica
  misc_feature (1)..(176): Homolog of NCBI NO: 38347080 NR Description: OSJNBa0006A01.21 [Oryza sativa (japonica
  misc_feature (1)..(176): Homolog of NCBI NO: 34899754 NR Description: putative secretory carrier membrane protein
  misc_feature (1)..(176): Homolog of NCBI NO: 18379111 NR Description: expressed protein; protein id: At1g03550.1, by cDNA: 30006. [Arabidopsis thaliana] F21B7.17 [Arabidopsis thaliana] >gi|21592580|gb|AAM64529.1|

SEQ ID NO: 12381 - DNA, 1636 bp, Zea mays subsp. mays
  misc_feature (1)..(1636): Ceres Seq. ID no. 12372649
  misc_feature: MA Experiment ID: 108504 Result: Down-regulated in Transcription
  misc_feature: MA Experiment 108504 PARAMETER Experiment Name: Zm_Drought_P Parameter: Age (day) Value: 8
  misc_feature: MA Experiment 108504 PARAMETER Experiment Name: Zm_Drought_P Parameter: Organism Value: Zea mays
  misc_feature: MA Experiment 108504 PARAMETER Experiment Name: Zm_Drought_P Parameter: Plant Line Value: 35A19
  misc_feature: MA Experiment 108504 PARAMETER Experiment Name: Zm_Drought_P Parameter: Timepoint (hr) Value: 12
  misc_feature: MA Experiment 108504 PARAMETER Experiment Name: Zm_Drought_P Parameter: Tissue Value: Aerial
  misc_feature: MA Experiment 108504 PARAMETER Experiment Name: Zm_Drought_P Parameter: Treatment Value: Drought vs. No Drought
  misc_feature: MA Experiment ID: 108522 Result: Up-regulated in Transcription
  misc_feature: MA Experiment 108522 PARAMETER Experiment Name: Zm_42deg_Heat_P Parameter: Age (day) Value: 8
  misc_feature: MA Experiment 108522 PARAMETER Experiment Name: Zm_42deg_Heat_P Parameter: Organism Value: Zea mays
  misc_feature: MA Experiment 108522 PARAMETER Experiment Name: Zm_42deg_Heat_P Parameter: Plant Line Value: 35A19
  misc_feature: MA Experiment 108522 PARAMETER Experiment Name: Zm_42deg_Heat_P Parameter: Temperature (deg C) Value: 42 vs. 22
  misc_feature: MA Experiment 108522 PARAMETER Experiment Name: Zm_42deg_Heat_P Parameter: Timepoint (hr) Value: 1
  misc_feature: MA Experiment 108522 PARAMETER Experiment Name: Zm_42deg_Heat_P Parameter: Tissue Value: Aerial
  misc_feature: MA Experiment ID: 108527 Result: Down-regulated in Transcription
  misc_feature: MA Experiment 108527 PARAMETER Experiment Name: Zm_5mM_NO_P Parameter: Age (day) Value: 8
  misc_feature: MA Experiment 108527 PARAMETER Experiment Name: Zm_5mM_NO_P Parameter: Organism Value: Zea mays
  misc_feature: MA Experiment 108527 PARAMETER Experiment Name: Zm_5mM_NO_P Parameter: Plant Line Value: 35A19
  misc_feature: MA Experiment 108527 PARAMETER Experiment Name: Zm_5mM_NO_P Parameter: Timepoint (hr) Value: 6
  misc_feature: MA Experiment 108527 PARAMETER Experiment Name: Zm_5mM_NO_P Parameter: Tissue Value: Aerial
  misc_feature: MA Experiment 108527 PARAMETER Experiment Name: Zm_5mM_NO_P Parameter: Treatment Value: 5mM NO vs. No Treatment
  misc_feature: MA Experiment ID: 108530 Result: Down-regulated in Transcription
  misc_feature: MA Experiment 108530 PARAMETER Experiment Name: Zm_Imbibed_Seeds_P Parameter: Age (day) Value: 6 vs. 2
  misc_feature: MA Experiment 108530 PARAMETER Experiment Name: Zm_Imbibed_Seeds_P Parameter: Organism Value: Zea mays
  misc_feature: MA Experiment 108530 PARAMETER Experiment Name: Zm_Imbibed_Seeds_P Parameter: Plant Line Value: 35A19
  misc_feature: MA Experiment 108530 PARAMETER Experiment Name: Zm_Imbibed_Seeds_P Parameter: Tissue Value: Aerial vs. Embryo
  misc_feature: MA Experiment ID: 108535 Result: Up-regulated in Transcription
  misc_feature: MA Experiment 108535 PARAMETER Experiment Name: Zm_Meristem_P Parameter: Age (day) Value: 8
  misc_feature: MA Experiment 108535 PARAMETER Experiment Name: Zm_Meristem_P Parameter: Organism Value: Zea mays
  misc_feature: MA Experiment 108535 PARAMETER Experiment Name: Zm_Meristem_P Parameter: Plant Line Value: 35A19
  misc_feature: MA Experiment 108535 PARAMETER Experiment Name: Zm_Meristem_P Parameter: Tissue Value: Root Meristem vs. Above Root Meristem
  misc_feature: MA Experiment ID: 108542 Result: Down-regulated in Transcription
  misc_feature: MA Experiment 108542 PARAMETER Experiment Name: Zm_150mM_NaCl_P Parameter: Age (day) Value: 8
  misc_feature: MA Experiment 108542 PARAMETER Experiment Name: Zm_150mM_NaCl_P Parameter: Organism Value: Zea mays
  misc_feature: MA Experiment 108542 PARAMETER Experiment Name: Zm_150mM_NaCl_P Parameter: Plant Line Value: 35A19
  misc_feature: MA Experiment 108542 PARAMETER Experiment Name: Zm_150mM_NaCl_P Parameter: Timepoint (hr) Value: 6
  misc_feature: MA Experiment 108542 PARAMETER Experiment Name: Zm_150mM_NaCl_P Parameter: Tissue Value: Aerial
  misc_feature: MA Experiment 108542 PARAMETER Experiment Name: Zm_150mM_NaCl_P Parameter: Treatment Value: 150mM NaCl vs. No Treatment
  misc_feature: MA Experiment ID: 108544 Result: Down-regulated in Transcription
  misc_feature: MA Experiment ID: 108556 Result: Down-regulated in Transcription
  misc_feature: MA Experiment 108556 PARAMETER Experiment Name: Zm_Drought_P Parameter: Age (day) Value: 9
  misc_feature: MA Experiment 108556 PARAMETER Experiment Name: Zm_Drought_P Parameter: Organism Value: Zea mays
  misc_feature: MA Experiment 108556 PARAMETER Experiment Name: Zm_Drought_P Parameter: Plant Line Value: 35A19
  misc_feature: MA Experiment 108556 PARAMETER Experiment Name: Zm_Drought_P Parameter: Timepoint (hr) Value: 24
  misc_feature: MA Experiment 108556 PARAMETER Experiment Name: Zm_Drought_P Parameter: Tissue Value: Aerial
  misc_feature: MA Experiment 108556 PARAMETER Experiment Name: Zm_Drought_P Parameter: Treatment Value: Drought vs. No Drought
  misc_feature: MA Experiment ID: 108559 Result: Down-regulated in Transcription
  misc_feature: MA Experiment 108559 PARAMETER Experiment Name: Zm_5mM_NO_P Parameter: Age (day) Value: 8
  misc_feature: MA Experiment 108559 PARAMETER Experiment Name: Zm_5mM_NO_P Parameter: Organism Value: Zea mays
  misc_feature: MA Experiment 108559 PARAMETER Experiment Name: Zm_5mM_NO_P Parameter: Plant Line Value: 35A19
  misc_feature: MA Experiment 108559 PARAMETER Experiment Name: Zm_5mM_NO_P Parameter: Timepoint (hr) Value: 12
  misc_feature: MA Experiment 108559 PARAMETER Experiment Name: Zm_5mM_NO_P Parameter: Tissue Value: Aerial
  misc_feature: MA Experiment 108559 PARAMETER Experiment Name: Zm_5mM_NO_P Parameter: Treatment Value: 5mM NO vs. No Treatment
  misc_feature: MA Experiment ID: 108597 Result: Down-regulated in Transcription
  misc_feature: MA Experiment 108597 PARAMETER Experiment Name: Zm_100uM_ABA_P Parameter: Age (day) Value: 9
  misc_feature: MA Experiment 108597 PARAMETER Experiment Name: Zm_100uM_ABA_P Parameter: Organism Value: Zea mays
  misc_feature: MA Experiment 108597 PARAMETER Experiment Name: Zm_100uM_ABA_P Parameter: Plant Line Value: 35A19
  misc_feature: MA Experiment 108597 PARAMETER Experiment Name: Zm_100uM_ABA_P Parameter: Timepoint (hr) Value: 24
  misc_feature: MA Experiment 108597 PARAMETER Experiment Name: Zm_100uM_ABA_P Parameter: Tissue Value: Aerial
  misc_feature: MA Experiment 108597 PARAMETER Experiment Name: Zm_100uM_ABA_P Parameter: Treatment Value: 100uM ABA vs. No Treatment
  misc_feature: MA Experiment ID: 20000479 Result: Down-regulated in Transcription
  misc_feature: MA Experiment 20000479 PARAMETER Experiment Name: Zm_Drought_P Parameter: Age (day) Value: 10
  misc_feature: MA Experiment 20000479 PARAMETER Experiment Name: Zm_Drought_P Parameter: Organism Value: Zea mays
  misc_feature: MA Experiment 20000479 PARAMETER Experiment Name: Zm_Drought_P Parameter: Plant Line Value: 35A19
  misc_feature: MA Experiment 20000479 PARAMETER Experiment Name: Zm_Drought_P Parameter: Timepoint (hr) Value: 48
  misc_feature: MA Experiment 20000479 PARAMETER Experiment Name: Zm_Drought_P Parameter: Tissue Value: Aerial
  misc_feature: MA Experiment 20000479 PARAMETER Experiment Name: Zm_Drought_P Parameter: Treatment Value: Drought vs. No Drought
  misc_feature: MA Experiment ID: 20000480 Result: Down-regulated in Transcription
  misc_feature: MA Experiment 20000480 PARAMETER Experiment Name: Zm_Drought_P Parameter: Age (day) Value: 11
  misc_feature: MA Experiment 20000480 PARAMETER Experiment Name: Zm_Drought_P Parameter: Organism Value: Zea mays
  misc_feature: MA Experiment 20000480 PARAMETER Experiment Name: Zm_Drought_P Parameter: Plant Line Value: 35A19
  misc_feature: MA Experiment 20000480 PARAMETER Experiment Name: Zm_Drought_P Parameter: Timepoint (hr) Value: 72
  misc_feature: MA Experiment 20000480 PARAMETER Experiment Name: Zm_Drought_P Parameter: Tissue Value: Aerial
  misc_feature: MA Experiment 20000480 PARAMETER Experiment Name: Zm_Drought_P Parameter: Treatment Value: Drought vs. No Drought
gcacgagaccattacctagaacatcctaatcgaaaagaccgatagaacacgaccttaggggttcagatcggatcggaagcttccataagtttccatcgggcgtcgccggtatggcgatccgcaaggggtcttcgtacgccgtcgcggcacttctcgcgctcgcctctgtcgccgccgtcgcaggggaggtcttcttccaggagaagttcgaagatggctgggaaagtaggtgggtcaagtctgagtggaagaaggatgagaacatggctggtgaatggaaccacacctcgggaaaatggaatggagatgccgaggacaaaggtattcaaacctccgaggattacaggttctatgccatttcagccgaataccctgagttcagcaacaaggataagaccctggtgctgcagttctctgtgaagcacgagcagaagcttgactgcggcggtggctacgtcaaattgctgggtggtggtgatgtagaccagaagaaatttggtggagacacatcttacagcattatgtttggaccagatatctgtgggtacagcaccaagaaggttcacactatcctgaccaaggatggcaagaaccacttgatcaagaaggatgtgccttgtgagactgatcagttgactcatgtttacactttgatcatccgtcctgatgcaacatacagcattctcattgataatgaagagaagcaaactggcagcatctacgagcattgggatattcttccccctaagaaaatcaaggacccagaggctaagaagcctgaggactgggatgacaaggagtacattcctgaccctgaggacaagaagccagagggctatgatgatattcccaaggaaattcctgaccctgatgctaagaagcctgaggactgggacgatgaggaagatggtgaatggactgcccctaccattcccaacccagaatacaagggaccatggaaacaaaagaaaatcaagaacccgaactaccagggtaaatggaaggcacctatgattgacaacccagattttaaggatgatccatacatttacgccttcgacagcttgaagtacattggcattgagctgtggcaggttaaatcgggcactctgtttgacaacatcatcatcactgatgaccctgcgttggccaagacttttgcagaggagacctggggcaagcacaaggaggcagaaaaggctgcttttgatgaggccgagaaaaagaaggaagaagaggatgccgccaagggtggggatgatgaggatgatgacctagaggatgaggaagacgatgagaaggcagacgaggacaaggccgactctgatgccgaggatagcaaggattctgatgatgagaagcagcacgacgagctctagatggcgaggatgatgtttcgcgccgctggcctagatttatcagctctgccactatgaagttctttttttttcccgtgaccaccaagaatgtagaacactgctaataagcagatggacagtttgggtcgccgtagcgctttgtagtcatttttcccattaaagccgataacactgaacaaggaggaaggatcttttgcccacgattgttatctccctttctgatgttaaatgtgagcctttgcggcgagtttaggttc

SEQ ID NO: 12382 - protein, 422 aa, Zea mays subsp. mays
  peptide (1)..(422): Ceres Seq. ID no. 12372650
  misc_feature (27)..(340): Pfam Name: Calreticulin family Pfam Description: Calreticulin family
  misc_feature (1)..(422): Homolog of NCBI NO: 2119370 NR Description: calreticulin precursor - maize
  misc_feature (1)..(422): Homolog of NCBI NO: 11131840 NR Description: Calreticulin precursor
  misc_feature (13)..(422): Homolog of NCBI NO: 7441498 NR Description: calreticulin - barley (fragment)
  misc_feature (10)..(422): Homolog of NCBI NO: 7441499 NR Description: calreticulin - barley (fragment)
  misc_feature (1)..(422): Homolog of NCBI NO: 11131838 NR Description: Calreticulin precursor
  misc_feature (1)..(422): Homolog of NCBI NO: 11131745 NR Description: Calreticulin precursor >gi|7441496|pir||T10172
  misc_feature (5)..(422): Homolog of NCBI NO: 11131631 NR Description: Calreticulin precursor >gi|7441494|pir||T14554
  misc_feature (1)..(422): Homolog of NCBI NO: 11131769 NR Description: Calreticulin precursor >gi|7441495|pir||T16968
  misc_feature (15)..(422): Homolog of NCBI NO: 11131949 NR Description: Calreticulin precursor >gi|4335864|gb|AAD17490.1|
  misc_feature (1)..(422): Homolog of NCBI NO: 11131904 NR Description: Calreticulin precursor
MAIRKGSSYAVAALLALASVAAVAGEVFFQEKFEDGWESRWVKSEWKKDENMAGEWNHTSGKWNGDAEDKGIQTSEDYRFYAISAEYPEFSNKDKTLVLQFSVKHEQKLDCGGGYVKLLGGGDVDQKKFGGDTSYSIMFGPDICGYSTKKVHTILTKDGKNHLIKKDVPCETDQLTHVYTLIIRPDATYSILIDNEEKQTGSIYEHWDILPPKKIKDPEAKKPEDWDDKEYIPDPEDKKPEGYDDIPKEIPDPDAKKPEDWDDEEDGEWTAPTIPNPEYKGPWKQKKIKNPNYQGKWKAPMIDNPDFKDDPYIYAFDSLKYIGIELWQVKSGTLFDNIIITDDPALAKTFAEETWGKHKEAEKAAFDEAEKKKEEEDAAKGGDDEDDDLEDEEDDEKADEDKADSDAEDSKDSDDEKQHDEL

SEQ ID NO: 12383 - protein, 371 aa, Zea mays subsp. mays
  peptide (1)..(371): Ceres Seq. ID no. 12372651
  misc_feature (1)..(289): Pfam Name: Calreticulin family Pfam Description: Calreticulin family
  misc_feature (1)..(371): Homolog of NCBI NO: 2119370 NR Description: calreticulin precursor - maize
  misc_feature (1)..(371): Homolog of NCBI NO: 11131840 NR Description: Calreticulin precursor
  misc_feature (1)..(371): Homolog of NCBI NO: 7441498 NR Description: calreticulin - barley (fragment)
  misc_feature (1)..(371): Homolog of NCBI NO: 7441499 NR Description: calreticulin - barley (fragment)
  misc_feature (1)..(371): Homolog of NCBI NO: 11131838 NR Description: Calreticulin precursor
  misc_feature (1)..(371): Homolog of NCBI NO: 11131745 NR Description: Calreticulin precursor >gi|7441496|pir||T10172
  misc_feature (1)..(371): Homolog of NCBI NO: 11131631 NR Description: Calreticulin precursor >gi|7441494|pir||T14554
  misc_feature (1)..(371): Homolog of NCBI NO: 11131769 NR Description: Calreticulin precursor >gi|7441495|pir||T16968
  misc_feature (1)..(371): Homolog of NCBI NO: 11131949 NR Description: Calreticulin precursor >gi|4335864|gb|AAD17490.1|
  misc_feature (1)..(371): Homolog of NCBI NO: 11131904 NR Description: Calreticulin precursor
MAGEWNHTSGKWNGDAEDKGIQTSEDYRFYAISAEYPEFSNKDKTLVLQFSVKHEQKLDCGGGYVKLLGGGDVDQKKFGGDTSYSIMFGPDICGYSTKKVHTILTKDGKNHLIKKDVPCETDQLTHVYTLIIRPDATYSILIDNEEKQTGSIYEHWDILPPKKIKDPEAKKPEDWDDKEYIPDPEDKKPEGYDDIPKEIPDPDAKKPEDWDDEEDGEWTAPTIPNPEYKGPWKQKKIKNPNYQGKWKAPMIDNPDFKDDPYIYAFDSLKYIGIELWQVKSGTLFDNIIITDDPALAKTFAEETWGKHKEAEKAAFDEAEKKKEEEDAAKGGDDEDDDLEDEEDDEKADEDKADSDAEDSKDSDDEKQHDEL

SEQ ID NO: 12384 - protein, 285 aa, Zea mays subsp. mays
  peptide (1)..(285): Ceres Seq. ID no. 12372652
  misc_feature (1)..(203): Pfam Name: Calreticulin family Pfam Description: Calreticulin family
  misc_feature (1)..(285): Homolog of NCBI NO: 2119370 NR Description: calreticulin precursor - maize
  misc_feature (1)..(285): Homolog of NCBI NO: 11131840 NR Description: Calreticulin precursor
  misc_feature (1)..(285): Homolog of NCBI NO: 7441498 NR Description: calreticulin - barley (fragment)
  misc_feature (1)..(285): Homolog of NCBI NO: 7441499 NR Description: calreticulin - barley (fragment)
  misc_feature (1)..(285): Homolog of NCBI NO: 11131838 NR Description: Calreticulin precursor
  misc_feature (1)..(285): Homolog of NCBI NO: 11131745 NR Description: Calreticulin precursor >gi|7441496|pir||T10172
  misc_feature (1)..(285): Homolog of NCBI NO: 11131631 NR Description: Calreticulin precursor >gi|7441494|pir||T14554
  misc_feature (1)..(285): Homolog of NCBI NO: 11131769 NR Description: Calreticulin precursor >gi|7441495|pir||T16968
  misc_feature (1)..(285): Homolog of NCBI NO: 11131949 NR Description: Calreticulin precursor >gi|4335864|gb|AAD17490.1|
  misc_feature (1)..(285): Homolog of NCBI NO: 11131904 NR Description: Calreticulin precursor
MFGPDICGYSTKKVHTILTKDGKNHLIKKDVPCETDQLTHVYTLIIRPDATYSILIDNEEKQTGSIYEHWDILPPKKIKDPEAKKPEDWDDKEYIPDPEDKKPEGYDDIPKEIPDPDAKKPEDWDDEEDGEWTAPTIPNPEYKGPWKQKKIKNPNYQGKWKAPMIDNPDFKDDPYIYAFDSLKYIGIELWQVKSGTLFDNIIITDDPALAKTFAEETWGKHKEAEKAAFDEAEKKKEEEDAAKGGDDEDDDLEDEEDDEKADEDKADSDAEDSKDSDDEKQHDEL

SEQ ID NO: 12385 - DNA, 1203 bp, Zea mays subsp. mays; identical to SEQ ID NO: 4004
  misc_feature (1)..(1203): Ceres Seq. ID no. 12566771
  misc_feature: MA Experiment ID: 20000535 Result: Down-regulated in Transcription
  misc_feature: MA Experiment 20000535 PARAMETER Experiment Name: Zm_Hybrid_Seed_Dev_P Parameter: DAP Value: 30 vs. 12
  misc_feature: MA Experiment 20000535 PARAMETER Experiment Name: Zm_Hybrid_Seed_Dev_P Parameter: Organism Value: Zea mays
  misc_feature: MA Experiment 20000535 PARAMETER Experiment Name: Zm_Hybrid_Seed_Dev_P Parameter: Plant Line Value: 35A19
  misc_feature: MA Experiment 20000535 PARAMETER Experiment Name: Zm_Hybrid_Seed_Dev_P Parameter: Tissue Value: Embryo vs. Unfert Floret

SEQ ID NO: 12386 - protein, 160 aa, Zea mays subsp. mays; identical to SEQ ID NO: 4005
  peptide (1)..(160): Ceres Seq. ID no. 12566772
  misc_feature (1)..(154): Pfam Name: Uncharacterised protein family UPF0005 Pfam Description: Uncharacterised protein family UPF0005
  misc_feature (1)..(160): Homolog of NCBI NO: 18414455 NR Description: Expressed protein; protein id: At4g15470.1, by cDNA: gi_15215826, supported by cDNA: gi_15810200, supported cDNA: gi_20453266 [Arabidopsis thaliana]
  misc_feature (1)..(118): Homolog of NCBI NO: 15810201 NR Description: AT4g15470/dl3775w [Arabidopsis thaliana]
  misc_feature (1)..(158): Homolog of NCBI NO: 14626300 NR Description: putative receptor-associated protein [Oryza
  misc_feature (1)..(155): Homolog of NCBI NO: 34393841 NR Description: putative z-protein [Oryza sativa (japonica
  misc_feature (1)..(158): Homolog of NCBI NO: 15229411 NR Description: putative protein; protein id: At3g63310.1
  misc_feature (1)..(157): Homolog of NCBI NO: 15235466 NR Description: putative glutamate-/aspartate-binding peptide; id: At4g02690.1 [Arabidopsis thaliana] >gi|7486855|pir||T01080
  misc_feature (1)..(157): Homolog of NCBI NO: 15218701 NR Description: putative glutamate/aspartate-binding peptide;
  misc_feature (38)..(109): Homolog of NCBI NO: 7485070 NR Description: hypothetical protein - Arabidopsis thaliana hypothetical protein [Arabidopsis thaliana]
  misc_feature (1)..(38): Homolog of NCBI NO: 7485070 NR Description: hypothetical protein - Arabidopsis thaliana hypothetical protein [Arabidopsis thaliana]
  misc_feature (1)..(158): Homolog of NCBI NO: 34393840 NR Description: putative z-protein [Oryza sativa (japonica

SEQ ID NO: 12387 - protein, 158 aa, Zea mays subsp. mays; identical to SEQ ID NO: 4006
  peptide (1)..(158): Ceres Seq. ID no. 12566773

SEQ ID NO: 12388 - protein, 138 aa, Zea mays subsp. mays; identical to SEQ ID NO: 4007
  peptide (1)..(138): Ceres Seq. ID no. 12566774
  misc_feature (30)..(63): Homolog of NCBI NO: 18414455 NR Description: Expressed protein; protein id: At4g15470.1, by cDNA: gi_15215826, supported by cDNA: gi_15810200, supported cDNA: gi_20453266 [Arabidopsis thaliana]
  misc_feature (30)..(63): Homolog of NCBI NO: 15810201 NR Description: AT4g15470/dl3775w [Arabidopsis thaliana]
  misc_feature (30)..(63): Homolog of NCBI NO: 7485070 NR Description: hypothetical protein - Arabidopsis thaliana hypothetical protein [Arabidopsis thaliana]

SEQ ID NO: 12389 - DNA, 1563 bp, Zea mays subsp. mays
  misc_feature (1)..(1563): Ceres Seq. ID no. 12358091
  misc_feature: MA Experiment ID: 108523 Result: Up-regulated in Transcription
  misc_feature: MA Experiment 108523 PARAMETER Experiment Name: Zm_42deg_Heat_P Parameter: Age (day) Value: 8
  misc_feature: MA Experiment 108523 PARAMETER Experiment Name: Zm_42deg_Heat_P Parameter: Organism Value: Zea mays
  misc_feature: MA Experiment 108523 PARAMETER Experiment Name: Zm_42deg_Heat_P Parameter: Plant Line Value: 35A19
  misc_feature: MA Experiment 108523 PARAMETER Experiment Name: Zm_42deg_Heat_P Parameter: Temperature (deg C) Value: 42 vs. 22
  misc_feature: MA Experiment 108523 PARAMETER Experiment Name: Zm_42deg_Heat_P Parameter: Timepoint (hr) Value: 6
  misc_feature: MA Experiment 108523 PARAMETER Experiment Name: Zm_42deg_Heat_P Parameter: Tissue Value: Aerial
  misc_feature: MA Experiment ID: 108535 Result: Down-regulated in Transcription
  misc_feature: MA Experiment 108535 PARAMETER Experiment Name: Zm_Meristem_P Parameter: Age (day) Value: 8
  misc_feature: MA Experiment 108535 PARAMETER Experiment Name: Zm_Meristem_P Parameter: Organism Value: Zea mays
  misc_feature: MA Experiment 108535 PARAMETER Experiment Name: Zm_Meristem_P Parameter: Plant Line Value: 35A19
  misc_feature: MA Experiment 108535 PARAMETER Experiment Name: Zm_Meristem_P Parameter: Tissue Value: Root Meristem vs. Above Root Meristem
  misc_feature: MA Experiment ID: 20000492 Result: Down-regulated in Transcription
  misc_feature: MA Experiment 20000492 PARAMETER Experiment Name: Zm_Hybrid_Seed_Dev_P Parameter: DAP Value: 12
  misc_feature: MA Experiment 20000492 PARAMETER Experiment Name: Zm_Hybrid_Seed_Dev_P Parameter: Organism Value: Zea mays
  misc_feature: MA Experiment 20000492 PARAMETER Experiment Name: Zm_Hybrid_Seed_Dev_P Parameter: Plant Line Value: 35A19
  misc_feature: MA Experiment 20000492 PARAMETER Experiment Name: Zm_Hybrid_Seed_Dev_P Parameter: Tissue Value: Fert Kernel vs. Unfert Floret
  misc_feature: MA Experiment ID: 20000535 Result: Down-regulated in Transcription
  misc_feature: MA Experiment 20000535 PARAMETER Experiment Name: Zm_Hybrid_Seed_Dev_P Parameter: DAP Value: 30 vs. 12
  misc_feature: MA Experiment 20000535 PARAMETER Experiment Name: Zm_Hybrid_Seed_Dev_P Parameter: Organism Value: Zea mays
  misc_feature: MA Experiment 20000535 PARAMETER Experiment Name: Zm_Hybrid_Seed_Dev_P Parameter: Plant Line Value: 35A19
  misc_feature: MA Experiment 20000535 PARAMETER Experiment Name: Zm_Hybrid_Seed_Dev_P Parameter: Tissue Value: Embryo vs. Unfert Floret
accttcctccacggctccaccatcccctcccctgccctgcccccaccgccccgcttccttccgccttgctccgttgcttcctcccaccacagtccactccactcgccggccctgcagctcagtatttgactgagactggtggtggagctgctagcagcgagcctgctacttcctggtcctgacggtgcgttcagacctcagaccagtgccgacgacgagctgtgaggagagggcaaggaagcaagcctgtgaggaaggcggcgatggagaggtacgaggtgatcaaggacataggatcgggcaacttcggggtggccaagctggtccgggacgtcaggaccaaggagctcttcgccgtcaagttcatcgagcgggggatgaagattgatgagaatgtccaaagggagatcatgaaccacaggtcactgaggcatccaaacatagttaaatttaaggaggttgtgctaactcccacacatttggccatagttatggaatatgctgctggtggtgagctatttgaaaggatctgtaatgctggaagatttagtgaggatgaggcgagatttttcttccaacaactgatttcaggagttagttattgccactcaatgcaaatatgccatagagatttgaaactagaaaacactctcctggatgatagtatagcacctcggctaaagatatgtgattttggttactccaagtcctctgtgttgcactctcaaccaaaatcaactgtcgggacaccagcttacattgctcctgaggtccttgctagaaaggaatatgatggaaaggtcgccgatgtttggtcatgtggagttactctgtatgtgatgcttgttggtgcctatccctttgaggaccccgacgaaccgaagaatttccgcaagacgcttactcggattatcagcgtccagtacgcggttcctgattttgtccgagtttcaatggagtgcaggcatctgctgtctcggatctttgtggcgaaacctgagcaacggataaccatcccagagatcaagaaccacccatggttcttgaagaacctgcccatcgagatgaccgacgagtaccagatgaacctacagctagtcgacatgaatgtcccctcgcaaagcctggaggagatcatgtccatcatactggaggcccggaagcccggcgacgggctgaagcatgcgggacagctccccggccttgggagcatggagctggatgacattgatgttgacgacatagacgttgaggacagtggcgactttgtatgtgccttgtgacgcggttcaggctgtccggcaccgttgctgcggtggactctcccccactctcctggtctttgtgtcttgctgttattccatgttgtttgtttcagcgagctccgagctcccattttgttgttgtaatatcacatgttttgtgtaaccaaggtagtgacgctgtggataaataatagacgttatgtgttgtattcttgctgaattgttgttcagctccttctgtttgccctgtatgaactgggcagtttcatgagtaccacaatgtgtatgttgatggccc

SEQ ID NO: 12390 - protein, 339 aa, Zea mays subsp. mays; identical to SEQ ID NO: 2078
  peptide (1)..(339): Ceres Seq. ID no. 12358092
  misc_feature (4)..(260): Pfam Name: Protein kinase domain Pfam Description: Protein kinase domain
  misc_feature (1)..(339): Homolog of NCBI NO: 29164823 NR Description: abcisic acid-inducible protein kinanase [Oryza
  misc_feature (1)..(339): Homolog of NCBI NO: 14588571 NR Description: protein kinase HvPKABA1 [Hordeum vulgare subsp. >gi|14588573|dbj|BAB61736.1| protein kinase HvPKABA1 [Hordeum
  misc_feature (11)..(339): Homolog of NCBI NO: 416564 NR Description: Abcisic acid-inducible protein kinase
  misc_feature (1)..(328): Homolog of NCBI NO: 2055374 NR Description: serine-threonine protein kinase [Triticum
  misc_feature (11)..(339): Homolog of NCBI NO: 11138330 NR Description: putative serine/threonine kinase GDBrPK [Vitis
  misc_feature (2)..(339): Homolog of NCBI NO: 7446439 NR Description: probable serine/threonine-specific protein kinase
  misc_feature (1)..(339): Homolog of NCBI NO: 481002 NR Description: protein kinase MCPK9 (EC 2.7.1.-) - common ice >gi|407057|emb|CAA81443.1| protein kinase [Mesembryanthemum
  misc_feature (2)..(339): Homolog of NCBI NO: 18418337 NR Description: protein kinase - like protein; protein id: supported by cDNA: gi_15451087, supported by cDNA: gi_20148418
  misc_feature (1)..(331): Homolog of NCBI NO: 15218270 NR Description: serine-threonine protein kinase, putative; id: At1g78290.1, supported by cDNA: 98655., supported by cDNA: [Arabidopsis thaliana] >gi|8052538|gb|AAF71802.1|AC013430_11
  misc_feature (1)..(339): Homolog of NCBI NO: 15240124 NR Description: protein kinase, 41K (EC 2.7.1.-) (pir||S71172); id: At5g66880.1, supported by cDNA: gi_166818 [Arabidopsis

SEQ ID NO: 12391 - protein, 301 aa, Zea mays subsp. mays; identical to SEQ ID NO: 2079
  peptide (1)..(301): Ceres Seq. ID no. 12358093
  misc_feature (1)..(222): Pfam Name: Protein kinase domain Pfam Description: Protein kinase domain
  misc_feature (1)..(301): Homolog of NCBI NO: 29164823 NR Description: abcisic acid-inducible protein kinanase [Oryza
  misc_feature (1)..(301): Homolog of NCBI NO: 14588571 NR Description: protein kinase HvPKABA1 [Hordeum vulgare subsp. >gi|14588573|dbj|BAB61736.1| protein kinase HvPKABA1 [Hordeum
  misc_feature (1)..(301): Homolog of NCBI NO: 416564 NR Description: Abcisic acid-inducible protein kinase
  misc_feature (1)..(290): Homolog of NCBI NO: 2055374 NR Description: serine-threonine protein kinase [Triticum
  misc_feature (1)..(301): Homolog of NCBI NO: 11138330 NR Description: putative serine/threonine kinase GDBrPK [Vitis
  misc_feature (1)..(301): Homolog of NCBI NO: 7446439 NR Description: probable serine/threonine-specific protein kinase
  misc_feature (1)..(301): Homolog of NCBI NO: 481002 NR Description: protein kinase MCPK9 (EC 2.7.1.-) - common ice >gi|407057|emb|CAA81443.1| protein kinase [Mesembryanthemum
  misc_feature (1)..(301): Homolog of NCBI NO: 18418337 NR Description: protein kinase - like protein; protein id: supported by cDNA: gi_15451087, supported by cDNA: gi_20148418
  misc_feature (1)..(293): Homolog of NCBI NO: 15218270 NR Description: serine-threonine protein kinase, putative; id: At1g78290.1, supported by cDNA: 98655., supported by cDNA: [Arabidopsis thaliana] >gi|8052538|gb|AAF71802.1|AC013430_11
  misc_feature (1)..(301): Homolog of NCBI NO: 15240124 NR Description: protein kinase, 41K (EC 2.7.1.-) (pir||S71172); id: At5g66880.1, supported by cDNA: gi_166818 [Arabidopsis

SEQ ID NO: 12392 - protein, 290 aa, Zea mays subsp. mays; identical to SEQ ID NO: 2080
  peptide (1)..(290): Ceres Seq. ID no. 12358094
  misc_feature (1)..(211): Pfam Name: Protein kinase domain Pfam Description: Protein kinase domain
  misc_feature (1)..(290): Homolog of NCBI NO: 29164823 NR Description: abcisic acid-inducible protein kinanase [Oryza
  misc_feature (1)..(290): Homolog of NCBI NO: 14588571 NR Description: protein kinase HvPKABA1 [Hordeum vulgare subsp. >gi|14588573|dbj|BAB61736.1| protein kinase HvPKABA1 [Hordeum
  misc_feature (1)..(290): Homolog of NCBI NO: 416564 NR Description: Abcisic acid-inducible protein kinase
  misc_feature (1)..(279): Homolog of NCBI NO: 2055374 NR Description: serine-threonine protein kinase [Triticum
  misc_feature (1)..(290): Homolog of NCBI NO: 11138330 NR Description: putative serine/threonine kinase GDBrPK [Vitis
  misc_feature (1)..(290): Homolog of NCBI NO: 7446439 NR Description: probable serine/threonine-specific protein kinase
  misc_feature (1)..(290): Homolog of NCBI NO: 481002 NR Description: protein kinase MCPK9 (EC 2.7.1.-) - common ice >gi|407057|emb|CAA81443.1| protein kinase [Mesembryanthemum
  misc_feature (1)..(290): Homolog of NCBI NO: 18418337 NR Description: protein kinase - like protein; protein id: supported by cDNA: gi_15451087, supported by cDNA: gi_20148418
  misc_feature (1)..(282): Homolog of NCBI NO: 15218270 NR Description: serine-threonine protein kinase, putative; id: At1g78290.1, supported by cDNA: 98655., supported by cDNA: [Arabidopsis thaliana] >gi|8052538|gb|AAF71802.1|AC013430_11
  misc_feature (1)..(290): Homolog of NCBI NO: 15240124 NR Description: protein kinase, 41K (EC 2.7.1.-) (pir||S71172); id: At5g66880.1, supported by cDNA: gi_166818 [Arabidopsis

SEQ ID NO: 12393 - DNA, 1108 bp, Zea mays subsp. mays
  misc_feature (1)..(1108): Ceres Seq. ID no. 12414365
  misc_feature: MA Experiment ID: 108536 Result: Down-regulated in Transcription
  misc_feature: MA Experiment 108536 PARAMETER Experiment Name: Zm_Meristem_P Parameter: Age (day) Value: 8
  misc_feature: MA Experiment 108536 PARAMETER Experiment Name: Zm_Meristem_P Parameter: Organism Value: Zea mays
  misc_feature: MA Experiment 108536 PARAMETER Experiment Name: Zm_Meristem_P Parameter: Plant Line Value: 35A19
  misc_feature: MA Experiment 108536 PARAMETER Experiment Name: Zm_Meristem_P Parameter: Tissue Value: Shoot Meristem vs. Above Shoot Meristem
acacgcgtgcacgggcgggcaagcaccagaaaggaaaggcggaggccgcgcggcgggcccagctgcagccaagagcccactagtagtagtagtagctagttcaccaccgcctgcttgcctcctttactttgccatatttgctagcgtttcctggattggggacgcttccgtttcgggaagccgtgaagggatcggccacgacgatggtgcgggggaagacggagctgaagcggatagagaacgcgacgagccggcaggtgaccttctcgaagcgccgcaacgggctgctcaagaaggccttcgagctctccgtgctctgcgatgctgaggtcgggctcgtcgtcttctccccgcgcggcaagctctacgagttcgccagcgccgccagcctccagaaaacaattgaccgctacaggacatacacaagggaaaatgtcaataacaagactgttcaacaagatatacagcaagtcaaagcagatgccgtaagcttggcaagtagactcgaagccctagaaaagaccaaacgaatgtttctgggtgaaaatttagaagaatgctccattgaagaactgcataatctggaggttaaactggcgaagagccttcacgtcatcagagggaagaagacacaactgctggagcattcttctaaattttcacccagaaacattcgtaaggtcggcatgcgctacttccacaagtccgcaacaagttctactgccccgcggtcaacatcgagcgcctctggtcgatggtgcccgccgaaaaggcggcggaagccggcggcgacaaggccccgcagatcgacgtcacgcagttcggcttcttcaaggtgctcgggaagggggtgctgccgcccaagcccatcgtcgtcaaggccaagctcatctccaaggtcgccgagaagaagatcaaggccgccggcggcgccgtcgtgctcaccgcctagttttcagtccttattcgcctcttggttttgagatctatatctgaactagcagtctttcttgtctcacctatttgtgttaagaagacgtagtttttaaatccatggctccttcctgtttggacagtgctttcatatcaaatatttcaggtatattag

SEQ ID NO: 12394 - protein, 259 aa, Zea mays subsp. mays
  peptide (1)..(259): Ceres Seq. ID no. 12414366
  misc_feature (73)..(147): Pfam Name: K-box region Pfam Description: K-box region
  misc_feature (1)..(147): Homolog of NCBI NO: 12002139 NR Description: MADS box protein 1 [Zea mays]
  misc_feature (1)..(185): Homolog of NCBI NO: 5051933 NR Description: MADS-box protein FDRMADS8 [Oryza sativa]
  misc_feature (1)..(147): Homolog of NCBI NO: 5295990 NR Description: MADS box-like protein [Oryza sativa (japonica
  misc_feature (1)..(185): Homolog of NCBI NO: 33621123 NR Description: transcription factor MADS56 [Oryza sativa
  misc_feature (1)..(185): Homolog of NCBI NO: 37536442 NR Description: putative transcription factor [Oryza sativa
  misc_feature (1)..(147): Homolog of NCBI NO: 6635740 NR Description: agamous-like MADS box protein OPMADS1 [Elaeis
  misc_feature (1)..(147): Homolog of NCBI NO: 30171311 NR Description: MADS-box protein [Draba nemorosa var. hebecarpa]
  misc_feature (1)..(147): Homolog of NCBI NO: 15225534 NR Description: MADS-box protein (AGL20); protein id: supported by cDNA: 5467., supported by cDNA: gi_11496164, by cDNA: gi_14326553, supported by cDNA: gi_20334733 [Arabidopsis
  misc_feature (1)..(147): Homolog of NCBI NO: 30171309 NR Description: MADS-box protein [Cardamine flexuosa]
  misc_feature (1)..(147): Homolog of NCBI NO: 40641816 NR Description: putative MADS-box transcription factor DEFH68
MVRGKTELKRIENATSRQVTFSKRRNGLLKKAFELSVLCDAEVGLVVFSPRGKLYEFASAASLQKTIDRYRTYTRENVNNKTVQQDIQQVKADAVSLASRLEALEKTKRMFLGENLEECSIEELHNLEVKLAKSLHVIRGKKTQLLEHSSKFSPRNIRKVGMRYFHKSATSSTAPRSTSSASGRWCPPKRRRKPAATRPRRSTSRSSASSRCSGRGCCRPSPSSSRPSSSPRSPRRRSRPPAAPSCSPPSFQSLFASWF

SEQ ID NO: 12395 - protein, 150 aa, Zea mays subsp. mays
  peptide (1)..(150): Ceres Seq. ID no. 12414367
  misc_feature (1)..(38): Homolog of NCBI NO: 12002139 NR Description: MADS box protein 1 [Zea mays]
  misc_feature (1)..(76): Homolog of NCBI NO: 5051933 NR Description: MADS-box protein FDRMADS8 [Oryza sativa]
  misc_feature (1)..(38): Homolog of NCBI NO: 5295990 NR Description: MADS box-like protein [Oryza sativa (japonica
  misc_feature (1)..(76): Homolog of NCBI NO: 33621123 NR Description: transcription factor MADS56 [Oryza sativa
  misc_feature (1)..(76): Homolog of NCBI NO: 37536442 NR Description: putative transcription factor [Oryza sativa
  misc_feature (1)..(38): Homolog of NCBI NO: 6635740 NR Description: agamous-like MADS box protein OPMADS1 [Elaeis
  misc_feature (1)..(38): Homolog of NCBI NO: 30171311 NR Description: MADS-box protein [Draba nemorosa var. hebecarpa]
  misc_feature (1)..(38): Homolog of NCBI NO: 15225534 NR Description: MADS-box protein (AGL20); protein id: supported by cDNA: 5467., supported by cDNA: gi_11496164, by cDNA: gi_14326553, supported by cDNA: gi_20334733 [Arabidopsis
  misc_feature (1)..(38): Homolog of NCBI NO: 30171309 NR Description: MADS-box protein [Cardamine flexuosa]
  misc_feature (1)..(38): Homolog of NCBI NO: 40641816 NR Description: putative MADS-box transcription factor DEFH68
MFLGENLEECSIEELHNLEVKLAKSLHVIRGKKTQLLEHSSKFSPRNIRKVGMRYFHKSATSSTAPRSTSSASGRWCPPKRRRKPAATRPRRSTSRSSASSRCSGRGCCRPSPSSSRPSSSPRSPRRRSRPPAAPSCSPPSFQSLFASWF

SEQ ID NO: 12396 - DNA, 1696 bp, Zea mays subsp. mays
  misc_feature (1)..(1696): Ceres Seq. ID no. 12360761
  misc_feature: MA Experiment ID: 108530 Result: Down-regulated in Transcription
  misc_feature: MA Experiment 108530 PARAMETER Experiment Name: Zm_Imbibed_Seeds_P Parameter: Age (day) Value: 6 vs. 2
  misc_feature: MA Experiment 108530 PARAMETER Experiment Name: Zm_Imbibed_Seeds_P Parameter: Organism Value: Zea mays
  misc_feature: MA Experiment 108530 PARAMETER Experiment Name: Zm_Imbibed_Seeds_P Parameter: Plant Line Value: 35A19
  misc_feature: MA Experiment 108530 PARAMETER Experiment Name: Zm_Imbibed_Seeds_P Parameter: Tissue Value: Aerial vs. Embryo
  misc_feature: MA Experiment ID: 108535 Result: Up-regulated in Transcription
  misc_feature: MA Experiment 108535 PARAMETER Experiment Name: Zm_Meristem_P Parameter: Age (day) Value: 8
  misc_feature: MA Experiment 108535 PARAMETER Experiment Name: Zm_Meristem_P Parameter: Organism Value: Zea mays
  misc_feature: MA Experiment 108535 PARAMETER Experiment Name: Zm_Meristem_P Parameter: Plant Line Value: 35A19
  misc_feature: MA Experiment 108535 PARAMETER Experiment Name: Zm_Meristem_P Parameter: Tissue Value: Root Meristem vs. Above Root Meristem
  misc_feature: MA Experiment ID: 108544 Result: Down-regulated in Transcription
  misc_feature: MA Experiment ID: 108556 Result: Down-regulated in Transcription
  misc_feature: MA Experiment 108556 PARAMETER Experiment Name: Zm_Drought_P Parameter: Age (day) Value: 9
  misc_feature: MA Experiment 108556 PARAMETER Experiment Name: Zm_Drought_P Parameter: Organism Value: Zea mays
  misc_feature: MA Experiment 108556 PARAMETER Experiment Name: Zm_Drought_P Parameter: Plant Line Value: 35A19
  misc_feature: MA Experiment 108556 PARAMETER Experiment Name: Zm_Drought_P Parameter: Timepoint (hr) Value: 24
  misc_feature: MA Experiment 108556 PARAMETER Experiment Name: Zm_Drought_P Parameter: Tissue Value: Aerial
  misc_feature: MA Experiment 108556 PARAMETER Experiment Name: Zm_Drought_P Parameter: Treatment Value: Drought vs. No Drought
  misc_feature: MA Experiment ID: 20000492 Result: Up-regulated in Transcription
  misc_feature: MA Experiment 20000492 PARAMETER Experiment Name: Zm_Hybrid_Seed_Dev_P Parameter: DAP Value: 12
  misc_feature: MA Experiment 20000492 PARAMETER Experiment Name: Zm_Hybrid_Seed_Dev_P Parameter: Organism Value: Zea mays
  misc_feature: MA Experiment 20000492 PARAMETER Experiment Name: Zm_Hybrid_Seed_Dev_P Parameter: Plant Line Value: 35A19
  misc_feature: MA Experiment 20000492 PARAMETER Experiment Name: Zm_Hybrid_Seed_Dev_P Parameter: Tissue Value: Fert Kernel vs. Unfert Floret
  misc_feature: MA Experiment ID: 20000534 Result: Down-regulated in Transcription
  misc_feature: MA Experiment 20000534 PARAMETER Experiment Name: Zm_Hybrid_Pollen_P Parameter: Age (day) Value: 8
  misc_feature: MA Experiment 20000534 PARAMETER Experiment Name: Zm_Hybrid_Pollen_P Parameter: Organism Value: Zea mays
  misc_feature: MA Experiment 20000534 PARAMETER Experiment Name: Zm_Hybrid_Pollen_P Parameter: Plant Line Value: 35A19
  misc_feature: MA Experiment 20000534 PARAMETER Experiment Name: Zm_Hybrid_Pollen_P Parameter: Tissue Value: Pollen vs. Aerial
gcacgagaccattacctagaacatcctaatcgaaaagaacgcttccgccccgccgccaccttccccgctctcctccctccgctcgcctccgcttccgttccgcgccctgcccccggaaggcaagcaaagccctcgctacttgcggagcgtcgttggtcaaaccctagcacacgtacgagcaggccagccccgcccgctcccattcccaggccctcatccatggcggcgctctccgtgcccctccacgccgccgccggatcccgcgccgccgcggccgaccccgtcaaggttccgtgcgtgaggagcactggttcagcccatttcggccgcgccttcccctccgtcgcggtctcctctttggctgcgaggcacatcgagccgatgagagcgatagctacacaggcgccccctgccgtgccacaatatttgagtggcgagaagacaaagatcggcatcaacggctttgggcggattggcaggttggtcctgcgaattgcaactagcagagacgatattgaagttgtggctgtgaatgaccctttcgttgatgctaagtacatggcctatatgttcaagtatgactctactcatggcccgtttaaaggttctatttgtgttgtggatgattcaaccctggagatcaatgggaagaaggtcacaattacaagcaaaagagatcctgcagagattccatggggtaactttggggctgaatatgttgttgaatcttctggtgtctttacaacgactgataaagcatcagcacacttaaagggtggtgctaagaaagtggtgatatctgcaccatcagcagatgctcccatgtttgtagttggagttaatgagaatagctatgattcgaagatgaatgttgtttctaatgcaagttgcaccaccaactgccttgctccacttgccaaggttgtacatgaggaatttggcatcgtggagggccttatgacaactgttcatgccacaacagccacccagaagaccgttgatggtccttcaatgaaggattggagaggaggacgtggtgctggccaaaacataattcctagctccactggtgcagcaaaggctgttggaaaagttctgcctgagctgaatggaaagctcactggcatggccttccgagttccaacaccaaatgtctctgttgtggacttgacatgccggattgagaaaaacgcctcctatgatgatgtgaaagcagccatcaaggcggcatcagagggtgcactcaaaggtattcttggctacacagacgaggacgttgtttccaatgattttgttggtgattctaggtcaagcatctttgatgccaaggctggtatcggactgagctcttctttcatgaagcttgtgtcttggtatgacaacgagtggggctacagcaaccgggttctggatctgatcgcccacatggctctcgtcagtgccgccgccaagctctgatgtccgtactcgtttctccagtagtagcttagaaaaaaagactgcaattttgacggccattttctgttagctgttgtttggaataagatcaaatgctggaacacttcgaactcgcgcgagactggactcagatccatggcctgtattttagttgtagaagtgggcaaatttgcaccgtagtaccctggcatggttatatgcggaattgttgattgatgagtcgttgtacggtttgtcc

SEQ ID NO: 12397 - protein, 485 aa, Zea mays subsp. mays
  peptide (1)..(485): Ceres Seq. ID no. 12360762
  misc_feature (298)..(459): Pfam Name: Glyceraldehyde 3-phosphate dehydrogenase, Pfam Description: Glyceraldehyde 3-phosphate dehydrogenase,
  misc_feature (78)..(481): Homolog of NCBI NO: 2129471 NR Description: glyceraldehyde-3-phosphate dehydrogenase
  misc_feature (78)..(481): Homolog of NCBI NO: 2129472 NR Description: glyceraldehyde-3-phosphate dehydrogenase
  misc_feature (105)..(483): Homolog of NCBI NO: 18072805 NR Description: glyceraldehyde-3-phosphate dehydrogenase
  misc_feature (102)..(482): Homolog of NCBI NO: 27754473 NR Description: putative glyceraldehyde-3-phosphate dehydrogenase
  misc_feature (102)..(482): Homolog of NCBI NO: 15219206 NR Description: putative glyceraldehyde-3-phosphate protein id: At1g16300.1, supported by cDNA: 94597. [Arabidopsis
  misc_feature (102)..(482): Homolog of NCBI NO: 21618027 NR Description: putative glyceraldehyde-3-phosphate dehydrogenase
  misc_feature (121)..(481): Homolog of NCBI NO: 3059140 NR Description: NAD-dependent glyceraldehyde-3-phosphate
  misc_feature (112)..(482): Homolog of NCBI NO: 15219406 NR Description: glyceraldehyde-3-phosphate dehydrogenase, protein id: At1g79530.1, supported by cDNA: gi_13194783
  misc_feature (102)..(482): Homolog of NCBI NO: 25284351 NR Description: hypothetical protein F3O9.10 - Arabidopsis
  misc_feature (121)..(484): Homolog of NCBI NO: 3059122 NR Description: glyeraldehyde-3-phosphate dehydrogenase [Marsilea
ARDHYLEHPNRKERFRPAATFPALLPPLASASVPRPAPGRQAKPSLLAERRWSNPSTRTSRPAPPAPIPRPSSMAALSVPLHAAAGSRAAAADPVKVPCVRSTGSAHFGRAFPSVAVSSLAARHIEPMRAIATQAPPAVPQYLSGEKTKIGINGFGRIGRLVLRIATSRDDIEVVAVNDPFVDAKYMAYMFKYDSTHGPFKGSICVVDDSTLEINGKKVTITSKRDPAEIPWGNFGAEYVVESSGVFTTTDKASAHLKGGAKKVVISAPSADAPMFVVGVNENSYDSKMNVVSNASCTTNCLAPLAKVVHEEFGIVEGLMTTVHATTATQKTVDGPSMKDWRGGRGAGQNIIPSSTGAAKAVGKVLPELNGKLTGMAFRVPTPNVSVVDLTCRIEKNASYDDVKAAIKAASEGALKGILGYTDEDVVSNDFVGDSRSSIFDAKAGIGLSSSFMKLVSWYDNEWGYSNRVLDLIAHMALVSAAAKL

SEQ ID NO: 12398 - protein, 412 aa, Zea mays subsp. mays; identical to SEQ ID NO: 2285
  peptide (1)..(412): Ceres Seq. ID no. 12360763
  misc_feature (225)..(386): Pfam Name: Glyceraldehyde 3-phosphate dehydrogenase, Pfam Description: Glyceraldehyde 3-phosphate dehydrogenase,
  misc_feature (32)..(410): Homolog of NCBI NO: 18072805 NR Description: glyceraldehyde-3-phosphate dehydrogenase
  misc_feature (29)..(409): Homolog of NCBI NO: 27754473 NR Description: putative glyceraldehyde-3-phosphate dehydrogenase
  misc_feature (29)..(409): Homolog of NCBI NO: 15219206 NR Description: putative glyceraldehyde-3-phosphate protein id: At1g16300.1, supported by cDNA: 94597. [Arabidopsis
  misc_feature (29)..(409): Homolog of NCBI NO: 21618027 NR Description: putative glyceraldehyde-3-phosphate dehydrogenase
  misc_feature (5)..(408): Homolog of NCBI NO: 2129471 NR Description: glyceraldehyde-3-phosphate dehydrogenase
  misc_feature (5)..(408): Homolog of NCBI NO: 2129472 NR Description: glyceraldehyde-3-phosphate dehydrogenase
  misc_feature (48)..(408): Homolog of NCBI NO: 3059140 NR Description: NAD-dependent glyceraldehyde-3-phosphate
  misc_feature (39)..(409): Homolog of NCBI NO: 15219406 NR Description: glyceraldehyde-3-phosphate dehydrogenase, protein id: At1g79530.1, supported by cDNA: gi_13194783
  misc_feature (29)..(409): Homolog of NCBI NO: 25284351 NR Description: hypothetical protein F3O9.10 - Arabidopsis
  misc_feature (48)..(411): Homolog of NCBI NO: 3059122 NR Description: glyeraldehyde-3-phosphate dehydrogenase [Marsilea

SEQ ID NO: 12399 - protein, 358 aa, Zea mays subsp. mays; identical to SEQ ID NO: 2286
  peptide (1)..(358): Ceres Seq. ID no. 12360764
  misc_feature (171)..(332): Pfam Name: Glyceraldehyde 3-phosphate dehydrogenase, Pfam Description: Glyceraldehyde 3-phosphate dehydrogenase,
  misc_feature (1)..(354): Homolog of NCBI NO: 2129471 NR Description: glyceraldehyde-3-phosphate dehydrogenase
  misc_feature (1)..(354): Homolog of NCBI NO: 2129472 NR Description: glyceraldehyde-3-phosphate dehydrogenase
  misc_feature (1)..(356): Homolog of NCBI NO: 18072805 NR Description: glyceraldehyde-3-phosphate dehydrogenase
  misc_feature (1)..(355): Homolog of NCBI NO: 27754473 NR Description: putative glyceraldehyde-3-phosphate dehydrogenase
  misc_feature (1)..(355): Homolog of NCBI NO: 15219206 NR Description: putative glyceraldehyde-3-phosphate protein id: At1g16300.1, supported by cDNA: 94597. [Arabidopsis
  misc_feature (1)..(355): Homolog of NCBI NO: 21618027 NR Description: putative glyceraldehyde-3-phosphate dehydrogenase
  misc_feature (1)..(354): Homolog of NCBI NO: 3059140 NR Description: NAD-dependent glyceraldehyde-3-phosphate
  misc_feature (1)..(355): Homolog of NCBI NO: 15219406 NR Description: glyceraldehyde-3-phosphate dehydrogenase, protein id: At1g79530.1, supported by cDNA: gi_13194783
  misc_feature (1)..(355): Homolog of NCBI NO: 25284351 NR Description: hypothetical protein F3O9.10 - Arabidopsis
  misc_feature (1)..(357): Homolog of NCBI NO: 3059122 NR Description: glyeraldehyde-3-phosphate dehydrogenase [Marsilea

SEQ ID NO: 12400 - DNA, 1756 bp, Zea mays subsp. mays
  misc_feature (1)..(1756): Ceres Seq. ID no. 12348840
  misc_feature: MA Experiment ID: 108522 Result: Down-regulated in Transcription
  misc_feature: MA Experiment 108522 PARAMETER Experiment Name: Zm_42deg_Heat_P Parameter: Age (day) Value: 8
  misc_feature: MA Experiment 108522 PARAMETER Experiment Name: Zm_42deg_Heat_P Parameter: Organism Value: Zea mays
  misc_feature: MA Experiment 108522 PARAMETER Experiment Name: Zm_42deg_Heat_P Parameter: Plant Line Value: 35A19
  misc_feature: MA Experiment 108522 PARAMETER Experiment Name: Zm_42deg_Heat_P Parameter: Temperature (deg C) Value: 42 vs. 22
  misc_feature: MA Experiment 108522 PARAMETER Experiment Name: Zm_42deg_Heat_P Parameter: Timepoint (hr) Value: 1
  misc_feature: MA Experiment 108522 PARAMETER Experiment Name: Zm_42deg_Heat_P Parameter: Tissue Value: Aerial
  misc_feature: MA Experiment ID: 108528 Result: Up-regulated in Transcription
  misc_feature: MA Experiment 108528 PARAMETER Experiment Name: Zm_Imbibed_Seeds_P Parameter: Age (day) Value: 5 vs. 2
  misc_feature: MA Experiment 108528 PARAMETER Experiment Name: Zm_Imbibed_Seeds_P Parameter: Organism Value: Zea mays
  misc_feature: MA Experiment 108528 PARAMETER Experiment Name: Zm_Imbibed_Seeds_P Parameter: Plant Line Value: 35A19
  misc_feature: MA Experiment 108528 PARAMETER Experiment Name: Zm_Imbibed_Seeds_P Parameter: Tissue Value: Aerial vs. Embryo
  misc_feature: MA Experiment ID: 108529 Result: Up-regulated in Transcription
  misc_feature: MA Experiment 108529 PARAMETER Experiment Name: Zm_Imbibed_Seeds_P Parameter: Age (day) Value: 5 vs. 2
  misc_feature: MA Experiment 108529 PARAMETER Experiment Name: Zm_Imbibed_Seeds_P Parameter: Organism Value: Zea mays
  misc_feature: MA Experiment 108529 PARAMETER Experiment Name: Zm_Imbibed_Seeds_P Parameter: Plant Line Value: 35A19
  misc_feature: MA Experiment 108529 PARAMETER Experiment Name: Zm_Imbibed_Seeds_P Parameter: Tissue Value: Roots vs. Embryo
  misc_feature: MA Experiment ID: 108535 Result: Down-regulated in Transcription
  misc_feature: MA Experiment 108535 PARAMETER Experiment Name: Zm_Meristem_P Parameter: Age (day) Value: 8
  misc_feature: MA Experiment 108535 PARAMETER Experiment Name: Zm_Meristem_P Parameter: Organism Value: Zea mays
  misc_feature: MA Experiment 108535 PARAMETER Experiment Name: Zm_Meristem_P Parameter: Plant Line Value: 35A19
  misc_feature: MA Experiment 108535 PARAMETER Experiment Name: Zm_Meristem_P Parameter: Tissue Value: Root Meristem vs. Above Root Meristem
  misc_feature: MA Experiment ID: 108547 Result: Up-regulated in Transcription
  misc_feature: MA Experiment 108547 PARAMETER Experiment Name: Zm_Imbibed_Seeds_P Parameter: Age (day) Value: 4 vs. 2
  misc_feature: MA Experiment 108547 PARAMETER Experiment Name: Zm_Imbibed_Seeds_P Parameter: Organism Value: Zea mays
  misc_feature: MA Experiment 108547 PARAMETER Experiment Name: Zm_Imbibed_Seeds_P Parameter: Plant Line Value: 35A19
  misc_feature: MA Experiment 108547 PARAMETER Experiment Name: Zm_Imbibed_Seeds_P Parameter: Tissue Value: Aerial vs. Embryo
  misc_feature: MA Experiment ID: 108687 Result: Down-regulated in Transcription
  misc_feature: MA Experiment 108687 PARAMETER Experiment Name: Zm_Embryos-Flowers__P Parameter: Tissue Value: Embryo vs. Aerial+
  misc_feature: MA Experiment ID: 20000477 Result: Down-regulated in Transcription
  misc_feature: MA Experiment 20000477 PARAMETER Experiment Name: Zm_5mM_SA_P Parameter: Age (day) Value: 10
  misc_feature: MA Experiment 20000477 PARAMETER Experiment Name: Zm_5mM_SA_P Parameter: Organism Value: Zea mays
  misc_feature: MA Experiment 20000477 PARAMETER Experiment Name: Zm_5mM_SA_P Parameter: Plant Line Value: 35A19
  misc_feature: MA Experiment 20000477 PARAMETER Experiment Name: Zm_5mM_SA_P Parameter: Timepoint (hr) Value: 48
  misc_feature: MA Experiment 20000477 PARAMETER Experiment Name: Zm_5mM_SA_P Parameter: Tissue Value: Aerial
  misc_feature: MA Experiment 20000477 PARAMETER Experiment Name: Zm_5mM_SA_P Parameter: Treatment Value: 5mM SA vs. No Treatment
agtttttgttcctgctcctcgcaccgcgcgccgccgacgccgcagccatgaacggtgacggcagcaaggaggacgccaacaggcgcctcgagtgggccaccttgaacctggagcgcggcgtcgtcgtgagcgagacgacgaagggcgacggcaatggcaatgcaggccggaaggcgccgataagcatcgtccggctcttcttggcctgcatggtctccggcggcatccagtacggctgggcgctgcagctctccctcctctcgccctactctcagactcttgggatctcgcacagctacgtgtctctgacatggatctgcgggcctatcgccggatttgtggtgcaacccatcgtgggctactacagcgaccggtgcacctcgaagatgggccggaggaggcccttcatcctcgcgggatgcatcatcatctgcctctctgtgttggtgatcgggttctcggcggacatcgggcggcgcctcggcgacaccaaggagcactgcagcacgttcaccggctcccgctggtccgccgccgccgtctacattgtcggattttggttccttgacttcgccaacaacacggtacagggaccggctcgcgcgatgatggccgacctggcagctggacagcacggccccaacgttggccaggcgatcttctccctgtggatggccctcggcagcgtgctcggatacttgtccggcgccaacgcgaaatggcacgactggctcccttggctcaaaaccgcggcgtgctgcgatgcgtgcgccaacctcaagggcgccttcttgactgcggtggtcctcattataatcagcatgtctgtcaccttgtggctcgccggcgaggagcggctcgacaaggaaagcgtcgacacctccggcggcgcgtgctccgcgttcatggatctcttcaagaccctcaagaagcttccgcctgccatgttcagcgtgctcgccgtcacggccgtcacatggctctcgtggttccccttcttccagtacaacaccgactggatgggccgggagatcttccacggcgagccgcagggcgcgggcggaaaggcggacctgtacgaagccggcgtccgcgagggcgccatcggcctcctattctgctccgtcgcgctcggtgtcacctccttcttcatccccaggctgtgccggaagctcacgtcccgggtcgtctggtccgtcagcagcctgatggtgttcgtcctcatgacggccatggtcgtcctcggcatggtctccatgaagggctacaggccctcgctcgccgcctccctctctggccccgaccactcgttcaagggcggcgccctcgccatcttcgcgctcatcggcatccctcaggccgtgctctacagcgtgccttgggccgtggcgtctgaggttgccaccgaggacggcggtggtcaaggtctcaccattggcgtcctcaacattgcaatcgtccttccacagctggtgatcgcgctgggcgcaggccccatcgacggcgccttcaacaaaggaaacaccccggccttcggcatcggcgccgccttcgcccttatctgcgcggtcctggcgctcatcctcctcccaaagacgagaggcgtctccaacgccaccgtcatggccggcgggcactgatctattatctatctccaggcaggcttgtcgcagcggctgaccggctgagagtagatcagaaattcagaatctgcttcttggtttcagccccacccgattaaggaggtgtttgattc

SEQ ID NO: 12401 - protein, 545 aa, Zea mays subsp. mays
  peptide (1)..(545): Ceres Seq. ID no. 12348841
  misc_feature (65)..(544): Pfam Name: Sugar (and other) transporter Pfam Description: Sugar (and other) transporter
  misc_feature (31)..(545): Homolog of NCBI NO: 29467456 NR Description: sucrose transporter [Oryza sativa (japonica
  misc_feature (36)..(545): Homolog of NCBI NO: 5771354 NR Description: Sucrose Transporter [Zea mays]
  misc_feature (34)..(545): Homolog of NCBI NO: 9624451 NR Description: sucrose transporter [Oryza sativa subsp. indica]
  misc_feature (47)..(545): Homolog of NCBI NO: 7489560 NR Description: probable sucrose transport protein - rice
  misc_feature (49)..(545): Homolog of NCBI NO: 15718401 NR Description: sucrose transporter [Oryza sativa (japonica
  misc_feature (40)..(545): Homolog of NCBI NO: 20152871 NR Description: sucrose transporter SUT1A [Triticum aestivum]
  misc_feature (40)..(545): Homolog of NCBI NO: 7024415 NR Description: sucrose transporter 1 [Hordeum vulgare subsp.
  misc_feature (49)..(545): Homolog of NCBI NO: 16152148 NR Description: sucrose transporter [Oryza sativa subsp. indica]
  misc_feature (40)..(545): Homolog of NCBI NO: 19548165 NR Description: sucrose transporter SUT1D [Triticum aestivum]
  misc_feature (40)..(545): Homolog of NCBI NO: 20152873 NR Description: sucrose transporter SUT1B [Triticum aestivum]
FLFLLLAPRAADAAAMNGDGSKEDANRRLEWATLNLERGVVVSETTKGDGNGNAGRKAPISIVRLFLACMVSGGIQYGWALQLSLLSPYSQTLGISHSYVSLTWICGPIAGFVVQPIVGYYSDRCTSKMGRRRPFILAGCIIICLSVLVIGFSADIGRRLGDTKEHCSTFTGSRWSAAAVYIVGFWFLDFANNTVQGPARAMMADLAAGQHGPNVGQAIFSLWMALGSVLGYLSGANAKWHDWLPWLKTAACCDACANLKGAFLTAVVLIIISMSVTLWLAGEERLDKESVDTSGGACSAFMDLFKTLKKLPPAMFSVLAVTAVTWLSWFPFFQYNTDWMGREIFHGEPQGAGGKADLYEAGVREGAIGLLFCSVALGVTSFFIPRLCRKLTSRVVWSVSSLMVFVLMTAMVVLGMVSMKGYRPSLAASLSGPDHSFKGGALAIFALIGIPQAVLYSVPWAVASEVATEDGGGQGLTIGVLNIAIVLPQLVIALGAGPIDGAFNKGNTPAFGIGAAFALICAVLALILLPKTRGVSNATVMAGGH

SEQ ID NO: 12402 - protein, 530 aa, Zea mays subsp. mays
  peptide (1)..(530): Ceres Seq. ID no. 12348842
  misc_feature (50)..(529): Pfam Name: Sugar (and other) transporter Pfam Description: Sugar (and other) transporter
  misc_feature (16)..(530): Homolog of NCBI NO: 29467456 NR Description: sucrose transporter [Oryza sativa (japonica
  misc_feature (21)..(530): Homolog of NCBI NO: 5771354 NR Description: Sucrose Transporter [Zea mays]
  misc_feature (19)..(530): Homolog of NCBI NO: 9624451 NR Description: sucrose transporter [Oryza sativa subsp. indica]
  misc_feature (32)..(530): Homolog of NCBI NO: 7489560 NR Description: probable sucrose transport protein - rice
  misc_feature (34)..(530): Homolog of NCBI NO: 15718401 NR Description: sucrose transporter [Oryza sativa (japonica
  misc_feature (25)..(530): Homolog of NCBI NO: 20152871 NR Description: sucrose transporter SUT1A [Triticum aestivum]
  misc_feature (25)..(530): Homolog of NCBI NO: 7024415 NR Description: sucrose transporter 1 [Hordeum vulgare subsp.
  misc_feature (34)..(530): Homolog of NCBI NO: 16152148 NR Description: sucrose transporter [Oryza sativa subsp. indica]
  misc_feature (25)..(530): Homolog of NCBI NO: 19548165 NR Description: sucrose transporter SUT1D [Triticum aestivum]
  misc_feature (25)..(530): Homolog of NCBI NO: 20152873 NR Description: sucrose transporter SUT1B [Triticum aestivum]
MNGDGSKEDANRRLEWATLNLERGVVVSETTKGDGNGNAGRKAPISIVRLFLACMVSGGIQYGWALQLSLLSPYSQTLGISHSYVSLTWICGPIAGFVVQPIVGYYSDRCTSKMGRRRPFILAGCIIICLSVLVIGFSADIGRRLGDTKEHCSTFTGSRWSAAAVYIVGFWFLDFANNTVQGPARAMMADLAAGQHGPNVGQAIFSLWMALGSVLGYLSGANAKWHDWLPWLKTAACCDACANLKGAFLTAVVLIIISMSVTLWLAGEERLDKESVDTSGGACSAFMDLFKTLKKLPPAMFSVLAVTAVTWLSWFPFFQYNTDWMGREIFHGEPQGAGGKADLYEAGVREGAIGLLFCSVALGVTSFFIPRLCRKLTSRVVWSVSSLMVFVLMTAMVVLGMVSMKGYRPSLAASLSGPDHSFKGGALAIFALIGIPQAVLYSVPWAVASEVATEDGGGQGLTIGVLNIAIVLPQLVIALGAGPIDGAFNKGNTPAFGIGAAFALICAVLALILLPKTRGVSNATVMAGGH

SEQ ID NO: 12403 - protein, 476 aa, Zea mays subsp. mays
  peptide (1)..(476): Ceres Seq. ID no. 12348843
  misc_feature (1)..(475): Pfam Name: Sugar (and other) transporter Pfam Description: Sugar (and other) transporter
  misc_feature (1)..(476): Homolog of NCBI NO: 29467456 NR Description: sucrose transporter [Oryza sativa (japonica
  misc_feature (1)..(476): Homolog of NCBI NO: 5771354 NR Description: Sucrose Transporter [Zea mays]
  misc_feature (1)..(476): Homolog of NCBI NO: 9624451 NR Description: sucrose transporter [Oryza sativa subsp. indica]
  misc_feature (1)..(476): Homolog of NCBI NO: 7489560 NR Description: probable sucrose transport protein - rice
  misc_feature (1)..(476): Homolog of NCBI NO: 15718401 NR Description: sucrose transporter [Oryza sativa (japonica
  misc_feature (1)..(476): Homolog of NCBI NO: 20152871 NR Description: sucrose transporter SUT1A [Triticum aestivum]
  misc_feature (1)..(476): Homolog of NCBI NO: 7024415 NR Description: sucrose transporter 1 [Hordeum vulgare subsp.
  misc_feature (1)..(476): Homolog of NCBI NO: 16152148 NR Description: sucrose transporter [Oryza sativa subsp. indica]
  misc_feature (1)..(476): Homolog of NCBI NO: 19548165 NR Description: sucrose transporter SUT1D [Triticum aestivum]
  misc_feature (1)..(476): Homolog of NCBI NO: 20152873 NR Description: sucrose transporter SUT1B [Triticum aestivum]
MVSGGIQYGWALQLSLLSPYSQTLGISHSYVSLTWICGPIAGFVVQPIVGYYSDRCTSKMGRRRPFILAGCIIICLSVLVIGFSADIGRRLGDTKEHCSTFTGSRWSAAAVYIVGFWFLDFANNTVQGPARAMMADLAAGQHGPNVGQAIFSLWMALGSVLGYLSGANAKWHDWLPWLKTAACCDACANLKGAFLTAVVLIIISMSVTLWLAGEERLDKESVDTSGGACSAFMDLFKTLKKLPPAMFSVLAVTAVTWLSWFPFFQYNTDWMGREIFHGEPQGAGGKADLYEAGVREGAIGLLFCSVALGVTSFFIPRLCRKLTSRVVWSVSSLMVFVLMTAMVVLGMVSMKGYRPSLAASLSGPDHSFKGGALAIFALIGIPQAVLYSVPWAVASEVATEDGGGQGLTIGVLNIAIVLPQLVIALGAGPIDGAFNKGNTPAFGIGAAFALICAVLALILLPKTRGVSNATVMAGGH

SEQ ID NO: 12404 - DNA, 1299 bp, Zea mays subsp. mays
  misc_feature (1)..(1299): Ceres Seq. ID no. 12344579
  misc_feature: MA Experiment ID: 108523 Result: Down-regulated in Transcription
  misc_feature: MA Experiment 108523 PARAMETER Experiment Name: Zm_42deg_Heat_P Parameter: Age (day) Value: 8
  misc_feature: MA Experiment 108523 PARAMETER Experiment Name: Zm_42deg_Heat_P Parameter: Organism Value: Zea mays
  misc_feature: MA Experiment 108523 PARAMETER Experiment Name: Zm_42deg_Heat_P Parameter: Plant Line Value: 35A19
  misc_feature: MA Experiment 108523 PARAMETER Experiment Name: Zm_42deg_Heat_P Parameter: Temperature (deg C) Value: 42 vs. 22
  misc_feature: MA Experiment 108523 PARAMETER Experiment Name: Zm_42deg_Heat_P Parameter: Timepoint (hr) Value: 6
  misc_feature: MA Experiment 108523 PARAMETER Experiment Name: Zm_42deg_Heat_P Parameter: Tissue Value: Aerial
  misc_feature: MA Experiment ID: 108528 Result: Up-regulated in Transcription
  misc_feature: MA Experiment 108528 PARAMETER Experiment Name: Zm_Imbibed_Seeds_P Parameter: Age (day) Value: 5 vs. 2
  misc_feature: MA Experiment 108528 PARAMETER Experiment Name: Zm_Imbibed_Seeds_P Parameter: Organism Value: Zea mays
  misc_feature: MA Experiment 108528 PARAMETER Experiment Name: Zm_Imbibed_Seeds_P Parameter: Plant Line Value: 35A19
  misc_feature: MA Experiment 108528 PARAMETER Experiment Name: Zm_Imbibed_Seeds_P Parameter: Tissue Value: Aerial vs. Embryo
  misc_feature: MA Experiment ID: 108530 Result: Up-regulated in Transcription
  misc_feature: MA Experiment 108530 PARAMETER Experiment Name: Zm_Imbibed_Seeds_P Parameter: Age (day) Value: 6 vs. 2
  misc_feature: MA Experiment 108530 PARAMETER Experiment Name: Zm_Imbibed_Seeds_P Parameter: Organism Value: Zea mays
  misc_feature: MA Experiment 108530 PARAMETER Experiment Name: Zm_Imbibed_Seeds_P Parameter: Plant Line Value: 35A19
  misc_feature: MA Experiment 108530 PARAMETER Experiment Name: Zm_Imbibed_Seeds_P Parameter: Tissue Value: Aerial vs. Embryo
  misc_feature: MA Experiment ID: 108535 Result: Down-regulated in Transcription
  misc_feature: MA Experiment 108535 PARAMETER Experiment Name: Zm_Meristem_P Parameter: Age (day) Value: 8
  misc_feature: MA Experiment 108535 PARAMETER Experiment Name: Zm_Meristem_P Parameter: Organism Value: Zea mays
  misc_feature: MA Experiment 108535 PARAMETER Experiment Name: Zm_Meristem_P Parameter: Plant Line Value: 35A19
  misc_feature: MA Experiment 108535 PARAMETER Experiment Name: Zm_Meristem_P Parameter: Tissue Value: Root Meristem vs. Above Root Meristem
  misc_feature: MA Experiment ID: 108545 Result: Up-regulated in Transcription
  misc_feature: MA Experiment 108545 PARAMETER Experiment Name: Zm_Imbibed_Seeds_P Parameter: Age (day) Value: 3 vs. 2
  misc_feature: MA Experiment 108545 PARAMETER Experiment Name: Zm_Imbibed_Seeds_P Parameter: Organism Value: Zea mays
  misc_feature: MA Experiment 108545 PARAMETER Experiment Name: Zm_Imbibed_Seeds_P Parameter: Plant Line Value: 35A19
  misc_feature: MA Experiment 108545 PARAMETER Experiment Name: Zm_Imbibed_Seeds_P Parameter: Tissue Value: Aerial vs. Embryo
  misc_feature: MA Experiment ID: 108547 Result: Up-regulated in Transcription
  misc_feature: MA Experiment 108547 PARAMETER Experiment Name: Zm_Imbibed_Seeds_P Parameter: Age (day) Value: 4 vs. 2
  misc_feature: MA Experiment 108547 PARAMETER Experiment Name: Zm_Imbibed_Seeds_P Parameter: Organism Value: Zea mays
  misc_feature: MA Experiment 108547 PARAMETER Experiment Name: Zm_Imbibed_Seeds_P Parameter: Plant Line Value: 35A19
  misc_feature: MA Experiment 108547 PARAMETER Experiment Name: Zm_Imbibed_Seeds_P Parameter: Tissue Value: Aerial vs. Embryo
  misc_feature: MA Experiment ID: 20000478 Result: Up-regulated in Transcription
  misc_feature: MA Experiment 20000478 PARAMETER Experiment Name: Zm_5mM_SA_P Parameter: Age (day) Value: 11
  misc_feature: MA Experiment 20000478 PARAMETER Experiment Name: Zm_5mM_SA_P Parameter: Organism Value: Zea mays
  misc_feature: MA Experiment 20000478 PARAMETER Experiment Name: Zm_5mM_SA_P Parameter: Plant Line Value: 35A19
  misc_feature: MA Experiment 20000478 PARAMETER Experiment Name: Zm_5mM_SA_P Parameter: Timepoint (hr) Value: 72
  misc_feature: MA Experiment 20000478 PARAMETER Experiment Name: Zm_5mM_SA_P Parameter: Tissue Value: Aerial
  misc_feature: MA Experiment 20000478 PARAMETER Experiment Name: Zm_5mM_SA_P Parameter: Treatment Value: 5mM SA vs. No Treatment
  misc_feature: MA Experiment ID: 20000479 Result: Up-regulated in Transcription
  misc_feature: MA Experiment 20000479 PARAMETER Experiment Name: Zm_Drought_P Parameter: Age (day) Value: 10
  misc_feature: MA Experiment 20000479 PARAMETER Experiment Name: Zm_Drought_P Parameter: Organism Value: Zea mays
  misc_feature: MA Experiment 20000479 PARAMETER Experiment Name: Zm_Drought_P Parameter: Plant Line Value: 35A19
  misc_feature: MA Experiment 20000479 PARAMETER Experiment Name: Zm_Drought_P Parameter: Timepoint (hr) Value: 48
  misc_feature: MA Experiment 20000479 PARAMETER Experiment Name: Zm_Drought_P Parameter: Tissue Value: Aerial
  misc_feature: MA Experiment 20000479 PARAMETER Experiment Name: Zm_Drought_P Parameter: Treatment Value: Drought vs. No Drought
  misc_feature: MA Experiment ID: 20000480 Result: Up-regulated in Transcription
  misc_feature: MA Experiment 20000480 PARAMETER Experiment Name: Zm_Drought_P Parameter: Age (day) Value: 11
  misc_feature: MA Experiment 20000480 PARAMETER Experiment Name: Zm_Drought_P Parameter: Organism Value: Zea mays
  misc_feature: MA Experiment 20000480 PARAMETER Experiment Name: Zm_Drought_P Parameter: Plant Line Value: 35A19
  misc_feature: MA Experiment 20000480 PARAMETER Experiment Name: Zm_Drought_P Parameter: Timepoint (hr) Value: 72
  misc_feature: MA Experiment 20000480 PARAMETER Experiment Name: Zm_Drought_P Parameter: Tissue Value: Aerial
  misc_feature: MA Experiment 20000480 PARAMETER Experiment Name: Zm_Drought_P Parameter: Treatment Value: Drought vs. No Drought
  misc_feature: MA Experiment ID: 20000492 Result: Down-regulated in Transcription
  misc_feature: MA Experiment 20000492 PARAMETER Experiment Name: Zm_Hybrid_Seed_Dev_P Parameter: DAP Value: 12
  misc_feature: MA Experiment 20000492 PARAMETER Experiment Name: Zm_Hybrid_Seed_Dev_P Parameter: Organism Value: Zea mays
  misc_feature: MA Experiment 20000492 PARAMETER Experiment Name: Zm_Hybrid_Seed_Dev_P Parameter: Plant Line Value: 35A19
  misc_feature: MA Experiment 20000492 PARAMETER Experiment Name: Zm_Hybrid_Seed_Dev_P Parameter: Tissue Value: Fert Kernel vs. Unfert Floret
  misc_feature: MA Experiment ID: 20000535 Result: Down-regulated in Transcription
  misc_feature: MA Experiment 20000535 PARAMETER Experiment Name: Zm_Hybrid_Seed_Dev_P Parameter: DAP Value: 30 vs. 12
  misc_feature: MA Experiment 20000535 PARAMETER Experiment Name: Zm_Hybrid_Seed_Dev_P Parameter: Organism Value: Zea mays
  misc_feature: MA Experiment 20000535 PARAMETER Experiment Name: Zm_Hybrid_Seed_Dev_P Parameter: Plant Line Value: 35A19
  misc_feature: MA Experiment 20000535 PARAMETER Experiment Name: Zm_Hybrid_Seed_Dev_P Parameter: Tissue Value: Embryo vs. Unfert Floret
attcttccactccacctcgcccgtggcccgtacccgtcgtcgtcgtccacacagccacaagctgctgctgctgctgcgcgtgcttcctcttcagttcagctgaggtagcggcgcctcacccatcccccccgctacatacacatatctccttcttcgaagaactcggtcctttgggagcgagcaggagcaggagcaggacaggaccaggaagatcattatcaggagaagctaggcggggatatggcgaacgctggcggcggggcggccggggaaggggagtggctcaaggtcgcccagctcagggccctcgtccaggaggaccaccgcgccaaggaggtggacaacctgacgctgcgtcggttcctgcgcgcgcgcggccacaacgtggacaaggcggccgccatgctgctcaagttcctcaggtggcgggcggaggcggcgcccggcggcggcaccgtgcgggaggagcaggtgcgcggggagctggagcaggacaagatctacatgggcggcgtcgacaggaccggccgccccatcatcgtcggcttgctcgccaagcactactccgccaaccgcgacatggcggagttcaagagttttgtggtctacttcttcgacaagatctgtgccaggatccccagagggcaggagaagttcctcgccatcatggatctcaagggctggggctacgcaaactgcgacgtccgggcctacatcgcggccattgagatcatgcagaactactacccggagcggctgggcaaggcgctgatgatcaacgtgccctacatcttcctcaaggtgtggaagacgatgatctaccccttcatcgacgccaacaccagggacaagttcgtgttcgtggatgacaagagcctgcgggagacgctgcggcgggagatcgacgagagccagctcccggagttccttggcgggaagatgcctctcgtctccctcaaggactacgcccagcagcctcagcccgtttgcgagtgagtctgtcgtagcgatggtggccggccggtgacgtgagcgacccaaagccgaaagctgattcgatctagactaagctaatacagcctacaagagggaggaagagaggccctacccgtggaattaagtcattagtttgtggtccaattcaataagaaagtaaatgtggtgtgtgaagatggtatggcattatcagtctttaatcccatattatacatttagatagaagaaaatcaacttatatgtggtagtgttccctactttttatatgagataaataaagggatacggagaatgctgcacgcc

SEQ ID NO: 12405 - protein, 251 aa, Zea mays subsp. mays
  peptide (1)..(251): Ceres Seq. ID no. 12344580
  misc_feature (86)..(235): Pfam Name: CRAL/TRIO domain Pfam Description: CRAL/TRIO domain
  misc_feature (1)..(244): Homolog of NCBI NO: 34907052 NR Description: sec14 like protein [Oryza sativa (japonica >gi|20160730|dbj|BAB89672.1| sec14 like protein [Oryza sativa
  misc_feature (1)..(244): Homolog of NCBI NO: 2286121 NR Description: sec14 like protein [Oryza sativa]
  misc_feature (13)..(238): Homolog of NCBI NO: 27573358 NR Description: putative phosphatidylinositol/phosphatidylcholine
  misc_feature (8)..(241): Homolog of NCBI NO: 17226662 NR Description: polyphosphoinositide binding protein [Gossypium
MANAGGGAAGEGEWLKVAQLRALVQEDHRAKEVDNLTLRRFLRARGHNVDKAAAMLLKFLRWRAEAAPGGGTVREEQVRGELEQDKIYMGGVDRTGRPIIVGLLAKHYSANRDMAEFKSFVVYFFDKICARIPRGQEKFLAIMDLKGWGYANCDVRAYIAAIEIMQNYYPERLGKALMINVPYIFLKVWKTMIYPFIDANTRDKFVFVDDKSLRETLRREIDESQLPEFLGGKMPLVSLKDYAQQPQPVCE

SEQ ID NO: 12406 - protein, 241 aa, Zea mays subsp. mays
  peptide (1)..(241): Ceres Seq. ID no. 12344581
SSTPPRPWPVPVVVVHTATSCCCCCACFLFSSAEVAAPHPSPPLHTHISFFEELGPLGASRSRSRTGPGRSLSGEARRGYGERWRRGGRGRGVAQGRPAQGPRPGGPPRQGGGQPDAASVPARARPQRGQGGRHAAQVPQVAGGGGARRRHRAGGAGARGAGAGQDLHGRRRQDRPPHHRRLARQALLRQPRHGGVQEFCGLLLRQDLCQDPQRAGEVPRHHGSQGLGLRKLRRPGLHRGH

SEQ ID NO: 12407 - protein, 197 aa, Zea mays subsp. mays
  peptide (1)..(197): Ceres Seq. ID no. 12344582
  misc_feature (32)..(181): Pfam Name: CRAL/TRIO domain Pfam Description: CRAL/TRIO domain
  misc_feature (1)..(190): Homolog of NCBI NO: 34907052 NR Description: sec14 like protein [Oryza sativa (japonica >gi|20160730|dbj|BAB89672.1| sec14 like protein [Oryza sativa
  misc_feature (1)..(190): Homolog of NCBI NO: 2286121 NR Description: sec14 like protein [Oryza sativa]
  misc_feature (1)..(184): Homolog of NCBI NO: 27573358 NR Description: putative phosphatidylinositol/phosphatidylcholine
  misc_feature (1)..(187): Homolog of NCBI NO: 17226662 NR Description: polyphosphoinositide binding protein [Gossypium
MLLKFLRWRAEAAPGGGTVREEQVRGELEQDKIYMGGVDRTGRPIIVGLLAKHYSANRDMAEFKSFVVYFFDKICARIPRGQEKFLAIMDLKGWGYANCDVRAYIAAIEIMQNYYPERLGKALMINVPYIFLKVWKTMIYPFIDANTRDKFVFVDDKSLRETLRREIDESQLPEFLGGKMPLVSLKDYAQQPQPVCE

SEQ ID NO: 12408 - DNA, 1770 bp, Zea mays subsp. mays
  misc_feature (1)..(1770): Ceres Seq. ID no. 12347178
  misc_feature: MA Experiment ID: 108535 Result: Up-regulated in Transcription
  misc_feature: MA Experiment 108535 PARAMETER Experiment Name: Zm_Meristem_P Parameter: Age (day) Value: 8
  misc_feature: MA Experiment 108535 PARAMETER Experiment Name: Zm_Meristem_P Parameter: Organism Value: Zea mays
  misc_feature: MA Experiment 108535 PARAMETER Experiment Name: Zm_Meristem_P Parameter: Plant Line Value: 35A19
  misc_feature: MA Experiment 108535 PARAMETER Experiment Name: Zm_Meristem_P Parameter: Tissue Value: Root Meristem vs. Above Root Meristem
  misc_feature: MA Experiment ID: 108543 Result: Up-regulated in Transcription
  misc_feature: MA Experiment ID: 20000535 Result: Up-regulated in Transcription
  misc_feature: MA Experiment 20000535 PARAMETER Experiment Name: Zm_Hybrid_Seed_Dev_P Parameter: DAP Value: 30 vs. 12
  misc_feature: MA Experiment 20000535 PARAMETER Experiment Name: Zm_Hybrid_Seed_Dev_P Parameter: Organism Value: Zea mays
  misc_feature: MA Experiment 20000535 PARAMETER Experiment Name: Zm_Hybrid_Seed_Dev_P Parameter: Plant Line Value: 35A19
  misc_feature: MA Experiment 20000535 PARAMETER Experiment Name: Zm_Hybrid_Seed_Dev_P Parameter: Tissue Value: Embryo vs. Unfert Floret
acgaacacatagatccgcatcgtcgatccatccgtcctcctcccgacggtacgccagcctgccagagtccgacgcacgcctagggctcctggacacagcagagcccacgccttgactcgctccgttcgagtggagcgcacaggcaccggccggcgaccagagagggagcggatcgagggggctcggcttgagtggaggagatggaccgcaaggatgtcgggatcctcgccatggacatctacttcccgccctcctgcgtgcagcaggaagcacttgaggcccatgatggggcgagcaaagggaagtacaccattgggcttgggcaagattgcatggccttttgcagcgaggtggaggatgtcatctcaatgagtttgacggttgtcaattctctgctgaaaaaatacaagattgatcccaagctaattggtcgcttggaggtgggaagtgaaacagttatagacaaaagcaaatccatcaaaacttggctgatgcagatttttgaggaaagtgataatactgacattgaaggtgttgactccagcaatgcatgttatggtgggacagcagccctactgaattgtgtgaattgggtcgaaagtaactcctgggatggccgttatggtcttgtcgtttgcacggacagcgcggtttatgcggaaggaccagctcgtccaacaggaggtgctgctgctatagcaatgctcattggtcctaatgctccgatttccttcgagagcaaatatagagcttctcatatggctcatgtttatgatttctacaaacctgatcttgcaagtgaatatccggttgttgatggtaaattatcccaaacatgctacctgatggctcttgactcatgctacagacagttctgcaacaagtatgagaagattgcgggtaaacaattctcaatttcagatgcagaatattttgtgttccattctccatacaacaagctcgtgcagaagagttttgctcgactttactacaatgacttcatgcgcaactgcagctatgttgatgatgatgctaaagagaagctccagtccttttcaaatttgactggtgaagagagctaccagagtcgcgacttggaaaaggcctcacaacaggtcgcaaagcacctgtatggcatcaaagttcagccaacgactctgcttccgaaacagatcggcaacatgtatacggcatccctttatgctgcattggcatctgtgctatataacaagcatgatagtctgaatggacaaagaattgtgatgttctcttacggcagcggcttgacatccactatgttttcgttgaggctaaacaatggccagcatcccttcagtctatcaaacataggttcagttcttggtgtcaccgagaagcttcagtcaagacatgagaccttgcctgagaaattcgttgagacgctgaagctgatggaacaccgatacggcgcaaaagacttcgagacgagcagcgacacgagtctcctgcagccgggcacattctacctcaccaaggtggactccatgtaccggaggttctattcccagaagccggccgaggaaacaggcggcggtaaaaccaagtgctgcaacggcttcgcaaatggccactagtgggagtccgcgtgccgtttgaattgctacgtcgcccttctgtactgttgatcatcattctctgtgttttgatcatgcttgtggttagcgttttcaccctagggtgtttctgaaataatatattactagatatatccccatctgttacatcggggtc

SEQ ID NO: 12409 - protein, 470 aa, Zea mays subsp. mays
  peptide (1)..(470): Ceres Seq. ID no. 12347179
  misc_feature (4)..(450): Pfam Name: Hydroxymethylglutaryl-coenzyme A synthase Pfam Description: Hydroxymethylglutaryl-coenzyme A synthase
  misc_feature (2)..(465): Homolog of NCBI NO: 34902200 NR Description: Putative hydroxymethylglutaryl coenzyme A
  misc_feature (4)..(470): Homolog of NCBI NO: 16417956 NR Description: hydroxymethylglutaryl coenzyme A synthase [Hevea
  misc_feature (4)..(470): Homolog of NCBI NO: 14916100 NR Description: hydroxymethylglutaryl coenzyme A synthase [Hevea
  misc_feature (4)..(450): Homolog of NCBI NO: 7799986 NR Description: HMG-CoA synthase [Brassica juncea]
  misc_feature (4)..(450): Homolog of NCBI NO: 1143390 NR Description: hydroxymethylglutaryl-CoA synthase [Arabidopsis
  misc_feature (4)..(450): Homolog of NCBI NO: 15234313 NR Description: hydroxymethylglutaryl-CoA synthase; protein id: supported by cDNA: 22413., supported by cDNA: gi_4098520
  misc_feature (4)..(450): Homolog of NCBI NO: 11192003 NR Description: HMG-CoA synthase [Brassica juncea]
  misc_feature (4)..(450): Homolog of NCBI NO: 11192005 NR Description: HMG-CoA synthase [Brassica juncea]
  misc_feature (4)..(450): Homolog of NCBI NO: 11192007 NR Description: HMG-CoA synthase [Brassica juncea]
  misc_feature (4)..(465): Homolog of NCBI NO: 7436678 NR Description: hydroxymethylglutaryl-CoA synthase (EC 4.1.3.5),
MDRKDVGILAMDIYFPPSCVQQEALEAHDGASKGKYTIGLGQDCMAFCSEVEDVISMSLTVVNSLLKKYKIDPKLIGRLEVGSETVIDKSKSIKTWLMQIFEESDNTDIEGVDSSNACYGGTAALLNCVNWVESNSWDGRYGLVVCTDSAVYAEGPARPTGGAAAIAMLIGPNAPISFESKYRASHMAHVYDFYKPDLASEYPVVDGKLSQTCYLMALDSCYRQFCNKYEKIAGKQFSISDAEYFVFHSPYNKLVQKSFARLYYNDFMRNCSYVDDDAKEKLQSFSNLTGEESYQSRDLEKASQQVAKHLYGIKVQPTTLLPKQIGNMYTASLYAALASVLYNKHDSLNGQRIVMFSYGSGLTSTMFSLRLNNGQHPFSLSNIGSVLGVTEKLQSRHETLPEKFVETLKLMEHRYGAKDFETSSDTSLLQPGTFYLTKVDSMYRRFYSQKPAEETGGGKTKCCNGFANGH

SEQ ID NO: 12410 - protein, 460 aa, Zea mays subsp. mays
  peptide (1)..(460): Ceres Seq. ID no. 12347180
  misc_feature (1)..(440): Pfam Name: Hydroxymethylglutaryl-coenzyme A synthase Pfam Description: Hydroxymethylglutaryl-coenzyme A synthase
  misc_feature (1)..(455): Homolog of NCBI NO: 34902200 NR Description: Putative hydroxymethylglutaryl coenzyme A
  misc_feature (1)..(460): Homolog of NCBI NO: 16417956 NR Description: hydroxymethylglutaryl coenzyme A synthase [Hevea
  misc_feature (1)..(460): Homolog of NCBI NO: 14916100 NR Description: hydroxymethylglutaryl coenzyme A synthase [Hevea
  misc_feature (1)..(440): Homolog of NCBI NO: 7799986 NR Description: HMG-CoA synthase [Brassica juncea]
  misc_feature (1)..(440): Homolog of NCBI NO: 1143390 NR Description: hydroxymethylglutaryl-CoA synthase [Arabidopsis
  misc_feature (1)..(440): Homolog of NCBI NO: 15234313 NR Description: hydroxymethylglutaryl-CoA synthase; protein id: supported by cDNA: 22413., supported by cDNA: gi_4098520
  misc_feature (1)..(440): Homolog of NCBI NO: 11192003 NR Description: HMG-CoA synthase [Brassica juncea]
  misc_feature (1)..(440): Homolog of NCBI NO: 11192005 NR Description: HMG-CoA synthase [Brassica juncea]
  misc_feature (1)..(440): Homolog of NCBI NO: 11192007 NR Description: HMG-CoA synthase [Brassica juncea]
  misc_feature (1)..(455): Homolog of NCBI NO: 7436678 NR Description: hydroxymethylglutaryl-CoA synthase (EC 4.1.3.5),
MDIYFPPSCVQQEALEAHDGASKGKYTIGLGQDCMAFCSEVEDVISMSLTVVNSLLKKYKIDPKLIGRLEVGSETVIDKSKSIKTWLMQIFEESDNTDIEGVDSSNACYGGTAALLNCVNWVESNSWDGRYGLVVCTDSAVYAEGPARPTGGAAAIAMLIGPNAPISFESKYRASHMAHVYDFYKPDLASEYPVVDGKLSQTCYLMALDSCYRQFCNKYEKIAGKQFSISDAEYFVFHSPYNKLVQKSFARLYYNDFMRNCSYVDDDAKEKLQSFSNLTGEESYQSRDLEKASQQVAKHLYGIKVQPTTLLPKQIGNMYTASLYAALASVLYNKHDSLNGQRIVMFSYGSGLTSTMFSLRLNNGQHPFSLSNIGSVLGVTEKLQSRHETLPEKFVETLKLMEHRYGAKDFETSSDTSLLQPGTFYLTKVDSMYRRFYSQKPAEETGGGKTKCCNGFANGH

SEQ ID NO: 12411 - protein, 426 aa, Zea mays subsp. mays
  peptide (1)..(426): Ceres Seq. ID no. 12347181
  misc_feature (1)..(406): Pfam Name: Hydroxymethylglutaryl-coenzyme A synthase Pfam Description: Hydroxymethylglutaryl-coenzyme A synthase
  misc_feature (1)..(421): Homolog of NCBI NO: 34902200 NR Description: Putative hydroxymethylglutaryl coenzyme A
  misc_feature (1)..(426): Homolog of NCBI NO: 16417956 NR Description: hydroxymethylglutaryl coenzyme A synthase [Hevea
  misc_feature (1)..(426): Homolog of NCBI NO: 14916100 NR Description: hydroxymethylglutaryl coenzyme A synthase [Hevea
  misc_feature (1)..(406): Homolog of NCBI NO: 7799986 NR Description: HMG-CoA synthase [Brassica juncea]
  misc_feature (1)..(406): Homolog of NCBI NO: 1143390 NR Description: hydroxymethylglutaryl-CoA synthase [Arabidopsis
  misc_feature (1)..(406): Homolog of NCBI NO: 15234313 NR Description: hydroxymethylglutaryl-CoA synthase; protein id: supported by cDNA: 22413., supported by cDNA: gi_4098520
  misc_feature (1)..(406): Homolog of NCBI NO: 11192003 NR Description: HMG-CoA synthase [Brassica juncea]
  misc_feature (1)..(406): Homolog of NCBI NO: 11192005 NR Description: HMG-CoA synthase [Brassica juncea]
  misc_feature (1)..(406): Homolog of NCBI NO: 11192007 NR Description: HMG-CoA synthase [Brassica juncea]
  misc_feature (1)..(421): Homolog of NCBI NO: 7436678 NR Description: hydroxymethylglutaryl-CoA synthase (EC 4.1.3.5),
MAFCSEVEDVISMSLTVVNSLLKKYKIDPKLIGRLEVGSETVIDKSKSIKTWLMQIFEESDNTDIEGVDSSNACYGGTAALLNCVNWVESNSWDGRYGLVVCTDSAVYAEGPARPTGGAAAIAMLIGPNAPISFESKYRASHMAHVYDFYKPDLASEYPVVDGKLSQTCYLMALDSCYRQFCNKYEKIAGKQFSISDAEYFVFHSPYNKLVQKSFARLYYNDFMRNCSYVDDDAKEKLQSFSNLTGEESYQSRDLEKASQQVAKHLYGIKVQPTTLLPKQIGNMYTASLYAALASVLYNKHDSLNGQRIVMFSYGSGLTSTMFSLRLNNGQHPFSLSNIGSVLGVTEKLQSRHETLPEKFVETLKLMEHRYGAKDFETSSDTSLLQPGTFYLTKVDSMYRRFYSQKPAEETGGGKTKCCNGFANGH

SEQ ID NO: 12412 - DNA, 831 bp, Zea mays subsp. mays
  misc_feature (1)..(831): Ceres Seq. ID no. 12345704
  misc_feature: MA Experiment ID: 108529 Result: Up-regulated in Transcription
  misc_feature: MA Experiment 108529 PARAMETER Experiment Name: Zm_Imbibed_Seeds_P Parameter: Age (day) Value: 5 vs. 2
  misc_feature: MA Experiment 108529 PARAMETER Experiment Name: Zm_Imbibed_Seeds_P Parameter: Organism Value: Zea mays
  misc_feature: MA Experiment 108529 PARAMETER Experiment Name: Zm_Imbibed_Seeds_P Parameter: Plant Line Value: 35A19
  misc_feature: MA Experiment 108529 PARAMETER Experiment Name: Zm_Imbibed_Seeds_P Parameter: Tissue Value: Roots vs. Embryo
  misc_feature: MA Experiment ID: 108535 Result: Down-regulated in Transcription
  misc_feature: MA Experiment 108535 PARAMETER Experiment Name: Zm_Meristem_P Parameter: Age (day) Value: 8
  misc_feature: MA Experiment 108535 PARAMETER Experiment Name: Zm_Meristem_P Parameter: Organism Value: Zea mays
  misc_feature: MA Experiment 108535 PARAMETER Experiment Name: Zm_Meristem_P Parameter: Plant Line Value: 35A19
  misc_feature: MA Experiment 108535 PARAMETER Experiment Name: Zm_Meristem_P Parameter: Tissue Value: Root Meristem vs. Above Root Meristem
  misc_feature: MA Experiment ID: 20000479 Result: Up-regulated in Transcription
  misc_feature: MA Experiment 20000479 PARAMETER Experiment Name: Zm_Drought_P Parameter: Age (day) Value: 10
  misc_feature: MA Experiment 20000479 PARAMETER Experiment Name: Zm_Drought_P Parameter: Organism Value: Zea mays
  misc_feature: MA Experiment 20000479 PARAMETER Experiment Name: Zm_Drought_P Parameter: Plant Line Value: 35A19
  misc_feature: MA Experiment 20000479 PARAMETER Experiment Name: Zm_Drought_P Parameter: Timepoint (hr) Value: 48
  misc_feature: MA Experiment 20000479 PARAMETER Experiment Name: Zm_Drought_P Parameter: Tissue Value: Aerial
  misc_feature: MA Experiment 20000479 PARAMETER Experiment Name: Zm_Drought_P Parameter: Treatment Value: Drought vs. No Drought
  misc_feature: MA Experiment ID: 20000480 Result: Up-regulated in Transcription
  misc_feature: MA Experiment 20000480 PARAMETER Experiment Name: Zm_Drought_P Parameter: Age (day) Value: 11
  misc_feature: MA Experiment 20000480 PARAMETER Experiment Name: Zm_Drought_P Parameter: Organism Value: Zea mays
  misc_feature: MA Experiment 20000480 PARAMETER Experiment Name: Zm_Drought_P Parameter: Plant Line Value: 35A19
  misc_feature: MA Experiment 20000480 PARAMETER Experiment Name: Zm_Drought_P Parameter: Timepoint (hr) Value: 72
  misc_feature: MA Experiment 20000480 PARAMETER Experiment Name: Zm_Drought_P Parameter: Tissue Value: Aerial
  misc_feature: MA Experiment 20000480 PARAMETER Experiment Name: Zm_Drought_P Parameter: Treatment Value: Drought vs. No Drought
  misc_feature: MA Experiment ID: 20000492 Result: Down-regulated in Transcription
  misc_feature: MA Experiment 20000492 PARAMETER Experiment Name: Zm_Hybrid_Seed_Dev_P Parameter: DAP Value: 12
  misc_feature: MA Experiment 20000492 PARAMETER Experiment Name: Zm_Hybrid_Seed_Dev_P Parameter: Organism Value: Zea mays
  misc_feature: MA Experiment 20000492 PARAMETER Experiment Name: Zm_Hybrid_Seed_Dev_P Parameter: Plant Line Value: 35A19
  misc_feature: MA Experiment 20000492 PARAMETER Experiment Name: Zm_Hybrid_Seed_Dev_P Parameter: Tissue Value: Fert Kernel vs. Unfert Floret
  misc_feature: MA Experiment ID: 20000535 Result: Down-regulated in Transcription
  misc_feature: MA Experiment 20000535 PARAMETER Experiment Name: Zm_Hybrid_Seed_Dev_P Parameter: DAP Value: 30 vs. 12
  misc_feature: MA Experiment 20000535 PARAMETER Experiment Name: Zm_Hybrid_Seed_Dev_P Parameter: Organism Value: Zea mays
  misc_feature: MA Experiment 20000535 PARAMETER Experiment Name: Zm_Hybrid_Seed_Dev_P Parameter: Plant Line Value: 35A19
  misc_feature: MA Experiment 20000535 PARAMETER Experiment Name: Zm_Hybrid_Seed_Dev_P Parameter: Tissue Value: Embryo vs. Unfert Floret
agaaaaagtacacctgtcgcgtaagcgtcctcaggcagcagctccccggtcgcggtctctgtctctctgaagggaaagctctgtttccccttcccggtgccggagtcggggaaggtcaccgcgggcgcgagccgatggacagcaacaacctcctggcggcgtggccggtcctggggccgggcgtcgccggcgccgtattcggcgcaggctggtggttttgggtcgacgccgtcgtctgcagcgccgccgccgtgccattcctccactacctcccagggttcttcgcctcgttcgccgcgctcatgttcaactgcgtcaaccgggaggacatcggcgatggctactactcaccgtacgacgactccgagtggagggtgaagctctggctttttatttcgtacgtggtgtcgtttgtttcgctggccggggcagtgggtttcttggttcaagatgcgcttacggatacggggccatctgcgtggactggcagtgctggcatcctgcagtgcgtgtttgtgttagtgagtgggctgatctactggacgtgccactctgaagattgacttaagaagtataggtatatatggccaaggaggaggaggatggagactgcttttctcagaagcgattgcttttccgtagtacgtttctggaggcacctttggaccgtgctttccgaaacgggtggaataaagagccattttctagttgtttcaagagagatgtagataagctgtactactattttacacgtgtttatagtcgtgtatcatgttgcttaaaactactttgtgaggtgttgttttggagcaagaaacttataggggtgct

SEQ ID NO: 12413 - protein, 186 aa, Zea mays subsp. mays
  peptide (1)..(186): Ceres Seq. ID no. 12345705
  misc_feature (49)..(184): Pfam Name: Uncharacterised protein family (UPF0220) Pfam Description: Uncharacterised protein family (UPF0220)
  misc_feature (49)..(185): Homolog of NCBI NO: 18400231 NR Description: expressed protein; protein id: At1g36980.1, by cDNA: gi_15292702, supported by cDNA: gi_19310688 [Arabidopsis >gi|15292703|gb|AAK92720.1| unknown protein [Arabidopsis
  misc_feature (49)..(147): Homolog of NCBI NO: 25373092 NR Description: protein T32E20.29 [imported] - Arabidopsis >gi|8778790|gb|AAF79798.1|AC020646_21 T32E20.29 [Arabidopsis
  misc_feature (61)..(179): Homolog of NCBI NO: 24657484 NR Description: CG15012-PB [Drosophila melanogaster]
  misc_feature (33)..(186): Homolog of NCBI NO: 27732805 NR Description: similar to Small membrane protein 1 [Rattus
  misc_feature (33)..(186): Homolog of NCBI NO: 34610239 NR Description: small membrane protein 1 [Mus musculus] Small membrane protein 1 >gi|12852025|dbj|BAB29242.1| unnamed
  misc_feature (62)..(186): Homolog of NCBI NO: 7657595 NR Description: small membrane protein 1 [Homo sapiens] Small membrane protein 1 >gi|4336325|gb|AAD17754.1| small protein 1 [Homo sapiens] >gi|12052780|emb|CAB66562.1|
  misc_feature (62)..(186): Homolog of NCBI NO: 27882119 NR Description: Similar to small membrane protein 1 [Danio rerio]
KKYTCRVSVLRQQLPGRGLCLSEGKALFPLPGAGVGEGHRGREPMDSNNLLAAWPVLGPGVAGAVFGAGWWFWVDAVVCSAAAVPFLHYLPGFFASFAALMFNCVNREDIGDGYYSPYDDSEWRVKLWLFISYVVSFVSLAGAVGFLVQDALTDTGPSAWTGSAGILQCVFVLVSGLIYWTCHSED

SEQ ID NO: 12414 - protein, 142 aa, Zea mays subsp. mays
  peptide (1)..(142): Ceres Seq. ID no. 12345706
  misc_feature (5)..(140): Pfam Name: Uncharacterised protein family (UPF0220) Pfam Description: Uncharacterised protein family (UPF0220)
  misc_feature (5)..(141): Homolog of NCBI NO: 18400231 NR Description: expressed protein; protein id: At1g36980.1, by cDNA: gi_15292702, supported by cDNA: gi_19310688 [Arabidopsis >gi|15292703|gb|AAK92720.1| unknown protein [Arabidopsis
  misc_feature (5)..(103): Homolog of NCBI NO: 25373092 NR Description: protein T32E20.29 [imported] - Arabidopsis >gi|8778790|gb|AAF79798.1|AC020646_21 T32E20.29 [Arabidopsis
  misc_feature (17)..(135): Homolog of NCBI NO: 24657484 NR Description: CG15012-PB [Drosophila melanogaster]
  misc_feature (1)..(142): Homolog of NCBI NO: 27732805 NR Description: similar to Small membrane protein 1 [Rattus
  misc_feature (1)..(142): Homolog of NCBI NO: 34610239 NR Description: small membrane protein 1 [Mus musculus] Small membrane protein 1 >gi|12852025|dbj|BAB29242.1| unnamed
  misc_feature (18)..(142): Homolog of NCBI NO: 7657595 NR Description: small membrane protein 1 [Homo sapiens] Small membrane protein 1 >gi|4336325|gb|AAD17754.1| small protein 1 [Homo sapiens] >gi|12052780|emb|CAB66562.1|
  misc_feature (18)..(142): Homolog of NCBI NO: 27882119 NR Description: Similar to small membrane protein 1 [Danio rerio]
MDSNNLLAAWPVLGPGVAGAVFGAGWWFWVDAVVCSAAAVPFLHYLPGFFASFAALMFNCVNREDIGDGYYSPYDDSEWRVKLWLFISYVVSFVSLAGAVGFLVQDALTDTGPSAWTGSAGILQCVFVLVSGLIYWTCHSED

SEQ ID NO: 12415 - DNA, 1129 bp, Zea mays subsp. mays
  misc_feature (1)..(1129): Ceres Seq. ID no. 12373395
  misc_feature: MA Experiment ID: 20000534 Result: Down-regulated in Transcription
  misc_feature: MA Experiment 20000534 PARAMETER Experiment Name: Zm_Hybrid_Pollen_P Parameter: Age (day) Value: 8
  misc_feature: MA Experiment 20000534 PARAMETER Experiment Name: Zm_Hybrid_Pollen_P Parameter: Organism Value: Zea mays
  misc_feature: MA Experiment 20000534 PARAMETER Experiment Name: Zm_Hybrid_Pollen_P Parameter: Plant Line Value: 35A19
  misc_feature: MA Experiment 20000534 PARAMETER Experiment Name: Zm_Hybrid_Pollen_P Parameter: Tissue Value: Pollen vs. Aerial
acaatactagttgttcgttcccaccgcaagcaaagcattttcagccgccccaccgcagcagcagagaagaggccgccgccgccgcgaccaagagccgatggatccgaagatgacagaggtgacccagatgttcgcccgcttcaaggcggcctacacccgcaacgacctcgacgcctgcgtcaccctcctctcacagctcaaggtccatctcaccaaattccccagccttccgccctcatttgagcagacacctaaagccgtggaggagctcaaacttgcaagggacatttatgagcatgctgttgttttgagtgtgaaacttgaggaccaagatgcatttgaacgtgatttctgtcagctaaagccttattacatggatacatgtggcataattcccccctcaccagaggagtacccaattttgggactcaatcttctgaggctgttggttcagaatagaattgctgagttccatactgagctggagcttttacctgtcaaggcacttgagcacccttgcatcaagcatgctgtagagcttgagcaatccttcatggagggtgcctacaaccgagtgttaagcgctcggcaagctgtgccacatgagacctatgtttacttcatggaccttctcgccaagacagttagagatgagatcgctgggtgcagcgaaaaggggtatgattccctatctgtaagtgatgcaaaacaaatgcttatgttcagttctgaccaagatctgcacgagtacatcacagaggagcacccggaatgggagcttaagaacggtgccgtcttcttccagaaggcaaaggagtcacagccctacaaggagatcccatccttgcagctcatcaaccagacgctcagctatgcgagggagctggagcgtattgtatgatttaatttcacagtaatccctggttgatgtttatttctgtggtcacttggcatggcatgtactgtcctttacatttgagatcagctctgatcgcagctcatgtcaactctgatcaatctctgaagggcttgatctctgcggcattgtttcaccacattaactgcattgcttgaaagatgcctgtcatccattgctgctgttaacttttgatgggcttaatattgaatt

SEQ ID NO: 12416 - protein, 267 aa, Zea mays subsp. mays
  peptide (1)..(267): Ceres Seq. ID no. 12373396
  misc_feature (109)..(267): Pfam Name: 26S proteasome non-ATPase regulatory subunit Nin1/mts3 Pfam Description: 26S proteasome non-ATPase regulatory subunit
  misc_feature (1)..(267): Homolog of NCBI NO: 17297985 NR Description: 26S proteasome regulatory particle non-ATPase
  misc_feature (1)..(267): Homolog of NCBI NO: 15217661 NR Description: 26S proteasome regulatory subunit (RPN12), protein id: At1g64520.1, supported by cDNA: gi_14532465,
  misc_feature (109)..(267): Homolog of NCBI NO: 15238267 NR Description: putative protein; protein id: At5g42040.1 thaliana] >gi|9757949|dbj|BAB08437.1| contains similarity to 26S regulatory complex subunit~gene_id:MJC20.14 [Arabidopsis
  misc_feature (6)..(267): Homolog of NCBI NO: 38372874 NR Description: Probable 26S proteasome non-ATPase regulatory
  misc_feature (5)..(267): Homolog of NCBI NO: 21357229 NR Description: CG4157-PA [Drosophila melanogaster]
  misc_feature (5)..(267): Homolog of NCBI NO: 31206725 NR Description: ENSANGP00000010608 [Anopheles gambiae]
  misc_feature (11)..(267): Homolog of NCBI NO: 13278567 NR Description: RIKEN cDNA 6720456J22 gene [Mus musculus]
  misc_feature (11)..(267): Homolog of NCBI NO: 26371077 NR Description: unnamed protein product [Mus musculus] unnamed protein product [Mus musculus]
  misc_feature (9)..(267): Homolog of NCBI NO: 40787635 NR Description: Unknown (protein for IMAGE:6055235) [Homo sapiens]
  misc_feature (11)..(267): Homolog of NCBI NO: 34855658 NR Description: similar to proteasome 26S non-ATPase subunit 8
MDPKMTEVTQMFARFKAAYTRNDLDACVTLLSQLKVHLTKFPSLPPSFEQTPKAVEELKLARDIYEHAVVLSVKLEDQDAFERDFCQLKPYYMDTCGIIPPSPEEYPILGLNLLRLLVQNRIAEFHTELELLPVKALEHPCIKHAVELEQSFMEGAYNRVLSARQAVPHETYVYFMDLLAKTVRDEIAGCSEKGYDSLSVSDAKQMLMFSSDQDLHEYITEEHPEWELKNGAVFFQKAKESQPYKEIPSLQLINQTLSYARELERIV

SEQ ID NO: 12417 - protein, 263 aa, Zea mays subsp. mays
  peptide (1)..(263): Ceres Seq. ID no. 12373397
  misc_feature (105)..(263): Pfam Name: 26S proteasome non-ATPase regulatory subunit Nin1/mts3 Pfam Description: 26S proteasome non-ATPase regulatory subunit
  misc_feature (105)..(263): Homolog of NCBI NO: 15238267 NR Description: putative protein; protein id: At5g42040.1 thaliana] >gi|9757949|dbj|BAB08437.1| contains similarity to 26S regulatory complex subunit~gene_id:MJC20.14 [Arabidopsis
  misc_feature (2)..(263): Homolog of NCBI NO: 38372874 NR Description: Probable 26S proteasome non-ATPase regulatory
  misc_feature (1)..(263): Homolog of NCBI NO: 21357229 NR Description: CG4157-PA [Drosophila melanogaster]
  misc_feature (1)..(263): Homolog of NCBI NO: 31206725 NR Description: ENSANGP00000010608 [Anopheles gambiae]
  misc_feature (1)..(263): Homolog of NCBI NO: 17297985 NR Description: 26S proteasome regulatory particle non-ATPase
  misc_feature (1)..(263): Homolog of NCBI NO: 15217661 NR Description: 26S proteasome regulatory subunit (RPN12), protein id: At1g64520.1, supported by cDNA: gi_14532465,
  misc_feature (7)..(263): Homolog of NCBI NO: 13278567 NR Description: RIKEN cDNA 6720456J22 gene [Mus musculus]
  misc_feature (7)..(263): Homolog of NCBI NO: 26371077 NR Description: unnamed protein product [Mus musculus] unnamed protein product [Mus musculus]
  misc_feature (5)..(263): Homolog of NCBI NO: 40787635 NR Description: Unknown (protein for IMAGE:6055235) [Homo sapiens]
  misc_feature (7)..(263): Homolog of NCBI NO: 34855658 NR Description: similar to proteasome 26S non-ATPase subunit 8
MTEVTQMFARFKAAYTRNDLDACVTLLSQLKVHLTKFPSLPPSFEQTPKAVEELKLARDIYEHAVVLSVKLEDQDAFERDFCQLKPYYMDTCGIIPPSPEEYPILGLNLLRLLVQNRIAEFHTELELLPVKALEHPCIKHAVELEQSFMEGAYNRVLSARQAVPHETYVYFMDLLAKTVRDEIAGCSEKGYDSLSVSDAKQMLMFSSDQDLHEYITEEHPEWELKNGAVFFQKAKESQPYKEIPSLQLINQTLSYARELERIV

SEQ ID NO: 12418 - protein, 257 aa, Zea mays subsp. mays
  peptide (1)..(257): Ceres Seq. ID no. 12373398
  misc_feature (99)..(257): Pfam Name: 26S proteasome non-ATPase regulatory subunit Nin1/mts3 Pfam Description: 26S proteasome non-ATPase regulatory subunit
  misc_feature (1)..(257): Homolog of NCBI NO: 17297985 NR Description: 26S proteasome regulatory particle non-ATPase
  misc_feature (1)..(257): Homolog of NCBI NO: 15217661 NR Description: 26S proteasome regulatory subunit (RPN12), protein id: At1g64520.1, supported by cDNA: gi_14532465,
  misc_feature (99)..(257): Homolog of NCBI NO: 15238267 NR Description: putative protein; protein id: At5g42040.1 thaliana] >gi|9757949|dbj|BAB08437.1| contains similarity to 26S regulatory complex subunit~gene_id:MJC20.14 [Arabidopsis
  misc_feature (1)..(257): Homolog of NCBI NO: 38372874 NR Description: Probable 26S proteasome non-ATPase regulatory
  misc_feature (1)..(257): Homolog of NCBI NO: 21357229 NR Description: CG4157-PA [Drosophila melanogaster]
  misc_feature (1)..(257): Homolog of NCBI NO: 31206725 NR Description: ENSANGP00000010608 [Anopheles gambiae]
  misc_feature (1)..(257): Homolog of NCBI NO: 13278567 NR Description: RIKEN cDNA 6720456J22 gene [Mus musculus]
  misc_feature (1)..(257): Homolog of NCBI NO: 26371077 NR Description: unnamed protein product [Mus musculus] unnamed protein product [Mus musculus]
  misc_feature (1)..(257): Homolog of NCBI NO: 40787635 NR Description: Unknown (protein for IMAGE:6055235) [Homo sapiens]
  misc_feature (1)..(257): Homolog of NCBI NO: 34855658 NR Description: similar to proteasome 26S non-ATPase subunit 8
MFARFKAAYTRNDLDACVTLLSQLKVHLTKFPSLPPSFEQTPKAVEELKLARDIYEHAVVLSVKLEDQDAFERDFCQLKPYYMDTCGIIPPSPEEYPILGLNLLRLLVQNRIAEFHTELELLPVKALEHPCIKHAVELEQSFMEGAYNRVLSARQAVPHETYVYFMDLLAKTVRDEIAGCSEKGYDSLSVSDAKQMLMFSSDQDLHEYITEEHPEWELKNGAVFFQKAKESQPYKEIPSLQLINQTLSYARELERIV

SEQ ID NO: 12419 - DNA, 1826 bp, Zea mays subsp. mays
  misc_feature (1)..(1826): Ceres Seq. ID no. 12411550
  misc_feature: MA Experiment ID: 108689 Result: Down-regulated in Transcription
  misc_feature: MA Experiment 108689 PARAMETER Experiment Name: Zm_Drought_Roots_P Parameter: Age (day) Value: 9
  misc_feature: MA Experiment 108689 PARAMETER Experiment Name: Zm_Drought_Roots_P Parameter: Organism Value: Zea mays
  misc_feature: MA Experiment 108689 PARAMETER Experiment Name: Zm_Drought_Roots_P Parameter: Plant Line Value: 35A19
  misc_feature: MA Experiment 108689 PARAMETER Experiment Name: Zm_Drought_Roots_P Parameter: Timepoint (hr) Value: 24
  misc_feature: MA Experiment 108689 PARAMETER Experiment Name: Zm_Drought_Roots_P Parameter: Tissue Value: Roots
  misc_feature: MA Experiment 108689 PARAMETER Experiment Name: Zm_Drought_Roots_P Parameter: Treatment Value: Drought vs. No Drought
  misc_feature: MA Experiment ID: 20000477 Result: Down-regulated in Transcription
  misc_feature: MA Experiment 20000477 PARAMETER Experiment Name: Zm_5mM_SA_P Parameter: Age (day) Value: 10
  misc_feature: MA Experiment 20000477 PARAMETER Experiment Name: Zm_5mM_SA_P Parameter: Organism Value: Zea mays
  misc_feature: MA Experiment 20000477 PARAMETER Experiment Name: Zm_5mM_SA_P Parameter: Plant Line Value: 35A19
  misc_feature: MA Experiment 20000477 PARAMETER Experiment Name: Zm_5mM_SA_P Parameter: Timepoint (hr) Value: 48
  misc_feature: MA Experiment 20000477 PARAMETER Experiment Name: Zm_5mM_SA_P Parameter: Tissue Value: Aerial
  misc_feature: MA Experiment 20000477 PARAMETER Experiment Name: Zm_5mM_SA_P Parameter: Treatment Value: 5mM SA vs. No Treatment
  misc_feature: MA Experiment ID: 20000478 Result: Down-regulated in Transcription
  misc_feature: MA Experiment 20000478 PARAMETER Experiment Name: Zm_5mM_SA_P Parameter: Age (day) Value: 11
  misc_feature: MA Experiment 20000478 PARAMETER Experiment Name: Zm_5mM_SA_P Parameter: Organism Value: Zea mays
  misc_feature: MA Experiment 20000478 PARAMETER Experiment Name: Zm_5mM_SA_P Parameter: Plant Line Value: 35A19
  misc_feature: MA Experiment 20000478 PARAMETER Experiment Name: Zm_5mM_SA_P Parameter: Timepoint (hr) Value: 72
  misc_feature: MA Experiment 20000478 PARAMETER Experiment Name: Zm_5mM_SA_P Parameter: Tissue Value: Aerial
  misc_feature: MA Experiment 20000478 PARAMETER Experiment Name: Zm_5mM_SA_P Parameter: Treatment Value: 5mM SA vs. No Treatment
  misc_feature: MA Experiment ID: 20000479 Result: Down-regulated in Transcription
  misc_feature: MA Experiment 20000479 PARAMETER Experiment Name: Zm_Drought_P Parameter: Age (day) Value: 10
  misc_feature: MA Experiment 20000479 PARAMETER Experiment Name: Zm_Drought_P Parameter: Organism Value: Zea mays
  misc_feature: MA Experiment 20000479 PARAMETER Experiment Name: Zm_Drought_P Parameter: Plant Line Value: 35A19
  misc_feature: MA Experiment 20000479 PARAMETER Experiment Name: Zm_Drought_P Parameter: Timepoint (hr) Value: 48
  misc_feature: MA Experiment 20000479 PARAMETER Experiment Name: Zm_Drought_P Parameter: Tissue Value: Aerial
  misc_feature: MA Experiment 20000479 PARAMETER Experiment Name: Zm_Drought_P Parameter: Treatment Value: Drought vs. No Drought
  misc_feature: MA Experiment ID: 20000480 Result: Down-regulated in Transcription
  misc_feature: MA Experiment 20000480 PARAMETER Experiment Name: Zm_Drought_P Parameter: Age (day) Value: 11
  misc_feature: MA Experiment 20000480 PARAMETER Experiment Name: Zm_Drought_P Parameter: Organism Value: Zea mays
  misc_feature: MA Experiment 20000480 PARAMETER Experiment Name: Zm_Drought_P Parameter: Plant Line Value: 35A19
  misc_feature: MA Experiment 20000480 PARAMETER Experiment Name: Zm_Drought_P Parameter: Timepoint (hr) Value: 72
  misc_feature: MA Experiment 20000480 PARAMETER Experiment Name: Zm_Drought_P Parameter: Tissue Value: Aerial
  misc_feature: MA Experiment 20000480 PARAMETER Experiment Name: Zm_Drought_P Parameter: Treatment Value: Drought vs. No Drought
  misc_feature: MA Experiment ID: 20000492 Result: Down-regulated in Transcription
  misc_feature: MA Experiment 20000492 PARAMETER Experiment Name: Zm_Hybrid_Seed_Dev_P Parameter: DAP Value: 12
  misc_feature: MA Experiment 20000492 PARAMETER Experiment Name: Zm_Hybrid_Seed_Dev_P Parameter: Organism Value: Zea mays
  misc_feature: MA Experiment 20000492 PARAMETER Experiment Name: Zm_Hybrid_Seed_Dev_P Parameter: Plant Line Value: 35A19
  misc_feature: MA Experiment 20000492 PARAMETER Experiment Name: Zm_Hybrid_Seed_Dev_P Parameter: Tissue Value: Fert Kernel vs. Unfert Floret
actacctcccaaactcgcgagcgagtcgaggctccaaccccggcacatcacaggaggaggaggacgacgcgcccaccatggccatggcgacggccctccgcaagctctccgccaacgctctgcgccgccagccgctctcccgcatcacgccgctctactacatggcgtcccttccggcgacggaggagagatccggaatcacctggactaagcagttgaacgcgccgctggaagaggtcgaccccgagattgctgacatcatcgagcacgagaaggcccgccaatggaagggtctggagctcatcccgtcggagaatttcacgtcggtgtcagtgatgcaggcagttgggtcggtaatgaccaacaagtacagcgaggggtaccctggcgcaagatactacgggggaaatgagtttattgatatggcagagtccttgtgtcagaaacgtgctttggaggctttccgtttggacccggcgaaatggggagtgaatgtgcaacctctatccggttcgcccgccaacttccatgtatacactgcactcttgaagccacatgaaaggatcatggctttggatcttcctcacggtggacatctttctcatggttaccagactgacactaagaagatatctgcaacttcaatattttttgagacaatgccttacagattggatgaaagcactggattgattgattacgatcagttgaagaaaagcgctgttctttttaggccaaagttgatcattgccggtgcaagtgcatatgctcggctatatgattatgaccgtatgcggaagatatgcaccaagcagaaggcaatacttctagcagacatggcacatattagtgggcttgttgcagctggtgttgttccatctccttttgattatgcagatgtagtgactaccactactcacaaatcactccgtgggccacgtggagccatgatcttttacaggaagggagtcaaagaaataaataaacaaggaaaagaggttatgtatgattttgaggacaaaatcaatgctgctgtctttcctggtctgcaaggtgggcctcataaccataccattactggcttggctgttgcgctcaaacaggcaactactccagaatacagagcttaccaagagcaagttatcagtaattgtgctaaatttgcgcagagcctgatttcaaaaggatatgaactcgtctctggtgggactgacaaccatttagttctggtgaatctcaagaataaggggatagatggttcaagggtggagaaggttttagaaagtgtgcatattgcagcaaacaagaacacagttcctggtgatgtttcagctatggtgccaggaggcatcaggatgggaaccccagcccttacgtcgagaggatttgttgaagaagatttcgctaaagttgctgacttcttcgatgcagcagtgaatctggccttgaagattaaggctgcaacgacaggtggaacaaagctgaaggactttgttgccactttgcaatctgatagcatccaagttgagattgcaaagcttcgccatgatgtagaggaatttgcaaaacaattcccaacaattggatttgagaaagagaccatgaaatacaagaactaatatctggatgacaagaagagaatgaggtcactcttcttgcagtaagcattcgaagcaagatgccacgatgattattgggagtttaaccatggtgtaatggcatcttatgttaaagagatgttggcaatttacagcatgtggaactttcgtcaatcatattgtagacacataccgcgagatgctatattgaccggacaattgcatttc

SEQ ID NO: 12420 - protein, 538 aa, Zea mays subsp. mays
  peptide (1)..(538): Ceres Seq. ID no. 12411551
  misc_feature (76)..(474): Pfam Name: Serine hydroxymethyltransferase Pfam Description: Serine hydroxymethyltransferase
  misc_feature (1)..(538): Homolog of NCBI NO: 31126793 NR Description: putative glycine hydroxymethyltransferase [Oryza
  misc_feature (26)..(538): Homolog of NCBI NO: 1707998 NR Description: SERINE HYDROXYMETHYLTRANSFERASE, MITOCHONDRIAL
  misc_feature (26)..(538): Homolog of NCBI NO: 15235745 NR Description: glycine hydroxymethyltransferase like protein; id: At4g37930.1, supported by cDNA: 33799., supported by cDNA: supported by cDNA: gi_16226392, supported by cDNA:
  misc_feature (26)..(538): Homolog of NCBI NO: 15809972 NR Description: AT4g37930/F20D10_50 [Arabidopsis thaliana]
  misc_feature (26)..(538): Homolog of NCBI NO: 1346155 NR Description: Serine hydroxymethyltransferase 1, mitochondrial (Serine methylase) (Glycine hydroxymethyltransferase) (SHMT) glycine hydroxymethyltransferase (EC glycine
  misc_feature (26)..(538): Homolog of NCBI NO: 1346156 NR Description: Serine hydroxymethyltransferase 2, mitochondrial (Serine methylase) (Glycine hydroxymethyltransferase) (SHMT) glycine hydroxymethyltransferase (EC glycine
  misc_feature (26)..(536): Homolog of NCBI NO: 462187 NR Description: SERINE HYDROXYMETHYLTRANSFERASE, MITOCHONDRIAL
  misc_feature (28)..(537): Homolog of NCBI NO: 30690394 NR Description: glycine hydroxymethyltransferase - like protein
  misc_feature (28)..(537): Homolog of NCBI NO: 14334888 NR Description: putative glycine hydroxymethyltransferase
  misc_feature (28)..(537): Homolog of NCBI NO: 30690400 NR Description: glycine hydroxymethyltransferase - like protein
YLPNSRASRGSNPGTSQEEEDDAPTMAMATALRKLSANALRRQPLSRITPLYYMASLPATEERSGITWTKQLNAPLEEVDPEIADIIEHEKARQWKGLELIPSENFTSVSVMQAVGSVMTNKYSEGYPGARYYGGNEFIDMAESLCQKRALEAFRLDPAKWGVNVQPLSGSPANFHVYTALLKPHERIMALDLPHGGHLSHGYQTDTKKISATSIFFETMPYRLDESTGLIDYDQLKKSAVLFRPKLIIAGASAYARLYDYDRMRKICTKQKAILLADMAHISGLVAAGVVPSPFDYADVVTTTTHKSLRGPRGAMIFYRKGVKEINKQGKEVMYDFEDKINAAVFPGLQGGPHNHTITGLAVALKQATTPEYRAYQEQVISNCAKFAQSLISKGYELVSGGTDNHLVLVNLKNKGIDGSRVEKVLESVHIAANKNTVPGDVSAMVPGGIRMGTPALTSRGFVEEDFAKVADFFDAAVNLALKIKAATTGGTKLKDFVATLQSDSIQVEIAKLRHDVEEFAKQFPTIGFEKETMKYKN

SEQ ID NO: 12421 - protein, 513 aa, Zea mays subsp. mays
  peptide (1)..(513): Ceres Seq. ID no. 12411552
  misc_feature (51)..(449): Pfam Name: Serine hydroxymethyltransferase Pfam Description: Serine hydroxymethyltransferase
  misc_feature (1)..(513): Homolog of NCBI NO: 31126793 NR Description: putative glycine hydroxymethyltransferase [Oryza
  misc_feature (1)..(513): Homolog of NCBI NO: 1707998 NR Description: SERINE HYDROXYMETHYLTRANSFERASE, MITOCHONDRIAL
  misc_feature (1)..(513): Homolog of NCBI NO: 15235745 NR Description: glycine hydroxymethyltransferase like protein; id: At4g37930.1, supported by cDNA: 33799., supported by cDNA: supported by cDNA: gi_16226392, supported by cDNA:
  misc_feature (1)..(513): Homolog of NCBI NO: 15809972 NR Description: AT4g37930/F20D10_50 [Arabidopsis thaliana]
  misc_feature (1)..(513): Homolog of NCBI NO: 1346155 NR Description: Serine hydroxymethyltransferase 1, mitochondrial (Serine methylase) (Glycine hydroxymethyltransferase) (SHMT) glycine hydroxymethyltransferase (EC glycine
  misc_feature (1)..(513): Homolog of NCBI NO: 1346156 NR Description: Serine hydroxymethyltransferase 2, mitochondrial (Serine methylase) (Glycine hydroxymethyltransferase) (SHMT) glycine hydroxymethyltransferase (EC glycine
  misc_feature (1)..(511): Homolog of NCBI NO: 462187 NR Description: SERINE HYDROXYMETHYLTRANSFERASE, MITOCHONDRIAL
  misc_feature (3)..(512): Homolog of NCBI NO: 30690394 NR Description: glycine hydroxymethyltransferase - like protein
  misc_feature (3)..(512): Homolog of NCBI NO: 14334888 NR Description: putative glycine hydroxymethyltransferase
  misc_feature (3)..(512): Homolog of NCBI NO: 30690400 NR Description: glycine hydroxymethyltransferase - like protein
MAMATALRKLSANALRRQPLSRITPLYYMASLPATEERSGITWTKQLNAPLEEVDPEIADIIEHEKARQWKGLELIPSENFTSVSVMQAVGSVMTNKYSEGYPGARYYGGNEFIDMAESLCQKRALEAFRLDPAKWGVNVQPLSGSPANFHVYTALLKPHERIMALDLPHGGHLSHGYQTDTKKISATSIFFETMPYRLDESTGLIDYDQLKKSAVLFRPKLIIAGASAYARLYDYDRMRKICTKQKAILLADMAHISGLVAAGVVPSPFDYADVVTTTTHKSLRGPRGAMIFYRKGVKEINKQGKEVMYDFEDKINAAVFPGLQGGPHNHTITGLAVALKQATTPEYRAYQEQVISNCAKFAQSLISKGYELVSGGTDNHLVLVNLKNKGIDGSRVEKVLESVHIAANKNTVPGDVSAMVPGGIRMGTPALTSRGFVEEDFAKVADFFDAAVNLALKIKAATTGGTKLKDFVATLQSDSIQVEIAKLRHDVEEFAKQFPTIGFEKETMKYKN

SEQ ID NO: 12422 - protein, 511 aa, Zea mays subsp. mays
  peptide (1)..(511): Ceres Seq. ID no. 12411553
  misc_feature (49)..(447): Pfam Name: Serine hydroxymethyltransferase Pfam Description: Serine hydroxymethyltransferase
  misc_feature (1)..(511): Homolog of NCBI NO: 31126793 NR Description: putative glycine hydroxymethyltransferase [Oryza
  misc_feature (1)..(511): Homolog of NCBI NO: 1707998 NR Description: SERINE HYDROXYMETHYLTRANSFERASE, MITOCHONDRIAL
  misc_feature (1)..(511): Homolog of NCBI NO: 15235745 NR Description: glycine hydroxymethyltransferase like protein; id: At4g37930.1, supported by cDNA: 33799., supported by cDNA: supported by cDNA: gi_16226392, supported by cDNA:
  misc_feature (1)..(511): Homolog of NCBI NO: 15809972 NR Description: AT4g37930/F20D10_50 [Arabidopsis thaliana]
  misc_feature (1)..(511): Homolog of NCBI NO: 1346155 NR Description: Serine hydroxymethyltransferase 1, mitochondrial (Serine methylase) (Glycine hydroxymethyltransferase) (SHMT) glycine hydroxymethyltransferase (EC glycine
  misc_feature (1)..(511): Homolog of NCBI NO: 1346156 NR Description: Serine hydroxymethyltransferase 2, mitochondrial (Serine methylase) (Glycine hydroxymethyltransferase) (SHMT) glycine hydroxymethyltransferase (EC glycine
  misc_feature (1)..(509): Homolog of NCBI NO: 462187 NR Description: SERINE HYDROXYMETHYLTRANSFERASE, MITOCHONDRIAL
  misc_feature (1)..(510): Homolog of NCBI NO: 30690394 NR Description: glycine hydroxymethyltransferase - like protein
  misc_feature (1)..(510): Homolog of NCBI NO: 14334888 NR Description: putative glycine hydroxymethyltransferase
  misc_feature (1)..(510): Homolog of NCBI NO: 30690400 NR Description: glycine hydroxymethyltransferase - like protein
MATALRKLSANALRRQPLSRITPLYYMASLPATEERSGITWTKQLNAPLEEVDPEIADIIEHEKARQWKGLELIPSENFTSVSVMQAVGSVMTNKYSEGYPGARYYGGNEFIDMAESLCQKRALEAFRLDPAKWGVNVQPLSGSPANFHVYTALLKPHERIMALDLPHGGHLSHGYQTDTKKISATSIFFETMPYRLDESTGLIDYDQLKKSAVLFRPKLIIAGASAYARLYDYDRMRKICTKQKAILLADMAHISGLVAAGVVPSPFDYADVVTTTTHKSLRGPRGAMIFYRKGVKEINKQGKEVMYDFEDKINAAVFPGLQGGPHNHTITGLAVALKQATTPEYRAYQEQVISNCAKFAQSLISKGYELVSGGTDNHLVLVNLKNKGIDGSRVEKVLESVHIAANKNTVPGDVSAMVPGGIRMGTPALTSRGFVEEDFAKVADFFDAAVNLALKIKAATTGGTKLKDFVATLQSDSIQVEIAKLRHDVEEFAKQFPTIGFEKETMKYKN

SEQ ID NO: 12423 - DNA, 1481 bp, Zea mays subsp. mays
  misc_feature (1)..(1481): Ceres Seq. ID no. 13493636
  misc_feature: MA Experiment ID: 108535 Result: Up-regulated in Transcription
  misc_feature: MA Experiment 108535 PARAMETER Experiment Name: Zm_Meristem_P Parameter: Age (day) Value: 8
  misc_feature: MA Experiment 108535 PARAMETER Experiment Name: Zm_Meristem_P Parameter: Organism Value: Zea mays
  misc_feature: MA Experiment 108535 PARAMETER Experiment Name: Zm_Meristem_P Parameter: Plant Line Value: 35A19
  misc_feature: MA Experiment 108535 PARAMETER Experiment Name: Zm_Meristem_P Parameter: Tissue Value: Root Meristem vs. Above Root Meristem
aaaatcgcccctgggcgagggggaagccggaggacgctgagggcgggcgaggccgccgtccccagatctcacttccgccgcccgcccgccccgcttttgttactactcttcttttgttcggattgagggaggaaggaaaggaggtgcttcaatatgaaggcgctcattcttgtcgggggttttggaacccgccttcggcctttgactcttagcttcccgaagccccttgtggattttgcaaacaagcccatgattctgcatcagatcgaagctttgaaagaagttggggtcacagaggtggttttggccatcaactaccgcccagaggtaatgattaatttcttgaaggactttgaggataaacttggcatcacaattacatgctcccaagagactgagcccttaggaactgctggccctcttgctctagcaagggacaagcttgcggatggatctggcgagccattctttgtcctcaacagcgatgtcataagcgaatacccatttgctgaactcatcaaatttcacaagtctcatggtggtgaggcaacaattatggtcactaaggtggatgaaccatctaaatatggtgttgtggttatggaggaggcaactggcagggtggaaaggtttgttgagaagccaaaaatatttgtgggcaacaagatcaatgctgggatttacttgcttaacccatctgtccttgaccgcattgaactgagaccaacatcaattgagaaagaggtcttccctcaaattgcagctgatcaacagctctatgcaatggtccttcctggtttttggatggatgttggtcagccaagagactacattactggattgcgtctttatctagactcgcttaggaagaaatcggctgccaggctagctgctggggcacatgttgttggcaacgtgctggtgcatgagagcgccaagattggagaaggttgcctgatcggtcctgatgtcgcaattggacctggatgtgtcgtggaggatggcgtgaggctttcccgctgcactgtcatgcgtggtgtgcgtatcaagaagcatgcctgcatctcgaacagcattatcgggtggcactcaactgttggacaatgggcacggatagagaatatgaccatcctgggcgaggatgttcatgtgtgtgacgaggtatacagcaatggcggtgttgttctcccacataaagagatcaagtcaagcattttgaagcctgagatcgtcatgtgagagttctccagttttaactacagtacattcttaagttcttcgactaagtgaggattgcagatccccttttataagtgatatctattggtatctttggcctaattcaaacagcttcagacatgttcgcttgctaaactgttgacaatgtatccttgttctttgttgaaaagttttgtacttgtagtgtcaatcatatttcacaagtggttgtcatataatactgagggaggttttggaccccc

SEQ ID NO: 12424 - protein, 361 aa, Zea mays subsp. mays
  peptide (1)..(361): Ceres Seq. ID no. 13493637
  misc_feature (2)..(236): Pfam Name: Nucleotidyl transferase Pfam Description: Nucleotidyl transferase
  misc_feature (1)..(361): Homolog of NCBI NO: 40253523 NR Description: putative GDP-mannose pyrophosphorylase [Oryza
  misc_feature (1)..(361): Homolog of NCBI NO: 34908274 NR Description: putative GDP-mannose pyrophosphorylase [Oryza
  misc_feature (1)..(361): Homolog of NCBI NO: 34902046 NR Description: COG1208, GCD1, Nucleoside-diphosphate-sugar
  misc_feature (1)..(361): Homolog of NCBI NO: 15225553 NR Description: GDP-mannose pyrophosphorylase [Arabidopsis
  misc_feature (1)..(361): Homolog of NCBI NO: 4103324 NR Description: GDP-mannose pyrophosphorylase [Solanum tuberosum]
  misc_feature (1)..(361): Homolog of NCBI NO: 13509287 NR Description: GDP-mannose pyrophosphorylase [Arabidopsis
  misc_feature (1)..(361): Homolog of NCBI NO: 14971013 NR Description: GDP-D-mannose pyrophosphorylase [Nicotiana
  misc_feature (1)..(361): Homolog of NCBI NO: 15233308 NR Description: GDP-mannose pyrophosphorylase, putative
  misc_feature (1)..(345): Homolog of NCBI NO: 25317396 NR Description: GDP-mannose pyrophosphorylase like protein
  misc_feature (22)..(345): Homolog of NCBI NO: 15234771 NR Description: GDP-mannose pyrophosphorylase, putative
MKALILVGGFGTRLRPLTLSFPKPLVDFANKPMILHQIEALKEVGVTEVVLAINYRPEVMINFLKDFEDKLGITITCSQETEPLGTAGPLALARDKLADGSGEPFFVLNSDVISEYPFAELIKFHKSHGGEATIMVTKVDEPSKYGVVVMEEATGRVERFVEKPKIFVGNKINAGIYLLNPSVLDRIELRPTSIEKEVFPQIAADQQLYAMVLPGFWMDVGQPRDYITGLRLYLDSLRKKSAARLAAGAHVVGNVLVHESAKIGEGCLIGPDVAIGPGCVVEDGVRLSRCTVMRGVRIKKHACISNSIIGWHSTVGQWARIENMTILGEDVHVCDEVYSNGGVVLPHKEIKSSILKPEIVM

SEQ ID NO: 12425 - protein, 329 aa, Zea mays subsp. mays
  peptide (1)..(329): Ceres Seq. ID no. 13493638
  misc_feature (1)..(204): Pfam Name: Nucleotidyl transferase Pfam Description: Nucleotidyl transferase
  misc_feature (1)..(329): Homolog of NCBI NO: 40253523 NR Description: putative GDP-mannose pyrophosphorylase [Oryza
  misc_feature (1)..(329): Homolog of NCBI NO: 34908274 NR Description: putative GDP-mannose pyrophosphorylase [Oryza
  misc_feature (1)..(329): Homolog of NCBI NO: 34902046 NR Description: COG1208, GCD1, Nucleoside-diphosphate-sugar
  misc_feature (1)..(329): Homolog of NCBI NO: 15225553 NR Description: GDP-mannose pyrophosphorylase [Arabidopsis
  misc_feature (1)..(329): Homolog of NCBI NO: 4103324 NR Description: GDP-mannose pyrophosphorylase [Solanum tuberosum]
  misc_feature (1)..(329): Homolog of NCBI NO: 13509287 NR Description: GDP-mannose pyrophosphorylase [Arabidopsis
  misc_feature (1)..(329): Homolog of NCBI NO: 14971013 NR Description: GDP-D-mannose pyrophosphorylase [Nicotiana
  misc_feature (1)..(329): Homolog of NCBI NO: 15233308 NR Description: GDP-mannose pyrophosphorylase, putative
  misc_feature (1)..(313): Homolog of NCBI NO: 25317396 NR Description: GDP-mannose pyrophosphorylase like protein
  misc_feature (1)..(313): Homolog of NCBI NO: 15234771 NR Description: GDP-mannose pyrophosphorylase, putative
MILHQIEALKEVGVTEVVLAINYRPEVMINFLKDFEDKLGITITCSQETEPLGTAGPLALARDKLADGSGEPFFVLNSDVISEYPFAELIKFHKSHGGEATIMVTKVDEPSKYGVVVMEEATGRVERFVEKPKIFVGNKINAGIYLLNPSVLDRIELRPTSIEKEVFPQIAADQQLYAMVLPGFWMDVGQPRDYITGLRLYLDSLRKKSAARLAAGAHVVGNVLVHESAKIGEGCLIGPDVAIGPGCVVEDGVRLSRCTVMRGVRIKKHACISNSIIGWHSTVGQWARIENMTILGEDVHVCDEVYSNGGVVLPHKEIKSSILKPEIVM

SEQ ID NO: 12426 - protein, 302 aa, Zea mays subsp. mays
  peptide (1)..(302): Ceres Seq. ID no. 13493639
  misc_feature (1)..(177): Pfam Name: Nucleotidyl transferase Pfam Description: Nucleotidyl transferase
  misc_feature (1)..(302): Homolog of NCBI NO: 40253523 NR Description: putative GDP-mannose pyrophosphorylase [Oryza
  misc_feature (1)..(302): Homolog of NCBI NO: 34908274 NR Description: putative GDP-mannose pyrophosphorylase [Oryza
  misc_feature (1)..(302): Homolog of NCBI NO: 34902046 NR Description: COG1208, GCD1, Nucleoside-diphosphate-sugar
  misc_feature (1)..(302): Homolog of NCBI NO: 15225553 NR Description: GDP-mannose pyrophosphorylase [Arabidopsis
  misc_feature (1)..(302): Homolog of NCBI NO: 4103324 NR Description: GDP-mannose pyrophosphorylase [Solanum tuberosum]
  misc_feature (1)..(302): Homolog of NCBI NO: 13509287 NR Description: GDP-mannose pyrophosphorylase [Arabidopsis
  misc_feature (1)..(302): Homolog of NCBI NO: 14971013 NR Description: GDP-D-mannose pyrophosphorylase [Nicotiana
  misc_feature (1)..(302): Homolog of NCBI NO: 15233308 NR Description: GDP-mannose pyrophosphorylase, putative
  misc_feature (1)..(286): Homolog of NCBI NO: 25317396 NR Description: GDP-mannose pyrophosphorylase like protein
  misc_feature (1)..(286): Homolog of NCBI NO: 15234771 NR Description: GDP-mannose pyrophosphorylase, putative
MINFLKDFEDKLGITITCSQETEPLGTAGPLALARDKLADGSGEPFFVLNSDVISEYPFAELIKFHKSHGGEATIMVTKVDEPSKYGVVVMEEATGRVERFVEKPKIFVGNKINAGIYLLNPSVLDRIELRPTSIEKEVFPQIAADQQLYAMVLPGFWMDVGQPRDYITGLRLYLDSLRKKSAARLAAGAHVVGNVLVHESAKIGEGCLIGPDVAIGPGCVVEDGVRLSRCTVMRGVRIKKHACISNSIIGWHSTVGQWARIENMTILGEDVHVCDEVYSNGGVVLPHKEIKSSILKPEIVM

SEQ ID NO: 12427 - DNA, 1426 bp, Zea mays subsp. mays
  misc_feature (1)..(1426): Ceres Seq. ID no. 12347763
  misc_feature: MA Experiment ID: 108515 Result: Up-regulated in Transcription
  misc_feature: MA Experiment 108515 PARAMETER Experiment Name: Zm_2mM_SA_P Parameter: Age (day) Value: 8
  misc_feature: MA Experiment 108515 PARAMETER Experiment Name: Zm_2mM_SA_P Parameter: Organism Value: Zea mays
  misc_feature: MA Experiment 108515 PARAMETER Experiment Name: Zm_2mM_SA_P Parameter: Plant Line Value: 35A19
  misc_feature: MA Experiment 108515 PARAMETER Experiment Name: Zm_2mM_SA_P Parameter: Timepoint (hr) Value: 12
  misc_feature: MA Experiment 108515 PARAMETER Experiment Name: Zm_2mM_SA_P Parameter: Tissue Value: Aerial
  misc_feature: MA Experiment 108515 PARAMETER Experiment Name: Zm_2mM_SA_P Parameter: Treatment Value: 2mM SA vs. No Treatment
  misc_feature: MA Experiment ID: 108522 Result: Down-regulated in Transcription
  misc_feature: MA Experiment 108522 PARAMETER Experiment Name: Zm_42deg_Heat_P Parameter: Age (day) Value: 8
  misc_feature: MA Experiment 108522 PARAMETER Experiment Name: Zm_42deg_Heat_P Parameter: Organism Value: Zea mays
  misc_feature: MA Experiment 108522 PARAMETER Experiment Name: Zm_42deg_Heat_P Parameter: Plant Line Value: 35A19
  misc_feature: MA Experiment 108522 PARAMETER Experiment Name: Zm_42deg_Heat_P Parameter: Temperature (deg C) Value: 42 vs. 22
  misc_feature: MA Experiment 108522 PARAMETER Experiment Name: Zm_42deg_Heat_P Parameter: Timepoint (hr) Value: 1
  misc_feature: MA Experiment 108522 PARAMETER Experiment Name: Zm_42deg_Heat_P Parameter: Tissue Value: Aerial
  misc_feature: MA Experiment ID: 108523 Result: Down-regulated in Transcription
  misc_feature: MA Experiment 108523 PARAMETER Experiment Name: Zm_42deg_Heat_P Parameter: Age (day) Value: 8
  misc_feature: MA Experiment 108523 PARAMETER Experiment Name: Zm_42deg_Heat_P Parameter: Organism Value: Zea mays
  misc_feature: MA Experiment 108523 PARAMETER Experiment Name: Zm_42deg_Heat_P Parameter: Plant Line Value: 35A19
  misc_feature: MA Experiment 108523 PARAMETER Experiment Name: Zm_42deg_Heat_P Parameter: Temperature (deg C) Value: 42 vs. 22
  misc_feature: MA Experiment 108523 PARAMETER Experiment Name: Zm_42deg_Heat_P Parameter: Timepoint (hr) Value: 6
  misc_feature: MA Experiment 108523 PARAMETER Experiment Name: Zm_42deg_Heat_P Parameter: Tissue Value: Aerial
  misc_feature: MA Experiment ID: 108526 Result: Up-regulated in Transcription
  misc_feature: MA Experiment 108526 PARAMETER Experiment Name: Zm_5mM_NO_P Parameter: Age (day) Value: 8
  misc_feature: MA Experiment 108526 PARAMETER Experiment Name: Zm_5mM_NO_P Parameter: Organism Value: Zea mays
  misc_feature: MA Experiment 108526 PARAMETER Experiment Name: Zm_5mM_NO_P Parameter: Plant Line Value: 35A19
  misc_feature: MA Experiment 108526 PARAMETER Experiment Name: Zm_5mM_NO_P Parameter: Timepoint (hr) Value: 1
  misc_feature: MA Experiment 108526 PARAMETER Experiment Name: Zm_5mM_NO_P Parameter: Tissue Value: Aerial
  misc_feature: MA Experiment 108526 PARAMETER Experiment Name: Zm_5mM_NO_P Parameter: Treatment Value: 5mM NO vs. No Treatment
  misc_feature: MA Experiment ID: 108527 Result: Up-regulated in Transcription
  misc_feature: MA Experiment 108527 PARAMETER Experiment Name: Zm_5mM_NO_P Parameter: Age (day) Value: 8
  misc_feature: MA Experiment 108527 PARAMETER Experiment Name: Zm_5mM_NO_P Parameter: Organism Value: Zea mays
  misc_feature: MA Experiment 108527 PARAMETER Experiment Name: Zm_5mM_NO_P Parameter: Plant Line Value: 35A19
  misc_feature: MA Experiment 108527 PARAMETER Experiment Name: Zm_5mM_NO_P Parameter: Timepoint (hr) Value: 6
  misc_feature: MA Experiment 108527 PARAMETER Experiment Name: Zm_5mM_NO_P Parameter: Tissue Value: Aerial
  misc_feature: MA Experiment 108527 PARAMETER Experiment Name: Zm_5mM_NO_P Parameter: Treatment Value: 5mM NO vs. No Treatment
  misc_feature: MA Experiment ID: 108559 Result: Up-regulated in Transcription
  misc_feature: MA Experiment 108559 PARAMETER Experiment Name: Zm_5mM_NO_P Parameter: Age (day) Value: 8
  misc_feature: MA Experiment 108559 PARAMETER Experiment Name: Zm_5mM_NO_P Parameter: Organism Value: Zea mays
  misc_feature: MA Experiment 108559 PARAMETER Experiment Name: Zm_5mM_NO_P Parameter: Plant Line Value: 35A19
  misc_feature: MA Experiment 108559 PARAMETER Experiment Name: Zm_5mM_NO_P Parameter: Timepoint (hr) Value: 12
  misc_feature: MA Experiment 108559 PARAMETER Experiment Name: Zm_5mM_NO_P Parameter: Tissue Value: Aerial
  misc_feature: MA Experiment 108559 PARAMETER Experiment Name: Zm_5mM_NO_P Parameter: Treatment Value: 5mM NO vs. No Treatment
  misc_feature: MA Experiment ID: 108689 Result: Down-regulated in Transcription
  misc_feature: MA Experiment 108689 PARAMETER Experiment Name: Zm_Drought_Roots_P Parameter: Age (day) Value: 9
  misc_feature: MA Experiment 108689 PARAMETER Experiment Name: Zm_Drought_Roots_P Parameter: Organism Value: Zea mays
  misc_feature: MA Experiment 108689 PARAMETER Experiment Name: Zm_Drought_Roots_P Parameter: Plant Line Value: 35A19
  misc_feature: MA Experiment 108689 PARAMETER Experiment Name: Zm_Drought_Roots_P Parameter: Timepoint (hr) Value: 24
  misc_feature: MA Experiment 108689 PARAMETER Experiment Name: Zm_Drought_Roots_P Parameter: Tissue Value: Roots
  misc_feature: MA Experiment 108689 PARAMETER Experiment Name: Zm_Drought_Roots_P Parameter: Treatment Value: Drought vs. No Drought
  misc_feature: MA Experiment ID: 20000478 Result: Up-regulated in Transcription
  misc_feature: MA Experiment 20000478 PARAMETER Experiment Name: Zm_5mM_SA_P Parameter: Age (day) Value: 11
  misc_feature: MA Experiment 20000478 PARAMETER Experiment Name: Zm_5mM_SA_P Parameter: Organism Value: Zea mays
  misc_feature: MA Experiment 20000478 PARAMETER Experiment Name: Zm_5mM_SA_P Parameter: Plant Line Value: 35A19
  misc_feature: MA Experiment 20000478 PARAMETER Experiment Name: Zm_5mM_SA_P Parameter: Timepoint (hr) Value: 72
  misc_feature: MA Experiment 20000478 PARAMETER Experiment Name: Zm_5mM_SA_P Parameter: Tissue Value: Aerial
  misc_feature: MA Experiment 20000478 PARAMETER Experiment Name: Zm_5mM_SA_P Parameter: Treatment Value: 5mM SA vs. No Treatment
  misc_feature: MA Experiment ID: 20000627 Result: Up-regulated in Transcription
  misc_feature: MA Experiment 20000627 PARAMETER Experiment Name: Zm_Herbicide-Treatments_P Parameter: Timepoint (hr) Value: 12
  misc_feature: MA Experiment 20000627 PARAMETER Experiment Name: Zm_Herbicide-Treatments_P Parameter: Tissue Value: Aerial
  misc_feature: MA Experiment 20000627 PARAMETER Experiment Name: Zm_Herbicide-Treatments_P Parameter: Treatment Value: Finale vs. No Treatment
aatccgttcagcggtcagcggaacatgatacggtctgcgcccttccaagcaatcacatcttcttccccgttataaatcgctcactcgctatcgtcggctacctgtatcctggcgacacccaacagcctgcttgccgcgcttgcattgaggggagttcggggagcggccggtgcggaaggaatcgacacagagttcagttcacatggctgctgaatcagagaacggcaactgcaaagcttgggcagcgagagatccttctggagttctctcaccacacagttttaaccgcagagcagtgcaaagcggcgatgtttcgctgaagatcatatactgtggagtctgttatgcagacgttgcttggacgcggaataagctcaatgattcaaaatatcctttggttcctgggcatgagatagctggagttgtaactcaggttggtgcagatgtcaaaggctttaaagtgggtgaccatgtaggtgttggaacatatgtgaactcttgccgtgattgtgagaactgcaatatctctctagacaaccattgcccaaaagcagtttatactttcaatggcattgatacagatggaactgtcacaaaggggggttactccactcacattgtagtccatgaaaggtattgcttcaaaatacccgatggctaccctttggcgaaggcagcacctcttctgtgtgctggaataaccgtgtatactccaatgatgcgacacaacatgaaccaacctggaaagtcacttggggtcattggtcttggtggtctgggtcacatggctgtgaaatttggtaaagcatttggtcttaaggtcacagttttcagtacaagtgaatcaaagagagatgaagccatcaacctccttggagcagataattttgttatatcatcagacacacagcaaatggagtccctgaagaactccctgcacttcataattgacactgcttccggtgaccatccatttgatccgtatttctctctccttaaggttggtggtgtgatgacattggtaggttttccaagtgagatcaaaatgcatcctgcaagccttatacttggtgcgcggaccttgtctggcagtgttgttggaggtataaaagacatccaagaaatggttaacttctgtgcagccaacaatatctatccggagattgagatcattaagatagattatatcaacgaggctctcgcgaggcttgttaatcgagatgtgaaataccgctttgtaatcgacatcgagaactccttcaagtagcgtgctagtgcacatgctctcgtctttctgttagtgttcaacagttcaagagctattacaaatgtgagtcatgccaaataaacttgatgtaaacaaccataattgaacagcaaggggaaacaggtatattgtgataatgaagtcgctctatgaatatcc

SEQ ID NO: 12428 - protein, 354 aa, Zea mays subsp. mays
  peptide (1)..(354): Ceres Seq. ID no. 12347764
  misc_feature (1)..(354): Homolog of NCBI NO: 37532016 NR Description: putative cinnamyl alcohol dehydrogenase [Oryza
  misc_feature (2)..(354): Homolog of NCBI NO: 15218564 NR Description: putative cinnamyl-alcohol dehydrogenase; protein At1g72680.1 [Arabidopsis thaliana] >gi|25283045|pir||E96751
  misc_feature (14)..(352): Homolog of NCBI NO: 19849248 NR Description: cinnamyl alcohol dehydrogenase [Lolium perenne]
  misc_feature (13)..(353): Homolog of NCBI NO: 10720088 NR Description: Probable mannitol dehydrogenase (NAD-dependent
  misc_feature (13)..(354): Homolog of NCBI NO: 10720090 NR Description: Probable mannitol dehydrogenase (NAD-dependent
  misc_feature (13)..(352): Homolog of NCBI NO: 22475166 NR Description: putative sinapyl alcohol dehydrogenase [Populus
  misc_feature (13)..(352): Homolog of NCBI NO: 14279694 NR Description: sinapyl alcohol dehydrogenase [Populus
  misc_feature (24)..(352): Homolog of NCBI NO: 37534606 NR Description: putative cinnamyl alcohol dehydrogenase [Oryza
  misc_feature (1)..(354): Homolog of NCBI NO: 7430935 NR Description: probable cinnamyl-alcohol dehydrogenase (EC
  misc_feature (13)..(352): Homolog of NCBI NO: 3913193 NR Description: Probable mannitol dehydrogenase 1 (NAD-dependent
MAAESENGNCKAWAARDPSGVLSPHSFNRRAVQSGDVSLKIIYCGVCYADVAWTRNKLNDSKYPLVPGHEIAGVVTQVGADVKGFKVGDHVGVGTYVNSCRDCENCNISLDNHCPKAVYTFNGIDTDGTVTKGGYSTHIVVHERYCFKIPDGYPLAKAAPLLCAGITVYTPMMRHNMNQPGKSLGVIGLGGLGHMAVKFGKAFGLKVTVFSTSESKRDEAINLLGADNFVISSDTQQMESLKNSLHFIIDTASGDHPFDPYFSLLKVGGVMTLVGFPSEIKMHPASLILGARTLSGSVVGGIKDIQEMVNFCAANNIYPEIEIIKIDYINEALARLVNRDVKYRFVIDIENSFK

SEQ ID NO: 12429 - protein, 183 aa, Zea mays subsp. mays
  peptide (1)..(183): Ceres Seq. ID no. 12347765
  misc_feature (1)..(183): Homolog of NCBI NO: 37532016 NR Description: putative cinnamyl alcohol dehydrogenase [Oryza
  misc_feature (1)..(183): Homolog of NCBI NO: 15218564 NR Description: putative cinnamyl-alcohol dehydrogenase; protein At1g72680.1 [Arabidopsis thaliana] >gi|25283045|pir||E96751
  misc_feature (1)..(181): Homolog of NCBI NO: 19849248 NR Description: cinnamyl alcohol dehydrogenase [Lolium perenne]
  misc_feature (1)..(182): Homolog of NCBI NO: 10720088 NR Description: Probable mannitol dehydrogenase (NAD-dependent
  misc_feature (1)..(183): Homolog of NCBI NO: 10720090 NR Description: Probable mannitol dehydrogenase (NAD-dependent
  misc_feature (1)..(181): Homolog of NCBI NO: 22475166 NR Description: putative sinapyl alcohol dehydrogenase [Populus
  misc_feature (1)..(181): Homolog of NCBI NO: 14279694 NR Description: sinapyl alcohol dehydrogenase [Populus
  misc_feature (1)..(181): Homolog of NCBI NO: 37534606 NR Description: putative cinnamyl alcohol dehydrogenase [Oryza
  misc_feature (1)..(183): Homolog of NCBI NO: 7430935 NR Description: probable cinnamyl-alcohol dehydrogenase (EC
  misc_feature (1)..(181): Homolog of NCBI NO: 3913193 NR Description: Probable mannitol dehydrogenase 1 (NAD-dependent
MMRHNMNQPGKSLGVIGLGGLGHMAVKFGKAFGLKVTVFSTSESKRDEAINLLGADNFVISSDTQQMESLKNSLHFIIDTASGDHPFDPYFSLLKVGGVMTLVGFPSEIKMHPASLILGARTLSGSVVGGIKDIQEMVNFCAANNIYPEIEIIKIDYINEALARLVNRDVKYRFVIDIENSFK

SEQ ID NO: 12430 - protein, 182 aa, Zea mays subsp. mays
  peptide (1)..(182): Ceres Seq. ID no. 12347766
  misc_feature (1)..(182): Homolog of NCBI NO: 37532016 NR Description: putative cinnamyl alcohol dehydrogenase [Oryza
  misc_feature (1)..(182): Homolog of NCBI NO: 15218564 NR Description: putative cinnamyl-alcohol dehydrogenase; protein At1g72680.1 [Arabidopsis thaliana] >gi|25283045|pir||E96751
  misc_feature (1)..(180): Homolog of NCBI NO: 19849248 NR Description: cinnamyl alcohol dehydrogenase [Lolium perenne]
  misc_feature (1)..(181): Homolog of NCBI NO: 10720088 NR Description: Probable mannitol dehydrogenase (NAD-dependent
  misc_feature (1)..(182): Homolog of NCBI NO: 10720090 NR Description: Probable mannitol dehydrogenase (NAD-dependent
  misc_feature (1)..(180): Homolog of NCBI NO: 22475166 NR Description: putative sinapyl alcohol dehydrogenase [Populus
  misc_feature (1)..(180): Homolog of NCBI NO: 14279694 NR Description: sinapyl alcohol dehydrogenase [Populus
  misc_feature (1)..(180): Homolog of NCBI NO: 37534606 NR Description: putative cinnamyl alcohol dehydrogenase [Oryza
  misc_feature (1)..(182): Homolog of NCBI NO: 7430935 NR Description: probable cinnamyl-alcohol dehydrogenase (EC
  misc_feature (1)..(180): Homolog of NCBI NO: 3913193 NR Description: Probable mannitol dehydrogenase 1 (NAD-dependent
MRHNMNQPGKSLGVIGLGGLGHMAVKFGKAFGLKVTVFSTSESKRDEAINLLGADNFVISSDTQQMESLKNSLHFIIDTASGDHPFDPYFSLLKVGGVMTLVGFPSEIKMHPASLILGARTLSGSVVGGIKDIQEMVNFCAANNIYPEIEIIKIDYINEALARLVNRDVKYRFVIDIENSFK

SEQ ID NO: 12431 - DNA, 946 bp, Zea mays subsp. mays
  misc_feature (1)..(946): Ceres Seq. ID no. 12340618
  misc_feature: MA Experiment ID: 108529 Result: Down-regulated in Transcription
  misc_feature: MA Experiment 108529 PARAMETER Experiment Name: Zm_Imbibed_Seeds_P Parameter: Age (day) Value: 5 vs. 2
  misc_feature: MA Experiment 108529 PARAMETER Experiment Name: Zm_Imbibed_Seeds_P Parameter: Organism Value: Zea mays
  misc_feature: MA Experiment 108529 PARAMETER Experiment Name: Zm_Imbibed_Seeds_P Parameter: Plant Line Value: 35A19
  misc_feature: MA Experiment 108529 PARAMETER Experiment Name: Zm_Imbibed_Seeds_P Parameter: Tissue Value: Roots vs. Embryo
  misc_feature: MA Experiment ID: 108543 Result: Up-regulated in Transcription
  misc_feature: MA Experiment ID: 20000535 Result: Down-regulated in Transcription
  misc_feature: MA Experiment 20000535 PARAMETER Experiment Name: Zm_Hybrid_Seed_Dev_P Parameter: DAP Value: 30 vs. 12
  misc_feature: MA Experiment 20000535 PARAMETER Experiment Name: Zm_Hybrid_Seed_Dev_P Parameter: Organism Value: Zea mays
  misc_feature: MA Experiment 20000535 PARAMETER Experiment Name: Zm_Hybrid_Seed_Dev_P Parameter: Plant Line Value: 35A19
  misc_feature: MA Experiment 20000535 PARAMETER Experiment Name: Zm_Hybrid_Seed_Dev_P Parameter: Tissue Value: Embryo vs. Unfert Floret
atctggtccttgattactcgtcctttttgcttggtgcctgtgtatatcgtcgccccggccgcttgagctagcttcctctagtgctcgctctcgtcgtcgatcggttgtttgcatagcccacggcgagccgaagcaatgtcgtcggcgcccctgcagatcgcgccggtgccggagcatgtgtgctacgtgcactgcaacttctgcaacacaattctcgcggtcagtgtcccgagtcacagcatgctgaacatcgtcacagtccgttgtgggcactgcactagcctgctgtcggtgaacttgagaggactcatccaatcacttcctgtccagaaccaccactactcccagcagcaggagaatttcaccgtccaaaatatgggttttactgaaaattaccctgagtacgcaccttcgtaccgcatgccaacgacgctgtcagtgaaaggtgatctggatcatatgctgcacgtgcgcgctccagagaagaggcagcgtgttccttcagcatataacagatttattaaggaggagatacgaaggattaaagcatgtaacccggacataagccatagggaagccttcagcactgcagcaaagaattgggcacattttccgaatattcattttggtctagggccctgtgaaagtagcaacaatcttgatgaggccaccggtgcaatgtgccatccccagaaagtccaagatctctactaagacctatatcagcactgccctttgtttcctcttagttctggactagttggtgagtgccatatatatatgcatgagtgtgatatgatcatgaggtaaggaattatgattaagatgatatatatgtacgagatgaacatgcccctaggttcatgaaagactaaataaggatcgtcatctcaccatgttatcataggtagtaactattgtttgaaataaattatcctttgtgtgc

SEQ ID NO: 12432 - protein, 192 aa, Zea mays subsp. mays
  peptide (1)..(192): Ceres Seq. ID no. 12340619
  misc_feature (7)..(166): Pfam Name: YABBY protein Pfam Description: YABBY protein
  misc_feature (113)..(168): Homolog of NCBI NO: 32330681 NR Description: yabby10 protein [Zea mays]
  misc_feature (9)..(59): Homolog of NCBI NO: 32330681 NR Description: yabby10 protein [Zea mays]
  misc_feature (13)..(166): Homolog of NCBI NO: 4928751 NR Description: YABBY2 [Arabidopsis thaliana]
  misc_feature (13)..(166): Homolog of NCBI NO: 30683176 NR Description: expressed protein [Arabidopsis thaliana] expressed protein [Arabidopsis thaliana] unknown protein [Arabidopsis thaliana]
  misc_feature (1)..(59): Homolog of NCBI NO: 37551421 NR Description: FIL-like protein [Triticum aestivum]
  misc_feature (113)..(168): Homolog of NCBI NO: 37551421 NR Description: FIL-like protein [Triticum aestivum]
  misc_feature (7)..(192): Homolog of NCBI NO: 11280864 NR Description: hypothetical protein 2 [imported] - rice
  misc_feature (13)..(100): Homolog of NCBI NO: 38605890 NR Description: OSJNBb0020O11.2 [Oryza sativa (japonica
  misc_feature (113)..(168): Homolog of NCBI NO: 38605890 NR Description: OSJNBb0020O11.2 [Oryza sativa (japonica
  misc_feature (113)..(168): Homolog of NCBI NO: 37535908 NR Description: hypothetical protein [Oryza sativa (japonica group)] >gi|22267600|gb|AAM94935.1| putative transcription factor
MSSAPLQIAPVPEHVCYVHCNFCNTILAVSVPSHSMLNIVTVRCGHCTSLLSVNLRGLIQSLPVQNHHYSQQQENFTVQNMGFTENYPEYAPSYRMPTTLSVKGDLDHMLHVRAPEKRQRVPSAYNRFIKEEIRRIKACNPDISHREAFSTAAKNWAHFPNIHFGLGPCESSNNLDEATGAMCHPQKVQDLY

SEQ ID NO: 12433 - protein, 157 aa, Zea mays subsp. mays
  peptide (1)..(157): Ceres Seq. ID no. 12340620
  misc_feature (1)..(131): Pfam Name: YABBY protein Pfam Description: YABBY protein
  misc_feature (1)..(157): Homolog of NCBI NO: 11280864 NR Description: hypothetical protein 2 [imported] - rice
  misc_feature (1)..(24): Homolog of NCBI NO: 37551421 NR Description: FIL-like protein [Triticum aestivum]
  misc_feature (78)..(133): Homolog of NCBI NO: 37551421 NR Description: FIL-like protein [Triticum aestivum]
  misc_feature (78)..(133): Homolog of NCBI NO: 32330681 NR Description: yabby10 protein [Zea mays]
  misc_feature (1)..(24): Homolog of NCBI NO: 32330681 NR Description: yabby10 protein [Zea mays]
  misc_feature (1)..(131): Homolog of NCBI NO: 4928751 NR Description: YABBY2 [Arabidopsis thaliana]
  misc_feature (1)..(131): Homolog of NCBI NO: 30683176 NR Description: expressed protein [Arabidopsis thaliana] expressed protein [Arabidopsis thaliana] unknown protein [Arabidopsis thaliana]
  misc_feature (1)..(65): Homolog of NCBI NO: 38605890 NR Description: OSJNBb0020O11.2 [Oryza sativa (japonica
  misc_feature (78)..(133): Homolog of NCBI NO: 38605890 NR Description: OSJNBb0020O11.2 [Oryza sativa (japonica
  misc_feature (78)..(133): Homolog of NCBI NO: 37535908 NR Description: hypothetical protein [Oryza sativa (japonica group)] >gi|22267600|gb|AAM94935.1| putative transcription factor
MLNIVTVRCGHCTSLLSVNLRGLIQSLPVQNHHYSQQQENFTVQNMGFTENYPEYAPSYRMPTTLSVKGDLDHMLHVRAPEKRQRVPSAYNRFIKEEIRRIKACNPDISHREAFSTAAKNWAHFPNIHFGLGPCESSNNLDEATGAMCHPQKVQDLY

SEQ ID NO: 12434 - protein, 112 aa, Zea mays subsp. mays
  peptide (1)..(112): Ceres Seq. ID no. 12340621
  misc_feature (1)..(86): Pfam Name: YABBY protein Pfam Description: YABBY protein
  misc_feature (1)..(112): Homolog of NCBI NO: 11280864 NR Description: hypothetical protein 2 [imported] - rice
  misc_feature (33)..(88): Homolog of NCBI NO: 37551421 NR Description: FIL-like protein [Triticum aestivum]
  misc_feature (33)..(88): Homolog of NCBI NO: 32330681 NR Description: yabby10 protein [Zea mays]
  misc_feature (1)..(86): Homolog of NCBI NO: 4928751 NR Description: YABBY2 [Arabidopsis thaliana]
  misc_feature (1)..(86): Homolog of NCBI NO: 30683176 NR Description: expressed protein [Arabidopsis thaliana] expressed protein [Arabidopsis thaliana] unknown protein [Arabidopsis thaliana]
  misc_feature (1)..(20): Homolog of NCBI NO: 38605890 NR Description: OSJNBb0020O11.2 [Oryza sativa (japonica
  misc_feature (33)..(88): Homolog of NCBI NO: 38605890 NR Description: OSJNBb0020O11.2 [Oryza sativa (japonica
  misc_feature (33)..(88): Homolog of NCBI NO: 37535908 NR Description: hypothetical protein [Oryza sativa (japonica group)] >gi|22267600|gb|AAM94935.1| putative transcription factor
  misc_feature (33)..(88): Homolog of NCBI NO: 32330679 NR Description: yabby9 protein [Zea mays]
  misc_feature (1)..(86): Homolog of NCBI NO: 11280863 NR Description: hypothetical protein [imported] - rice
MGFTENYPEYAPSYRMPTTLSVKGDLDHMLHVRAPEKRQRVPSAYNRFIKEEIRRIKACNPDISHREAFSTAAKNWAHFPNIHFGLGPCESSNNLDEATGAMCHPQKVQDLY

SEQ ID NO: 12435 - DNA, 1804 bp, Zea mays subsp. mays
  misc_feature (1)..(1804): Ceres Seq. ID no. 12407383
  misc_feature: MA Experiment ID: 108535 Result: Down-regulated in Transcription
  misc_feature: MA Experiment 108535 PARAMETER Experiment Name: Zm_Meristem_P Parameter: Age (day) Value: 8
  misc_feature: MA Experiment 108535 PARAMETER Experiment Name: Zm_Meristem_P Parameter: Organism Value: Zea mays
  misc_feature: MA Experiment 108535 PARAMETER Experiment Name: Zm_Meristem_P Parameter: Plant Line Value: 35A19
  misc_feature: MA Experiment 108535 PARAMETER Experiment Name: Zm_Meristem_P Parameter: Tissue Value: Root Meristem vs. Above Root Meristem
atcccaccagttccccaattccatttctccatccatgacagctcgccatttccccacctgttcctacgctaccgccacctaaaaaaattccaggcactatccatttcaatcttgctcaaaggtcatttcattccggccggtgccttttttaggccgattggagggaaggctggtctgtgttttgttttcctgctgcctcttgggcgagttgaatttgggcgcctcttgctccaggcagtattttatcgagctagagtctggtacccggcgattcttgcttggtccaggcgccaaggcgaggaattgggcctagctccagctcaaatctgtgccttgttgcagacagaaggatttctgcatgggcgaccataactaagatgtgagattgggtggcgtcagctcggctggtgggtgattcttggtgcgtacacagacacatccctggaggcttgagctgatttggcgaggaggacagtgcaggagagagatgtctttcaggagcctgattcaggacatgaaggacgagttcgggagcatctcgcggcacagcctgcggtcccggtctcaccgctccgccgggaacgcggcgcgggcggcggcggcgggaccgtcggaggcgatggatcagagctgctggtcgcagctgccccccgagctcctgcgggaggtgctggtgaggatcgaggcatcggagagctggtggccagcgcgcaaggacgtggtgtcaggcgccggcgtctgccggacctggaggggcatcatgaaggaggccgtgcgcgtcccggaggtgtcagggaagctcacgttccccatctcacttaagcagcctggcccaagggatggcactcttaaatgtttcatcaggaggaatcgaactactcagacatattatctgtatattggattgacagaagcattggctgatgatgggaagtttctacttgctgcacgcaagtgtcgtaagcccacctgcacagactacctaatttctcttgataaggttgatatgtcaaagggaagcagcacctatattggcaagctaagatcaaacttccttggaacaaagttcactgtctatgatgctcatccaccatatgatggagctgcggtctcaaagagtcgctctgcacgtgtggttggtttgaagcaggtctcccctagagttccggctggaaattatcccgtttcacatatttcttacgagctgaatgttctgggctccagaggtccaagaaggatgaactgtgttatggattccatccctgcatcagctgttaaggaaggagggaaaactcctacacagactgaatttccacttagcagccttgactctttcccatcatttccattcttcagatctaaatcagctcggatagacagttcaacgtcgcaatcatccagtcagagggaagataggttggtgctgaagaacaagtctcctaggtggcacgaacaactgcagtgttggtgcctgaatttccgtgggcgggtcactgttgcctcggttaaaaacttccagttggtggcttctgaggacaatggaccagagagccaagagagtgacaaggtgattctccaattcggaaagatcggaaaagacttgttcaccatggactacggttatccaatatcggcatttcaagcttttgcaatttgtctgagcagttttgatacaaaaattgcctgcgaatgaggcaaggtgatttttttcccttctctattccccttgcttgtattatggacatgcagtaaaattttattaaacatgcaatttccaatgtcaaggatgattggatgaagctct

SEQ ID NO: 12436 - protein, 401 aa, Zea mays subsp. mays
  peptide (1)..(401): Ceres Seq. ID no. 12407384
  misc_feature (114)..(401): Pfam Name: Tub family Pfam Description: Tub family
  misc_feature (1)..(401): Homolog of NCBI NO: 34899264 NR Description: contains ESTs
  misc_feature (1)..(401): Homolog of NCBI NO: 25409071 NR Description: probable Tub family protein [imported] - thaliana >gi|3738302|gb|AAC63644.1| putative tubby protein thaliana] >gi|20197552|gb|AAM15124.1| putative tubby protein
  misc_feature (1)..(401): Homolog of NCBI NO: 30690823 NR Description: F-box containing tubby family protein thaliana] >gi|18377640|gb|AAL66970.1| putative tubby protein thaliana] >gi|20465543|gb|AAM20254.1| putative tubby protein
  misc_feature (1)..(306): Homolog of NCBI NO: 5777631 NR Description: CAA303719.1 protein [Oryza sativa]
  misc_feature (348)..(401): Homolog of NCBI NO: 5777631 NR Description: CAA303719.1 protein [Oryza sativa]
  misc_feature (307)..(348): Homolog of NCBI NO: 5777631 NR Description: CAA303719.1 protein [Oryza sativa]
  misc_feature (1)..(306): Homolog of NCBI NO: 32480039 NR Description: OSJNBa0039K24.2 [Oryza sativa (japonica
  misc_feature (348)..(401): Homolog of NCBI NO: 32480039 NR Description: OSJNBa0039K24.2 [Oryza sativa (japonica
  misc_feature (307)..(348): Homolog of NCBI NO: 32480039 NR Description: OSJNBa0039K24.2 [Oryza sativa (japonica
  misc_feature (22)..(401): Homolog of NCBI NO: 22326885 NR Description: F-box containing tubby family protein; protein
MSFRSLIQDMKDEFGSISRHSLRSRSHRSAGNAARAAAAGPSEAMDQSCWSQLPPELLREVLVRIEASESWWPARKDVVSGAGVCRTWRGIMKEAVRVPEVSGKLTFPISLKQPGPRDGTLKCFIRRNRTTQTYYLYIGLTEALADDGKFLLAARKCRKPTCTDYLISLDKVDMSKGSSTYIGKLRSNFLGTKFTVYDAHPPYDGAAVSKSRSARVVGLKQVSPRVPAGNYPVSHISYELNVLGSRGPRRMNCVMDSIPASAVKEGGKTPTQTEFPLSSLDSFPSFPFFRSKSARIDSSTSQSSSQREDRLVLKNKSPRWHEQLQCWCLNFRGRVTVASVKNFQLVASEDNGPESQESDKVILQFGKIGKDLFTMDYGYPISAFQAFAICLSSFDTKIACE

SEQ ID NO: 12437 - protein, 392 aa, Zea mays subsp. mays
  peptide (1)..(392): Ceres Seq. ID no. 12407385
  misc_feature (105)..(392): Pfam Name: Tub family Pfam Description: Tub family
  misc_feature (1)..(392): Homolog of NCBI NO: 34899264 NR Description: contains ESTs
  misc_feature (1)..(392): Homolog of NCBI NO: 25409071 NR Description: probable Tub family protein [imported] - thaliana >gi|3738302|gb|AAC63644.1| putative tubby protein thaliana] >gi|20197552|gb|AAM15124.1| putative tubby protein
  misc_feature (1)..(392): Homolog of NCBI NO: 30690823 NR Description: F-box containing tubby family protein thaliana] >gi|18377640|gb|AAL66970.1| putative tubby protein thaliana] >gi|20465543|gb|AAM20254.1| putative tubby protein
  misc_feature (1)..(297): Homolog of NCBI NO: 5777631 NR Description: CAA303719.1 protein [Oryza sativa]
  misc_feature (339)..(392): Homolog of NCBI NO: 5777631 NR Description: CAA303719.1 protein [Oryza sativa]
  misc_feature (298)..(339): Homolog of NCBI NO: 5777631 NR Description: CAA303719.1 protein [Oryza sativa]
  misc_feature (1)..(297): Homolog of NCBI NO: 32480039 NR Description: OSJNBa0039K24.2 [Oryza sativa (japonica
  misc_feature (339)..(392): Homolog of NCBI NO: 32480039 NR Description: OSJNBa0039K24.2 [Oryza sativa (japonica
  misc_feature (298)..(339): Homolog of NCBI NO: 32480039 NR Description: OSJNBa0039K24.2 [Oryza sativa (japonica
  misc_feature (13)..(392): Homolog of NCBI NO: 22326885 NR Description: F-box containing tubby family protein; protein
MKDEFGSISRHSLRSRSHRSAGNAARAAAAGPSEAMDQSCWSQLPPELLREVLVRIEASESWWPARKDVVSGAGVCRTWRGIMKEAVRVPEVSGKLTFPISLKQPGPRDGTLKCFIRRNRTTQTYYLYIGLTEALADDGKFLLAARKCRKPTCTDYLISLDKVDMSKGSSTYIGKLRSNFLGTKFTVYDAHPPYDGAAVSKSRSARVVGLKQVSPRVPAGNYPVSHISYELNVLGSRGPRRMNCVMDSIPASAVKEGGKTPTQTEFPLSSLDSFPSFPFFRSKSARIDSSTSQSSSQREDRLVLKNKSPRWHEQLQCWCLNFRGRVTVASVKNFQLVASEDNGPESQESDKVILQFGKIGKDLFTMDYGYPISAFQAFAICLSSFDTKIACE

SEQ ID NO: 12438 - protein, 357 aa, Zea mays subsp. mays
  peptide (1)..(357): Ceres Seq. ID no. 12407386
  misc_feature (70)..(357): Pfam Name: Tub family Pfam Description: Tub family
  misc_feature (1)..(357): Homolog of NCBI NO: 34899264 NR Description: contains ESTs
  misc_feature (1)..(357): Homolog of NCBI NO: 25409071 NR Description: probable Tub family protein [imported] - thaliana >gi|3738302|gb|AAC63644.1| putative tubby protein thaliana] >gi|20197552|gb|AAM15124.1| putative tubby protein
  misc_feature (1)..(357): Homolog of NCBI NO: 30690823 NR Description: F-box containing tubby family protein thaliana] >gi|18377640|gb|AAL66970.1| putative tubby protein thaliana] >gi|20465543|gb|AAM20254.1| putative tubby protein
  misc_feature (1)..(262): Homolog of NCBI NO: 5777631 NR Description: CAA303719.1 protein [Oryza sativa]
  misc_feature (304)..(357): Homolog of NCBI NO: 5777631 NR Description: CAA303719.1 protein [Oryza sativa]
  misc_feature (263)..(304): Homolog of NCBI NO: 5777631 NR Description: CAA303719.1 protein [Oryza sativa]
  misc_feature (1)..(262): Homolog of NCBI NO: 32480039 NR Description: OSJNBa0039K24.2 [Oryza sativa (japonica
  misc_feature (304)..(357): Homolog of NCBI NO: 32480039 NR Description: OSJNBa0039K24.2 [Oryza sativa (japonica
  misc_feature (263)..(304): Homolog of NCBI NO: 32480039 NR Description: OSJNBa0039K24.2 [Oryza sativa (japonica
  misc_feature (1)..(357): Homolog of NCBI NO: 22326885 NR Description: F-box containing tubby family protein; protein
MDQSCWSQLPPELLREVLVRIEASESWWPARKDVVSGAGVCRTWRGIMKEAVRVPEVSGKLTFPISLKQPGPRDGTLKCFIRRNRTTQTYYLYIGLTEALADDGKFLLAARKCRKPTCTDYLISLDKVDMSKGSSTYIGKLRSNFLGTKFTVYDAHPPYDGAAVSKSRSARVVGLKQVSPRVPAGNYPVSHISYELNVLGSRGPRRMNCVMDSIPASAVKEGGKTPTQTEFPLSSLDSFPSFPFFRSKSARIDSSTSQSSSQREDRLVLKNKSPRWHEQLQCWCLNFRGRVTVASVKNFQLVASEDNGPESQESDKVILQFGKIGKDLFTMDYGYPISAFQAFAICLSSFDTKIACE

SEQ ID NO: 12439 - DNA, 1434 bp, Zea mays subsp. mays
  misc_feature (1)..(1434): Ceres Seq. ID no. 12359666
  misc_feature: MA Experiment ID: 20000492 Result: Down-regulated in Transcription
  misc_feature: MA Experiment 20000492 PARAMETER Experiment Name: Zm_Hybrid_Seed_Dev_P Parameter: DAP Value: 12
  misc_feature: MA Experiment 20000492 PARAMETER Experiment Name: Zm_Hybrid_Seed_Dev_P Parameter: Organism Value: Zea mays
  misc_feature: MA Experiment 20000492 PARAMETER Experiment Name: Zm_Hybrid_Seed_Dev_P Parameter: Plant Line Value: 35A19
  misc_feature: MA Experiment 20000492 PARAMETER Experiment Name: Zm_Hybrid_Seed_Dev_P Parameter: Tissue Value: Fert Kernel vs. Unfert Floret
agcgccaccaagagttgatccacccaggccagccacccgcccgtcccccggcggcggagatggcgaggaacgaggcggcggccgcggccgcgccgggcgtcgacttccaccttcccgacgagatcctggccgtgatccccaccgacccgtacgagcagctggacgtggcgcgcaagatcacctccatggccatcgcctcccgcgtctcccgcctcgaggccgacgctgcgcgcctccgccgtgacctcgccgaccgtgaccgcgccgaggccgacctccgcgcctgcctcgccgactccgacgcgcgcctgccgccgctctcgacgagaacgcgaagctggcgaaggaaagggactcgctcgcggcgacggtcaaaaagctgaccaggaatttggcgaagttggaggcttttaagaaacaattgatgaaatcattaagtgaagataatctattgcaactgtctgaaaccagtcaagatcacaacgcagaagatttgacagctcgagtcccattttggaaagatgaagtttcgagcagtaacacttcttcagatgcctccagcagatctacaatgactgaatccgtccatggcggaggataccagttctcgatcacaccatatatgcctccaaaattaactcctggctcaacaactatgatttcgtcctctagtggttctccccgagcttattcaactggcccaccctctcccaagttcttatctggtccgacatcacctgcaaaagctcgatctgagggccaattggcattttcatcatggcaaggatcatcaagtcatcagtattcagcacctacctctcctccccaacgccactcattcacagagcggccacgtatagatgggaaggaattcttccgacaagcacggacaagactttcgtatgagcaatttggagcatttttggccaatatcaaggagttcaatgctcagaaacaatcacgggaggacaccctgtcaaaagcagaagagatttttggaacagaacacaatgatctgtacatttctttccagaatatgcttagccgaaactaatcatgaaaatttgtcagaagtagtattttctctcaaaatcaagcagggtaggttctgttggaataaacgatgtccttccgtaggttctcaaagatcacattgtagagatatgtatataggccaccttaattcgaggtgttcgttctcaataatttggagctgtgacttaaaagcggaaatctcatagcatacattcactcattccctgaaattcaaggcttcctgcttgtctttctgctgtaaatccggatgcagatctcttgagctattaaggtgccttccctagttccctttgtagaaagctgtataaaactgccctttgccgttcttctaactgccaagggtacacggaatggatatgatcacggtgcattcgttgt

SEQ ID NO: 12440 - protein, 209 aa, Zea mays subsp. mays
  peptide (1)..(209): Ceres Seq. ID no. 12359667
  misc_feature (1)..(209): Homolog of NCBI NO: 38344261 NR Description: OSJNBa0008M17.14 [Oryza sativa (japonica
  misc_feature (1)..(207): Homolog of NCBI NO: 15222835 NR Description: hypothetical protein; protein id: At1g56080.1
  misc_feature (1)..(209): Homolog of NCBI NO: 30684901 NR Description: expressed protein [Arabidopsis thaliana] ESTs gb|N38586 and gb|N38613 come from this gene. [Arabidopsis >gi|26452357|dbj|BAC43264.1| unknown protein [Arabidopsis
  misc_feature (1)..(209): Homolog of NCBI NO: 18414476 NR Description: Expressed protein; protein id: At4g15545.1, by cDNA: 307., supported by cDNA: gi_14517355, supported by cDNA: supported by cDNA: gi_16323275 [Arabidopsis thaliana] thaliana]
  misc_feature (1)..(181): Homolog of NCBI NO: 7485048 NR Description: hypothetical protein - Arabidopsis thaliana hypothetical protein [Arabidopsis thaliana]
  misc_feature (1)..(135): Homolog of NCBI NO: 34909876 NR Description: B1143G03.2 [Oryza sativa (japonica
  misc_feature (1)..(55): Homolog of NCBI NO: 23613663 NR Description: hypothetical protein, conserved [Plasmodium
  misc_feature (146)..(209): Homolog of NCBI NO: 23613663 NR Description: hypothetical protein, conserved [Plasmodium
  misc_feature (1)..(96): Homolog of NCBI NO: 25404089 NR Description: hypothetical protein T6H22.12 [imported] - thaliana >gi|6056378|gb|AAF02842.1|AC009894_13 Hypothetical
  misc_feature (1)..(67): Homolog of NCBI NO: 23489944 NR Description: hypothetical protein [Plasmodium yoelii yoelii]
MKSLSEDNLLQLSETSQDHNAEDLTARVPFWKDEVSSSNTSSDASSRSTMTESVHGGGYQFSITPYMPPKLTPGSTTMISSSSGSPRAYSTGPPSPKFLSGPTSPAKARSEGQLAFSSWQGSSSHQYSAPTSPPQRHSFTERPRIDGKEFFRQARTRLSYEQFGAFLANIKEFNAQKQSREDTLSKAEEIFGTEHNDLYISFQNMLSRN

SEQ ID NO: 12441 - protein, 160 aa, Zea mays subsp. mays
  peptide (1)..(160): Ceres Seq. ID no. 12359668
  misc_feature (1)..(160): Homolog of NCBI NO: 38344261 NR Description: OSJNBa0008M17.14 [Oryza sativa (japonica
  misc_feature (1)..(158): Homolog of NCBI NO: 15222835 NR Description: hypothetical protein; protein id: At1g56080.1
  misc_feature (1)..(160): Homolog of NCBI NO: 30684901 NR Description: expressed protein [Arabidopsis thaliana] ESTs gb|N38586 and gb|N38613 come from this gene. [Arabidopsis >gi|26452357|dbj|BAC43264.1| unknown protein [Arabidopsis
  misc_feature (1)..(160): Homolog of NCBI NO: 18414476 NR Description: Expressed protein; protein id: At4g15545.1, by cDNA: 307., supported by cDNA: gi_14517355, supported by cDNA: supported by cDNA: gi_16323275 [Arabidopsis thaliana] thaliana]
  misc_feature (1)..(132): Homolog of NCBI NO: 7485048 NR Description: hypothetical protein - Arabidopsis thaliana hypothetical protein [Arabidopsis thaliana]
  misc_feature (1)..(86): Homolog of NCBI NO: 34909876 NR Description: B1143G03.2 [Oryza sativa (japonica
  misc_feature (97)..(160): Homolog of NCBI NO: 23613663 NR Description: hypothetical protein, conserved [Plasmodium
  misc_feature (1)..(47): Homolog of NCBI NO: 25404089 NR Description: hypothetical protein T6H22.12 [imported] - thaliana >gi|6056378|gb|AAF02842.1|AC009894_13 Hypothetical
  misc_feature (1)..(18): Homolog of NCBI NO: 23489944 NR Description: hypothetical protein [Plasmodium yoelii yoelii]
  misc_feature (97)..(160): Homolog of NCBI NO: 23489944 NR Description: hypothetical protein [Plasmodium yoelii yoelii]
MTESVHGGGYQFSITPYMPPKLTPGSTTMISSSSGSPRAYSTGPPSPKFLSGPTSPAKARSEGQLAFSSWQGSSSHQYSAPTSPPQRHSFTERPRIDGKEFFRQARTRLSYEQFGAFLANIKEFNAQKQSREDTLSKAEEIFGTEHNDLYISFQNMLSRN

SEQ ID NO: 12442 - protein, 143 aa, Zea mays subsp. mays
  peptide (1)..(143): Ceres Seq. ID no. 12359669
  misc_feature (1)..(143): Homolog of NCBI NO: 38344261 NR Description: OSJNBa0008M17.14 [Oryza sativa (japonica
  misc_feature (1)..(141): Homolog of NCBI NO: 15222835 NR Description: hypothetical protein; protein id: At1g56080.1
  misc_feature (1)..(143): Homolog of NCBI NO: 30684901 NR Description: expressed protein [Arabidopsis thaliana] ESTs gb|N38586 and gb|N38613 come from this gene. [Arabidopsis >gi|26452357|dbj|BAC43264.1| unknown protein [Arabidopsis
  misc_feature (1)..(143): Homolog of NCBI NO: 18414476 NR Description: Expressed protein; protein id: At4g15545.1, by cDNA: 307., supported by cDNA: gi_14517355, supported by cDNA: supported by cDNA: gi_16323275 [Arabidopsis thaliana] thaliana]
  misc_feature (1)..(115): Homolog of NCBI NO: 7485048 NR Description: hypothetical protein - Arabidopsis thaliana hypothetical protein [Arabidopsis thaliana]
  misc_feature (1)..(69): Homolog of NCBI NO: 34909876 NR Description: B1143G03.2 [Oryza sativa (japonica
  misc_feature (80)..(143): Homolog of NCBI NO: 23613663 NR Description: hypothetical protein, conserved [Plasmodium
  misc_feature (1)..(30): Homolog of NCBI NO: 25404089 NR Description: hypothetical protein T6H22.12 [imported] - thaliana >gi|6056378|gb|AAF02842.1|AC009894_13 Hypothetical
  misc_feature (80)..(143): Homolog of NCBI NO: 23489944 NR Description: hypothetical protein [Plasmodium yoelii yoelii]
  misc_feature (1)..(91): Homolog of NCBI NO: 34909876 NR Description: B1143G03.2 [Oryza sativa (japonica
MPPKLTPGSTTMISSSSGSPRAYSTGPPSPKFLSGPTSPAKARSEGQLAFSSWQGSSSHQYSAPTSPPQRHSFTERPRIDGKEFFRQARTRLSYEQFGAFLANIKEFNAQKQSREDTLSKAEEIFGTEHNDLYISFQNMLSRN

SEQ ID NO: 12443 - DNA, 1439 bp, Zea mays subsp. mays
  misc_feature (1)..(1439): Ceres Seq. ID no. 12351772
  misc_feature: MA Experiment ID: 108515 Result: Up-regulated in Transcription
  misc_feature: MA Experiment 108515 PARAMETER Experiment Name: Zm_2mM_SA_P Parameter: Age (day) Value: 8
  misc_feature: MA Experiment 108515 PARAMETER Experiment Name: Zm_2mM_SA_P Parameter: Organism Value: Zea mays
  misc_feature: MA Experiment 108515 PARAMETER Experiment Name: Zm_2mM_SA_P Parameter: Plant Line Value: 35A19
  misc_feature: MA Experiment 108515 PARAMETER Experiment Name: Zm_2mM_SA_P Parameter: Timepoint (hr) Value: 12
  misc_feature: MA Experiment 108515 PARAMETER Experiment Name: Zm_2mM_SA_P Parameter: Tissue Value: Aerial
  misc_feature: MA Experiment 108515 PARAMETER Experiment Name: Zm_2mM_SA_P Parameter: Treatment Value: 2mM SA vs. No Treatment
  misc_feature: MA Experiment ID: 108522 Result: Up-regulated in Transcription
  misc_feature: MA Experiment 108522 PARAMETER Experiment Name: Zm_42deg_Heat_P Parameter: Age (day) Value: 8
  misc_feature: MA Experiment 108522 PARAMETER Experiment Name: Zm_42deg_Heat_P Parameter: Organism Value: Zea mays
  misc_feature: MA Experiment 108522 PARAMETER Experiment Name: Zm_42deg_Heat_P Parameter: Plant Line Value: 35A19
  misc_feature: MA Experiment 108522 PARAMETER Experiment Name: Zm_42deg_Heat_P Parameter: Temperature (deg C) Value: 42 vs. 22
  misc_feature: MA Experiment 108522 PARAMETER Experiment Name: Zm_42deg_Heat_P Parameter: Timepoint (hr) Value: 1
  misc_feature: MA Experiment 108522 PARAMETER Experiment Name: Zm_42deg_Heat_P Parameter: Tissue Value: Aerial
  misc_feature: MA Experiment ID: 108523 Result: Up-regulated in Transcription
  misc_feature: MA Experiment 108523 PARAMETER Experiment Name: Zm_42deg_Heat_P Parameter: Age (day) Value: 8
  misc_feature: MA Experiment 108523 PARAMETER Experiment Name: Zm_42deg_Heat_P Parameter: Organism Value: Zea mays
  misc_feature: MA Experiment 108523 PARAMETER Experiment Name: Zm_42deg_Heat_P Parameter: Plant Line Value: 35A19
  misc_feature: MA Experiment 108523 PARAMETER Experiment Name: Zm_42deg_Heat_P Parameter: Temperature (deg C) Value: 42 vs. 22
  misc_feature: MA Experiment 108523 PARAMETER Experiment Name: Zm_42deg_Heat_P Parameter: Timepoint (hr) Value: 6
  misc_feature: MA Experiment 108523 PARAMETER Experiment Name: Zm_42deg_Heat_P Parameter: Tissue Value: Aerial
  misc_feature: MA Experiment ID: 108527 Result: Up-regulated in Transcription
  misc_feature: MA Experiment 108527 PARAMETER Experiment Name: Zm_5mM_NO_P Parameter: Age (day) Value: 8
  misc_feature: MA Experiment 108527 PARAMETER Experiment Name: Zm_5mM_NO_P Parameter: Organism Value: Zea mays
  misc_feature: MA Experiment 108527 PARAMETER Experiment Name: Zm_5mM_NO_P Parameter: Plant Line Value: 35A19
  misc_feature: MA Experiment 108527 PARAMETER Experiment Name: Zm_5mM_NO_P Parameter: Timepoint (hr) Value: 6
  misc_feature: MA Experiment 108527 PARAMETER Experiment Name: Zm_5mM_NO_P Parameter: Tissue Value: Aerial
  misc_feature: MA Experiment 108527 PARAMETER Experiment Name: Zm_5mM_NO_P Parameter: Treatment Value: 5mM NO vs. No Treatment
  misc_feature: MA Experiment ID: 108544 Result: Down-regulated in Transcription
  misc_feature: MA Experiment ID: 108559 Result: Up-regulated in Transcription
  misc_feature: MA Experiment 108559 PARAMETER Experiment Name: Zm_5mM_NO_P Parameter: Age (day) Value: 8
  misc_feature: MA Experiment 108559 PARAMETER Experiment Name: Zm_5mM_NO_P Parameter: Organism Value: Zea mays
  misc_feature: MA Experiment 108559 PARAMETER Experiment Name: Zm_5mM_NO_P Parameter: Plant Line Value: 35A19
  misc_feature: MA Experiment 108559 PARAMETER Experiment Name: Zm_5mM_NO_P Parameter: Timepoint (hr) Value: 12
  misc_feature: MA Experiment 108559 PARAMETER Experiment Name: Zm_5mM_NO_P Parameter: Tissue Value: Aerial
  misc_feature: MA Experiment 108559 PARAMETER Experiment Name: Zm_5mM_NO_P Parameter: Treatment Value: 5mM NO vs. No Treatment
  misc_feature: MA Experiment ID: 20000534 Result: Up-regulated in Transcription
  misc_feature: MA Experiment 20000534 PARAMETER Experiment Name: Zm_Hybrid_Pollen_P Parameter: Age (day) Value: 8
  misc_feature: MA Experiment 20000534 PARAMETER Experiment Name: Zm_Hybrid_Pollen_P Parameter: Organism Value: Zea mays
  misc_feature: MA Experiment 20000534 PARAMETER Experiment Name: Zm_Hybrid_Pollen_P Parameter: Plant Line Value: 35A19
  misc_feature: MA Experiment 20000534 PARAMETER Experiment Name: Zm_Hybrid_Pollen_P Parameter: Tissue Value: Pollen vs. Aerial
  misc_feature: MA Experiment ID: 20000627 Result: Up-regulated in Transcription
  misc_feature: MA Experiment 20000627 PARAMETER Experiment Name: Zm_Herbicide-Treatments_P Parameter: Timepoint (hr) Value: 12
  misc_feature: MA Experiment 20000627 PARAMETER Experiment Name: Zm_Herbicide-Treatments_P Parameter: Tissue Value: Aerial
  misc_feature: MA Experiment 20000627 PARAMETER Experiment Name: Zm_Herbicide-Treatments_P Parameter: Treatment Value: Finale vs. No Treatment
  misc_feature: MA Experiment ID: 20000630 Result: Up-regulated in Transcription
  misc_feature: MA Experiment 20000630 PARAMETER Experiment Name: Zm_Herbicide-Treatments_P Parameter: Timepoint (hr) Value: 4
  misc_feature: MA Experiment 20000630 PARAMETER Experiment Name: Zm_Herbicide-Treatments_P Parameter: Tissue Value: Aerial
  misc_feature: MA Experiment 20000630 PARAMETER Experiment Name: Zm_Herbicide-Treatments_P Parameter: Treatment Value: Roundup vs. No Treatment
ctatgggctttgtggccgccctgtcggaaaacccgcgcaagaaaagagaaacccgcaagccgcccgcgcagaccatcgccccgttgccacggtcaaattcgtcggcgtttggtgccgcggcgtgactgtccgccggtcgcggcgcgcgtcctgcctggttggatcccttcggacttccgcagattcccgcgcgggggtgtttgatttggatgagaggagcgcggcggcgggatggggaccccttcgcagggctcggcggccgtgacggcggcccgggtcgacctctgcgcgctcgacctcatgcctgtctttgccaaggagatgatcgccggcggcgtcgccggcgccttctccaaaaccgccatcgcgccgctcgagcgcgtcaagatattgctgcagaccagaacaaatgagtttgggtctcttggagttctcaaatcattgaagaaactgagacaacttgatggagtcatggggttttacaaaggaaatggtgccagtgtgatgagaattgttccttatgctgcattacatttcatggcatatgagcggtaccggtgttggattttgaataactgtccctcactgggaacagggcctttagtagatcttttagccggttcagcatcagggggaactgctgtattgtgtacttatcccttggatttggcccggactaagcttgcctttcaggtcaatagttcagatgaactcagcagagctttgaaaaggggaagtccccagccagcatatggaggaatcattgatgtctttagatgtgtttactcagaaggtggagtgcgggctctttaccgaggtgtaggtccaacactcatggggatacttccttatgctggtcttaagttctacatatatgaagggctgaaggtacatgtaccagaagattacagaagttctgtaacattgaagctgtcatgtggtgctgctgctggtttatttggacagactctgacatatccattagatgttgtcaggaggcagatgcaggttcaaaatcagcaacaacatgaacaatttggtgccccacgaataacgggcacattccagggtcttgtgtccattaaacaaacacagggttggaaacaattatttgctggcttgagcctcaattacatcaaggtggtgccttcagtggccattggtttcaccgcatatgacaccatgaagcatttgctgaagatacctccaagagagaagaataaggtctgagcatggtcctgcttgaaattttggccgctcaattctgcagctagcagaaaagcactgcttctttctaaggcatgggagtgccgtatgaagcttacaatagaatgaagcagcctcgcccgcaattctgttacctagtactaattgcgttgtgtcacgtgatagcttatgtacctgacatattctttcattctaattttcctcattcatct

SEQ ID NO: 12444 - protein, 332 aa, Zea mays subsp. mays
  peptide (1)..(332): Ceres Seq. ID no. 12351773
  misc_feature (1)..(329): Homolog of NCBI NO: 20161078 NR Description: putative mitochondrial carrier [Oryza sativa
  misc_feature (1)..(331): Homolog of NCBI NO: 15223820 NR Description: mitochondrial carrier protein family; protein id:
  misc_feature (1)..(331): Homolog of NCBI NO: 7527717 NR Description: T5E21.6 [Arabidopsis thaliana]
  misc_feature (21)..(329): Homolog of NCBI NO: 15236140 NR Description: mitochondrial carrier protein family; protein id: [Arabidopsis thaliana] >gi|7441723|pir||T04273 hypothetical
  misc_feature (126)..(329): Homolog of NCBI NO: 34910456 NR Description: P0456F08.3 [Oryza sativa (japonica
  misc_feature (4)..(325): Homolog of NCBI NO: 34394749 NR Description: putative mitochondrial carrier protein [Oryza
  misc_feature (185)..(331): Homolog of NCBI NO: 20260324 NR Description: putative mitochondrial carrier protein thaliana] >gi|22136184|gb|AAM91170.1| putative mitochondrial
  misc_feature (29)..(324): Homolog of NCBI NO: 27544933 NR Description: hypothetical protein MGC39851 [Homo sapiens]
  misc_feature (29)..(324): Homolog of NCBI NO: 28277902 NR Description: Similar to RIKEN cDNA 3110021G18 gene [Danio
  misc_feature (29)..(324): Homolog of NCBI NO: 30424808 NR Description: RIKEN cDNA 3110021G18 [Mus musculus]
MGTPSQGSAAVTAARVDLCALDLMPVFAKEMIAGGVAGAFSKTAIAPLERVKILLQTRTNEFGSLGVLKSLKKLRQLDGVMGFYKGNGASVMRIVPYAALHFMAYERYRCWILNNCPSLGTGPLVDLLAGSASGGTAVLCTYPLDLARTKLAFQVNSSDELSRALKRGSPQPAYGGIIDVFRCVYSEGGVRALYRGVGPTLMGILPYAGLKFYIYEGLKVHVPEDYRSSVTLKLSCGAAAGLFGQTLTYPLDVVRRQMQVQNQQQHEQFGAPRITGTFQGLVSIKQTQGWKQLFAGLSLNYIKVVPSVAIGFTAYDTMKHLLKIPPREKNKV

SEQ ID NO: 12445 - protein, 309 aa, Zea mays subsp. mays
  peptide (1)..(309): Ceres Seq. ID no. 12351774
  misc_feature (1)..(306): Homolog of NCBI NO: 20161078 NR Description: putative mitochondrial carrier [Oryza sativa
  misc_feature (1)..(308): Homolog of NCBI NO: 15223820 NR Description: mitochondrial carrier protein family; protein id:
  misc_feature (1)..(308): Homolog of NCBI NO: 7527717 NR Description: T5E21.6 [Arabidopsis thaliana]
  misc_feature (1)..(306): Homolog of NCBI NO: 15236140 NR Description: mitochondrial carrier protein family; protein id: [Arabidopsis thaliana] >gi|7441723|pir||T04273 hypothetical
  misc_feature (103)..(306): Homolog of NCBI NO: 34910456 NR Description: P0456F08.3 [Oryza sativa (japonica
  misc_feature (1)..(302): Homolog of NCBI NO: 34394749 NR Description: putative mitochondrial carrier protein [Oryza
  misc_feature (162)..(308): Homolog of NCBI NO: 20260324 NR Description: putative mitochondrial carrier protein thaliana] >gi|22136184|gb|AAM91170.1| putative mitochondrial
  misc_feature (6)..(301): Homolog of NCBI NO: 27544933 NR Description: hypothetical protein MGC39851 [Homo sapiens]
  misc_feature (6)..(301): Homolog of NCBI NO: 28277902 NR Description: Similar to RIKEN cDNA 3110021G18 gene [Danio
  misc_feature (6)..(301): Homolog of NCBI NO: 30424808 NR Description: RIKEN cDNA 3110021G18 [Mus musculus]
MPVFAKEMIAGGVAGAFSKTAIAPLERVKILLQTRTNEFGSLGVLKSLKKLRQLDGVMGFYKGNGASVMRIVPYAALHFMAYERYRCWILNNCPSLGTGPLVDLLAGSASGGTAVLCTYPLDLARTKLAFQVNSSDELSRALKRGSPQPAYGGIIDVFRCVYSEGGVRALYRGVGPTLMGILPYAGLKFYIYEGLKVHVPEDYRSSVTLKLSCGAAAGLFGQTLTYPLDVVRRQMQVQNQQQHEQFGAPRITGTFQGLVSIKQTQGWKQLFAGLSLNYIKVVPSVAIGFTAYDTMKHLLKIPPREKNKV

SEQ ID NO: 12446 - protein, 302 aa, Zea mays subsp. mays
  peptide (1)..(302): Ceres Seq. ID no. 12351775
  misc_feature (1)..(301): Homolog of NCBI NO: 7527717 NR Description: T5E21.6 [Arabidopsis thaliana]
  misc_feature (1)..(299): Homolog of NCBI NO: 15236140 NR Description: mitochondrial carrier protein family; protein id: [Arabidopsis thaliana] >gi|7441723|pir||T04273 hypothetical
  misc_feature (96)..(299): Homolog of NCBI NO: 34910456 NR Description: P0456F08.3 [Oryza sativa (japonica
  misc_feature (1)..(295): Homolog of NCBI NO: 34394749 NR Description: putative mitochondrial carrier protein [Oryza
  misc_feature (155)..(301): Homolog of NCBI NO: 20260324 NR Description: putative mitochondrial carrier protein thaliana] >gi|22136184|gb|AAM91170.1| putative mitochondrial
  misc_feature (1)..(294): Homolog of NCBI NO: 27544933 NR Description: hypothetical protein MGC39851 [Homo sapiens]
  misc_feature (1)..(294): Homolog of NCBI NO: 28277902 NR Description: Similar to RIKEN cDNA 3110021G18 gene [Danio
  misc_feature (1)..(294): Homolog of NCBI NO: 30424808 NR Description: RIKEN cDNA 3110021G18 [Mus musculus]
  misc_feature (1)..(299): Homolog of NCBI NO: 20161078 NR Description: putative mitochondrial carrier [Oryza sativa
  misc_feature (1)..(301): Homolog of NCBI NO: 15223820 NR Description: mitochondrial carrier protein family; protein id:
MIAGGVAGAFSKTAIAPLERVKILLQTRTNEFGSLGVLKSLKKLRQLDGVMGFYKGNGASVMRIVPYAALHFMAYERYRCWILNNCPSLGTGPLVDLLAGSASGGTAVLCTYPLDLARTKLAFQVNSSDELSRALKRGSPQPAYGGIIDVFRCVYSEGGVRALYRGVGPTLMGILPYAGLKFYIYEGLKVHVPEDYRSSVTLKLSCGAAAGLFGQTLTYPLDVVRRQMQVQNQQQHEQFGAPRITGTFQGLVSIKQTQGWKQLFAGLSLNYIKVVPSVAIGFTAYDTMKHLLKIPPREKNKV

SEQ ID NO: 12447 - DNA, 1292 bp, Zea mays subsp. mays
  misc_feature (1)..(1292): Ceres Seq. ID no. 12341218
  misc_feature: MA Experiment ID: 108535 Result: Up-regulated in Transcription
  misc_feature: MA Experiment 108535 PARAMETER Experiment Name: Zm_Meristem_P Parameter: Age (day) Value: 8
  misc_feature: MA Experiment 108535 PARAMETER Experiment Name: Zm_Meristem_P Parameter: Organism Value: Zea mays
  misc_feature: MA Experiment 108535 PARAMETER Experiment Name: Zm_Meristem_P Parameter: Plant Line Value: 35A19
  misc_feature: MA Experiment 108535 PARAMETER Experiment Name: Zm_Meristem_P Parameter: Tissue Value: Root Meristem vs. Above Root Meristem
  misc_feature: MA Experiment ID: 20000535 Result: Up-regulated in Transcription
  misc_feature: MA Experiment 20000535 PARAMETER Experiment Name: Zm_Hybrid_Seed_Dev_P Parameter: DAP Value: 30 vs. 12
  misc_feature: MA Experiment 20000535 PARAMETER Experiment Name: Zm_Hybrid_Seed_Dev_P Parameter: Organism Value: Zea mays
  misc_feature: MA Experiment 20000535 PARAMETER Experiment Name: Zm_Hybrid_Seed_Dev_P Parameter: Plant Line Value: 35A19
  misc_feature: MA Experiment 20000535 PARAMETER Experiment Name: Zm_Hybrid_Seed_Dev_P Parameter: Tissue Value: Embryo vs. Unfert Floret
aatcctccgggaaccatttgcgcggctacgattcgctcctgcaactgcagcatagaaagtgacgtcgccgtcgccgcattcgcgccgccctgggctccgtccaactaccgttgcaaacccaggcttgcctgacaccagaagctgctcccctctccgatccagcggcgccctgttcgactgcggcggcggcggctaccatcccgatccggtggcgccccggccttgctcgattcctacagctgctatccttttctacctgcggcgccctgctccactctagtggctgctcccctcccaatctgagccccgagatgcctgagtccagggacggcaggagtgaggacctagctgacctttctggtggtgttggtggtggagggttctttatcaggagggtggcctcgccgggagccctagcggtgaggggtgtcaggaagccgttggcgcggcgttatatttcaccctcgaggaacaaggagaacctgctgccggtttgggcgttgagggtcacaccgacaaagaggagcccgcttcctggatggtaccccaggacgccgctccgtgatattacggccattgcaaaggctattcagagaagtcgttcaaggattgctgcagctcagcagcgaagccaaaggatcgagcagtcttcacaatctgtgaacgtgactactccagcacaagcagagcaggatgctcacattgctgaagcctcccatgctgttgcatctggctccggctcaactgaaagagaagctgtagcaaaccctgctactgttttggctgatgacaatttgaatgtgtcttctttgccagcagaaggctcattgaatactccatccaaaccaatggatcctgcccttgctgacaagaaactttccggttcaatagagaaggtagagaagttggtgaggaaaaacctgaagcgaacatcgagggctgcccaggcctccaggagggccacccaaaggcgcaatcttatgtccatgcgatgaatttattgctgtactttgctgggggaagagaaagtccacttcaggcttgtcctccttcctcttgtctgtgctgctcttcttccaatacttgccgtggcgtgatgctcacggccattccttgttcccttctcgaggacaagaatatggaagccattggctctctgcttgaggttctaggactgcagctactagtgtgaggtgtgatctggttcatgctattgctgatgtatgcatacttttctgtgtatccctgtgggccgttgaacaaataaaatctttaatttacttttctgccgc

SEQ ID NO: 12448 - protein, 227 aa, Zea mays subsp. mays
  peptide (1)..(227): Ceres Seq. ID no. 12341219
  misc_feature (1)..(227): Homolog of NCBI NO: 38344815 NR Description: OSJNBb0022F23.8 [Oryza sativa (japonica
  misc_feature (17)..(227): Homolog of NCBI NO: 15227912 NR Description: hypothetical protein; protein id: At2g42260.1
MPESRDGRSEDLADLSGGVGGGGFFIRRVASPGALAVRGVRKPLARRYISPSRNKENLLPVWALRVTPTKRSPLPGWYPRTPLRDITAIAKAIQRSRSRIAAAQQRSQRIEQSSQSVNVTTPAQAEQDAHIAEASHAVASGSGSTEREAVANPATVLADDNLNVSSLPAEGSLNTPSKPMDPALADKKLSGSIEKVEKLVRKNLKRTSRAAQASRRATQRRNLMSMR

SEQ ID NO: 12449 - DNA, 1418 bp, Zea mays subsp. mays; identical to SEQ ID NO: 9814
  misc_feature (1)..(1418): Ceres Seq. ID no. 12411535
  misc_feature: MA Experiment ID: 20000488 Result: Up-regulated in Transcription
  misc_feature: MA Experiment 20000488 PARAMETER Experiment Name: Zm_50mM_NH4NO3_L_to_H_P Parameter: Organism Value: Zea mays
  misc_feature: MA Experiment 20000488 PARAMETER Experiment Name: Zm_50mM_NH4NO3_L_to_H_P Parameter: Timepoint (hr) Value: 8
  misc_feature: MA Experiment 20000488 PARAMETER Experiment Name: Zm_50mM_NH4NO3_L_to_H_P Parameter: Tissue Value: Leaves
  misc_feature: MA Experiment 20000488 PARAMETER Experiment Name: Zm_50mM_NH4NO3_L_to_H_P Parameter: Treatment Value: 50mM NH4NO3 vs. 100mM Mannitol
  misc_feature: MA Experiment ID: 20000492 Result: Up-regulated in Transcription
  misc_feature: MA Experiment 20000492 PARAMETER Experiment Name: Zm_Hybrid_Seed_Dev_P Parameter: DAP Value: 12
  misc_feature: MA Experiment 20000492 PARAMETER Experiment Name: Zm_Hybrid_Seed_Dev_P Parameter: Organism Value: Zea mays
  misc_feature: MA Experiment 20000492 PARAMETER Experiment Name: Zm_Hybrid_Seed_Dev_P Parameter: Plant Line Value: 35A19
  misc_feature: MA Experiment 20000492 PARAMETER Experiment Name: Zm_Hybrid_Seed_Dev_P Parameter: Tissue Value: Fert Kernel vs. Unfert Floret

SEQ ID NO: 12450 - protein, 185 aa, Zea mays subsp. mays; identical to SEQ ID NO: 9815
  peptide (1)..(185): Ceres Seq. ID no. 12411536
  misc_feature (92)..(180): Pfam Name: Aspartate/ornithine carbamoyltransferase, Pfam Description: Aspartate/ornithine carbamoyltransferase,
  misc_feature (92)..(180): Pfam Name: Aspartate/ornithine carbamoyltransferase, Pfam Description: Aspartate/ornithine carbamoyltransferase,
  misc_feature (44)..(180): Homolog of NCBI NO: 9453916 NR Description: aspartate carbamoyl transferase [Oryza sativa
  misc_feature (90)..(180): Homolog of NCBI NO: 3914501 NR Description: Aspartate carbamoyltransferase 3, chloroplast (Aspartate transcarbamylase 3) (ATCase 3) >gi|7433584|pir||T06425
  misc_feature (90)..(180): Homolog of NCBI NO: 3914503 NR Description: Aspartate carbamoyltransferase 2, chloroplast (Aspartate transcarbamylase 2) (ATCase 2) >gi|7433605|pir||T10181
  misc_feature (91)..(180): Homolog of NCBI NO: 21535795 NR Description: aspartate carbamoyltransferase [Solanum tuberosum]
  misc_feature (91)..(180): Homolog of NCBI NO: 15231112 NR Description: aspartate carbamoyltransferase precursor transcarbamylase); protein id: At3g20330.1, supported by cDNA: supported by cDNA: gi_19699265 [Arabidopsis thaliana] chloroplast
  misc_feature (90)..(180): Homolog of NCBI NO: 3914501 NR Description: Aspartate carbamoyltransferase 3, chloroplast (Aspartate transcarbamylase 3) (ATCase 3) >gi|7433584|pir||T06425
  misc_feature (91)..(180): Homolog of NCBI NO: 21535795 NR Description: aspartate carbamoyltransferase [Solanum tuberosum]
  misc_feature (132)..(180): Homolog of NCBI NO: 397385 NR Description: aspartate carbamoyltransferase [Lycopersicon
  misc_feature (132)..(180): Homolog of NCBI NO: 479713 NR Description: aspartate carbamoyltransferase (EC 2.1.3.2) -
  misc_feature (91)..(180): Homolog of NCBI NO: 15215706 NR Description: AT3g20330/MQC12_8 [Arabidopsis thaliana]
  misc_feature (90)..(180): Homolog of NCBI NO: 3914502 NR Description: Aspartate carbamoyltransferase 1, chloroplast (Aspartate transcarbamylase 1) (ATCase 1) >gi|7433585|pir||T06484
  misc_feature (91)..(180): Homolog of NCBI NO: 1076293 NR Description: aspartate carbamoyltransferase (EC 2.1.3.2) - thaliana >gi|443820|emb|CAA50687.1| aspartate
  misc_feature (91)..(180): Homolog of NCBI NO: 15231112 NR Description: aspartate carbamoyltransferase precursor transcarbamylase); protein id: At3g20330.1, supported by cDNA: supported by cDNA: gi_19699265 [Arabidopsis thaliana] chloroplast
  misc_feature (90)..(180): Homolog of NCBI NO: 3914503 NR Description: Aspartate carbamoyltransferase 2, chloroplast (Aspartate transcarbamylase 2) (ATCase 2) >gi|7433605|pir||T10181
  misc_feature (44)..(180): Homolog of NCBI NO: 9453916 NR Description: aspartate carbamoyl transferase [Oryza sativa
  misc_feature (91)..(180): Homolog of NCBI NO: 1076293 NR Description: aspartate carbamoyltransferase (EC 2.1.3.2) - thaliana >gi|443820|emb|CAA50687.1| aspartate
  misc_feature (90)..(180): Homolog of NCBI NO: 3914502 NR Description: Aspartate carbamoyltransferase 1, chloroplast (Aspartate transcarbamylase 1) (ATCase 1) >gi|7433585|pir||T06484
  misc_feature (91)..(180): Homolog of NCBI NO: 15215706 NR Description: AT3g20330/MQC12_8 [Arabidopsis thaliana]
  misc_feature (132)..(180): Homolog of NCBI NO: 479713 NR Description: aspartate carbamoyltransferase (EC 2.1.3.2) -
  misc_feature (132)..(180): Homolog of NCBI NO: 397385 NR Description: aspartate carbamoyltransferase [Lycopersicon

SEQ ID NO: 12451 - protein, 116 aa, Zea mays subsp. mays; identical to SEQ ID NO: 9816
  peptide (1)..(116): Ceres Seq. ID no. 12411537
  misc_feature (1)..(113): Pfam Name: Aspartate/ornithine carbamoyltransferase, Pfam Description: Aspartate/ornithine carbamoyltransferase,
  misc_feature (1)..(113): Pfam Name: Aspartate/ornithine carbamoyltransferase, Pfam Description: Aspartate/ornithine carbamoyltransferase,
  misc_feature (1)..(115): Homolog of NCBI NO: 9453916 NR Description: aspartate carbamoyl transferase [Oryza sativa
  misc_feature (1)..(115): Homolog of NCBI NO: 3914501 NR Description: Aspartate carbamoyltransferase 3, chloroplast (Aspartate transcarbamylase 3) (ATCase 3) >gi|7433584|pir||T06425
  misc_feature (1)..(115): Homolog of NCBI NO: 3914503 NR Description: Aspartate carbamoyltransferase 2, chloroplast (Aspartate transcarbamylase 2) (ATCase 2) >gi|7433605|pir||T10181
  misc_feature (1)..(115): Homolog of NCBI NO: 21535795 NR Description: aspartate carbamoyltransferase [Solanum tuberosum]
  misc_feature (1)..(115): Homolog of NCBI NO: 15231112 NR Description: aspartate carbamoyltransferase precursor transcarbamylase); protein id: At3g20330.1, supported by cDNA: supported by cDNA: gi_19699265 [Arabidopsis thaliana] chloroplast
  misc_feature (1)..(115): Homolog of NCBI NO: 3914501 NR Description: Aspartate carbamoyltransferase 3, chloroplast (Aspartate transcarbamylase 3) (ATCase 3) >gi|7433584|pir||T06425
  misc_feature (1)..(115): Homolog of NCBI NO: 21535795 NR Description: aspartate carbamoyltransferase [Solanum tuberosum]
  misc_feature (1)..(115): Homolog of NCBI NO: 397385 NR Description: aspartate carbamoyltransferase [Lycopersicon
  misc_feature (1)..(115): Homolog of NCBI NO: 479713 NR Description: aspartate carbamoyltransferase (EC 2.1.3.2) -
  misc_feature (1)..(115): Homolog of NCBI NO: 15215706 NR Description: AT3g20330/MQC12_8 [Arabidopsis thaliana]
  misc_feature (1)..(115): Homolog of NCBI NO: 3914502 NR Description: Aspartate carbamoyltransferase 1, chloroplast (Aspartate transcarbamylase 1) (ATCase 1) >gi|7433585|pir||T06484
  misc_feature (1)..(115): Homolog of NCBI NO: 1076293 NR Description: aspartate carbamoyltransferase (EC 2.1.3.2) - thaliana >gi|443820|emb|CAA50687.1| aspartate
  misc_feature (1)..(115): Homolog of NCBI NO: 15231112 NR Description: aspartate carbamoyltransferase precursor transcarbamylase); protein id: At3g20330.1, supported by cDNA: supported by cDNA: gi_19699265 [Arabidopsis thaliana] chloroplast
  misc_feature (1)..(115): Homolog of NCBI NO: 3914503 NR Description: Aspartate carbamoyltransferase 2, chloroplast (Aspartate transcarbamylase 2) (ATCase 2) >gi|7433605|pir||T10181
  misc_feature (1)..(115): Homolog of NCBI NO: 9453916 NR Description: aspartate carbamoyl transferase [Oryza sativa
  misc_feature (1)..(115): Homolog of NCBI NO: 1076293 NR Description: aspartate carbamoyltransferase (EC 2.1.3.2) - thaliana >gi|443820|emb|CAA50687.1| aspartate
  misc_feature (1)..(115): Homolog of NCBI NO: 3914502 NR Description: Aspartate carbamoyltransferase 1, chloroplast (Aspartate transcarbamylase 1) (ATCase 1) >gi|7433585|pir||T06484
  misc_feature (1)..(115): Homolog of NCBI NO: 15215706 NR Description: AT3g20330/MQC12_8 [Arabidopsis thaliana]
  misc_feature (1)..(115): Homolog of NCBI NO: 479713 NR Description: aspartate carbamoyltransferase (EC 2.1.3.2) -
  misc_feature (1)..(115): Homolog of NCBI NO: 397385 NR Description: aspartate carbamoyltransferase [Lycopersicon

SEQ ID NO: 12452 - DNA, 1811 bp, Zea mays subsp. mays; identical to SEQ ID NO: 4035
  misc_feature (1)..(1811): Ceres Seq. ID no. 12423991
  misc_feature: MA Experiment ID: 108527 Result: Down-regulated in Transcription
  misc_feature: MA Experiment 108527 PARAMETER Experiment Name: Zm_5mM_NO_P Parameter: Age (day) Value: 8
  misc_feature: MA Experiment 108527 PARAMETER Experiment Name: Zm_5mM_NO_P Parameter: Organism Value: Zea mays
  misc_feature: MA Experiment 108527 PARAMETER Experiment Name: Zm_5mM_NO_P Parameter: Plant Line Value: 35A19
  misc_feature: MA Experiment 108527 PARAMETER Experiment Name: Zm_5mM_NO_P Parameter: Timepoint (hr) Value: 6
  misc_feature: MA Experiment 108527 PARAMETER Experiment Name: Zm_5mM_NO_P Parameter: Tissue Value: Aerial
  misc_feature: MA Experiment 108527 PARAMETER Experiment Name: Zm_5mM_NO_P Parameter: Treatment Value: 5mM NO vs. No Treatment
  misc_feature: MA Experiment ID: 108528 Result: Down-regulated in Transcription
  misc_feature: MA Experiment 108528 PARAMETER Experiment Name: Zm_Imbibed_Seeds_P Parameter: Age (day) Value: 5 vs. 2
  misc_feature: MA Experiment 108528 PARAMETER Experiment Name: Zm_Imbibed_Seeds_P Parameter: Organism Value: Zea mays
  misc_feature: MA Experiment 108528 PARAMETER Experiment Name: Zm_Imbibed_Seeds_P Parameter: Plant Line Value: 35A19
  misc_feature: MA Experiment 108528 PARAMETER Experiment Name: Zm_Imbibed_Seeds_P Parameter: Tissue Value: Aerial vs. Embryo
  misc_feature: MA Experiment ID: 108530 Result: Down-regulated in Transcription
  misc_feature: MA Experiment 108530 PARAMETER Experiment Name: Zm_Imbibed_Seeds_P Parameter: Age (day) Value: 6 vs. 2
  misc_feature: MA Experiment 108530 PARAMETER Experiment Name: Zm_Imbibed_Seeds_P Parameter: Organism Value: Zea mays
  misc_feature: MA Experiment 108530 PARAMETER Experiment Name: Zm_Imbibed_Seeds_P Parameter: Plant Line Value: 35A19
  misc_feature: MA Experiment 108530 PARAMETER Experiment Name: Zm_Imbibed_Seeds_P Parameter: Tissue Value: Aerial vs. Embryo
  misc_feature: MA Experiment ID: 108688 Result: Down-regulated in Transcription
  misc_feature: MA Experiment 108688 PARAMETER Experiment Name: Zm_Embryos-Flowers__P Parameter: Tissue Value: Immature Flowers vs. Aerial+
  misc_feature: MA Experiment ID: 108689 Result: Up-regulated in Transcription
  misc_feature: MA Experiment 108689 PARAMETER Experiment Name: Zm_Drought_Roots_P Parameter: Age (day) Value: 9
  misc_feature: MA Experiment 108689 PARAMETER Experiment Name: Zm_Drought_Roots_P Parameter: Organism Value: Zea mays
  misc_feature: MA Experiment 108689 PARAMETER Experiment Name: Zm_Drought_Roots_P Parameter: Plant Line Value: 35A19
  misc_feature: MA Experiment 108689 PARAMETER Experiment Name: Zm_Drought_Roots_P Parameter: Timepoint (hr) Value: 24
  misc_feature: MA Experiment 108689 PARAMETER Experiment Name: Zm_Drought_Roots_P Parameter: Tissue Value: Roots
  misc_feature: MA Experiment 108689 PARAMETER Experiment Name: Zm_Drought_Roots_P Parameter: Treatment Value: Drought vs. No Drought
  misc_feature: MA Experiment ID: 20000535 Result: Up-regulated in Transcription
  misc_feature: MA Experiment 20000535 PARAMETER Experiment Name: Zm_Hybrid_Seed_Dev_P Parameter: DAP Value: 30 vs. 12
  misc_feature: MA Experiment 20000535 PARAMETER Experiment Name: Zm_Hybrid_Seed_Dev_P Parameter: Organism Value: Zea mays
  misc_feature: MA Experiment 20000535 PARAMETER Experiment Name: Zm_Hybrid_Seed_Dev_P Parameter: Plant Line Value: 35A19
  misc_feature: MA Experiment 20000535 PARAMETER Experiment Name: Zm_Hybrid_Seed_Dev_P Parameter: Tissue Value: Embryo vs. Unfert Floret

SEQ ID NO: 12453 - protein, 568 aa, Zea mays subsp. mays; identical to SEQ ID NO: 4036
  peptide (1)..(568): Ceres Seq. ID no. 12423992
  misc_feature (278)..(568): Pfam Name: Enolase, C-terminal TIM barrel domain Pfam Description: Enolase, C-terminal TIM barrel domain
  misc_feature (140)..(568): Homolog of NCBI NO: 15221107 NR Description: putative enolase; protein id: At1g74030.1, by cDNA: gi_14334609, supported by cDNA: gi_17065639 [Arabidopsis
  misc_feature (139)..(568): Homolog of NCBI NO: 1169533 NR Description: Enolase (2-phosphoglycerate dehydratase)
  misc_feature (140)..(568): Homolog of NCBI NO: 119354 NR Description: Enolase (2-phosphoglycerate dehydratase)
  misc_feature (140)..(568): Homolog of NCBI NO: 17536383 NR Description: Enolase (46.6 kD) [Caenorhabditis elegans]
  misc_feature (140)..(568): Homolog of NCBI NO: 21392248 NR Description: SD23356p [Drosophila melanogaster]
  misc_feature (140)..(568): Homolog of NCBI NO: 24580914 NR Description: Enolase CG17654-PB >gi|24580916|ref|NP_722722.1|
  misc_feature (140)..(568): Homolog of NCBI NO: 8919731 NR Description: enolase [Spinacia oleracea]
  misc_feature (140)..(568): Homolog of NCBI NO: 119351 NR Description: Enolase (2-phosphoglycerate dehydratase)
  misc_feature (139)..(568): Homolog of NCBI NO: 105934 NR Description: phosphopyruvate hydratase (EC 4.2.1.11) beta -
  misc_feature (137)..(568): Homolog of NCBI NO: 1169534 NR Description: Enolase (2-phosphoglycerate dehydratase)

SEQ ID NO: 12454 - protein, 476 aa, Zea mays subsp. mays; identical to SEQ ID NO: 4037
  peptide (1)..(476): Ceres Seq. ID no. 12423993
  misc_feature (186)..(476): Pfam Name: Enolase, C-terminal TIM barrel domain Pfam Description: Enolase, C-terminal TIM barrel domain
  misc_feature (48)..(476): Homolog of NCBI NO: 15221107 NR Description: putative enolase; protein id: At1g74030.1, by cDNA: gi_14334609, supported by cDNA: gi_17065639 [Arabidopsis
  misc_feature (47)..(476): Homolog of NCBI NO: 1169533 NR Description: Enolase (2-phosphoglycerate dehydratase)
  misc_feature (48)..(476): Homolog of NCBI NO: 119354 NR Description: Enolase (2-phosphoglycerate dehydratase)
  misc_feature (48)..(476): Homolog of NCBI NO: 17536383 NR Description: Enolase (46.6 kD) [Caenorhabditis elegans]
  misc_feature (48)..(476): Homolog of NCBI NO: 21392248 NR Description: SD23356p [Drosophila melanogaster]
  misc_feature (48)..(476): Homolog of NCBI NO: 24580914 NR Description: Enolase CG17654-PB >gi|24580916|ref|NP_722722.1|
  misc_feature (48)..(476): Homolog of NCBI NO: 8919731 NR Description: enolase [Spinacia oleracea]
  misc_feature (48)..(476): Homolog of NCBI NO: 119351 NR Description: Enolase (2-phosphoglycerate dehydratase)
  misc_feature (47)..(476): Homolog of NCBI NO: 105934 NR Description: phosphopyruvate hydratase (EC 4.2.1.11) beta -
  misc_feature (45)..(476): Homolog of NCBI NO: 1169534 NR Description: Enolase (2-phosphoglycerate dehydratase)

SEQ ID NO: 12455 - protein, 339 aa, Zea mays subsp. mays; identical to SEQ ID NO: 4038
  peptide (1)..(339): Ceres Seq. ID no. 12423994
  misc_feature (49)..(339): Pfam Name: Enolase, C-terminal TIM barrel domain Pfam Description: Enolase, C-terminal TIM barrel domain
  misc_feature (1)..(339): Homolog of NCBI NO: 15221107 NR Description: putative enolase; protein id: At1g74030.1, by cDNA: gi_14334609, supported by cDNA: gi_17065639 [Arabidopsis
  misc_feature (1)..(339): Homolog of NCBI NO: 1169533 NR Description: Enolase (2-phosphoglycerate dehydratase)
  misc_feature (1)..(339): Homolog of NCBI NO: 119354 NR Description: Enolase (2-phosphoglycerate dehydratase)
  misc_feature (1)..(339): Homolog of NCBI NO: 17536383 NR Description: Enolase (46.6 kD) [Caenorhabditis elegans]
  misc_feature (1)..(339): Homolog of NCBI NO: 21392248 NR Description: SD23356p [Drosophila melanogaster]
  misc_feature (1)..(339): Homolog of NCBI NO: 24580914 NR Description: Enolase CG17654-PB >gi|24580916|ref|NP_722722.1|
  misc_feature (1)..(339): Homolog of NCBI NO: 8919731 NR Description: enolase [Spinacia oleracea]
  misc_feature (1)..(339): Homolog of NCBI NO: 119351 NR Description: Enolase (2-phosphoglycerate dehydratase)
  misc_feature (1)..(339): Homolog of NCBI NO: 105934 NR Description: phosphopyruvate hydratase (EC 4.2.1.11) beta -
  misc_feature (1)..(339): Homolog of NCBI NO: 1169534 NR Description: Enolase (2-phosphoglycerate dehydratase)

SEQ ID NO: 12456 - DNA, 981 bp, Zea mays subsp. mays
  misc_feature (1)..(981): Ceres Seq. ID no. 12414361
  misc_feature: MA Experiment ID: 108522 Result: Up-regulated in Transcription
  misc_feature: MA Experiment 108522 PARAMETER Experiment Name: Zm_42deg_Heat_P Parameter: Age (day) Value: 8
  misc_feature: MA Experiment 108522 PARAMETER Experiment Name: Zm_42deg_Heat_P Parameter: Organism Value: Zea mays
  misc_feature: MA Experiment 108522 PARAMETER Experiment Name: Zm_42deg_Heat_P Parameter: Plant Line Value: 35A19
  misc_feature: MA Experiment 108522 PARAMETER Experiment Name: Zm_42deg_Heat_P Parameter: Temperature (deg C) Value: 42 vs. 22
  misc_feature: MA Experiment 108522 PARAMETER Experiment Name: Zm_42deg_Heat_P Parameter: Timepoint (hr) Value: 1
  misc_feature: MA Experiment 108522 PARAMETER Experiment Name: Zm_42deg_Heat_P Parameter: Tissue Value: Aerial
  misc_feature: MA Experiment ID: 108523 Result: Up-regulated in Transcription
  misc_feature: MA Experiment 108523 PARAMETER Experiment Name: Zm_42deg_Heat_P Parameter: Age (day) Value: 8
  misc_feature: MA Experiment 108523 PARAMETER Experiment Name: Zm_42deg_Heat_P Parameter: Organism Value: Zea mays
  misc_feature: MA Experiment 108523 PARAMETER Experiment Name: Zm_42deg_Heat_P Parameter: Plant Line Value: 35A19
  misc_feature: MA Experiment 108523 PARAMETER Experiment Name: Zm_42deg_Heat_P Parameter: Temperature (deg C) Value: 42 vs. 22
  misc_feature: MA Experiment 108523 PARAMETER Experiment Name: Zm_42deg_Heat_P Parameter: Timepoint (hr) Value: 6
  misc_feature: MA Experiment 108523 PARAMETER Experiment Name: Zm_42deg_Heat_P Parameter: Tissue Value: Aerial
  misc_feature: MA Experiment ID: 108530 Result: Down-regulated in Transcription
  misc_feature: MA Experiment 108530 PARAMETER Experiment Name: Zm_Imbibed_Seeds_P Parameter: Age (day) Value: 6 vs. 2
  misc_feature: MA Experiment 108530 PARAMETER Experiment Name: Zm_Imbibed_Seeds_P Parameter: Organism Value: Zea mays
  misc_feature: MA Experiment 108530 PARAMETER Experiment Name: Zm_Imbibed_Seeds_P Parameter: Plant Line Value: 35A19
  misc_feature: MA Experiment 108530 PARAMETER Experiment Name: Zm_Imbibed_Seeds_P Parameter: Tissue Value: Aerial vs. Embryo
  misc_feature: MA Experiment ID: 20000488 Result: Up-regulated in Transcription
  misc_feature: MA Experiment 20000488 PARAMETER Experiment Name: Zm_50mM_NH4NO3_L_to_H_P Parameter: Organism Value: Zea mays
  misc_feature: MA Experiment 20000488 PARAMETER Experiment Name: Zm_50mM_NH4NO3_L_to_H_P Parameter: Timepoint (hr) Value: 8
  misc_feature: MA Experiment 20000488 PARAMETER Experiment Name: Zm_50mM_NH4NO3_L_to_H_P Parameter: Tissue Value: Leaves
  misc_feature: MA Experiment 20000488 PARAMETER Experiment Name: Zm_50mM_NH4NO3_L_to_H_P Parameter: Treatment Value: 50mM NH4NO3 vs. 100mM Mannitol
gttccctcgccatccgccgccgccgccatgccgggcttcgctcagcgtctcgcggggcatcccgtggcggagcatcgcgaggcaaggcctctcccgcgtgttcctggtggcgaaggcctactgcttgatccacgtcgtcaacgaccacctctgctcggtgaccttagtgcggggcgccagcatgctgccgtccctgaacctggcgggcgacgcggtggcggtggacagggtcagcgtgaggctcggccgggtcgcgccgggggacatcgtgctgatgatctcccccgaggacccgcgcaagtcggtcgtcaagcgcgtcgtcgggatgcagggggactccgtcacctaccttgtcgaccccggcaaaagcgactcctccagaaccgtcgtggtaccgcaagatcatgtctgggtgcagggtgacaatatctttgcttctaacgattcgaggcaatttggagctgtgccttatgggctgattacagggaagatcttttgccgggtttggccgccagagagttttggcgcaattgatgacgcaacgaagcagtcttaacgctgaggaggagccgaggagcacatggacccatattgtttgctcgcgcccagagattctatctataacatactgcaggggggcccttccttgagctcgagagctttcgacgacctaccgcagcgcatttctacagcgaagcaaagagcgttgtgtgtcttgattgatgtcccgtgtttttttatagttttggtgtgtgacaagttctgaaacccgtgtttttatagttttggtgtgtgacaggttccgagatagttttttttgttttgttttttggtgatagtgcaagcctgggtttgcaactacactacaacttcacatgcttattcgaaacatttgaactgatttgtcagtcctcgttttgcagaagggcgtgtttgtttgtttatccatgtccatgtcaaaacacacgacgattattgtcc

SEQ ID NO: 12457 - protein, 184 aa, Zea mays subsp. mays
  peptide (1)..(184): Ceres Seq. ID no. 12414362
  misc_feature (25)..(131): Pfam Name: Signal peptidase I Pfam Description: Signal peptidase I
  misc_feature (19)..(131): Homolog of NCBI NO: 23928440 NR Description: hypothetical protein [Zea mays]
  misc_feature (131)..(167): Homolog of NCBI NO: 23928440 NR Description: hypothetical protein [Zea mays]
  misc_feature (19)..(167): Homolog of NCBI NO: 22208508 NR Description: unknown protein [Sorghum bicolor]
  misc_feature (22)..(177): Homolog of NCBI NO: 30695525 NR Description: expressed protein [Arabidopsis thaliana]
  misc_feature (22)..(181): Homolog of NCBI NO: 25518432 NR Description: hypothetical protein F5O8.3 - Arabidopsis >gi|4056468|gb|AAC98041.1| Contains similarity to gb|X66426 from Persea americana and is a member of the signal peptidase
  misc_feature (22)..(167): Homolog of NCBI NO: 22329754 NR Description: polygalacturonase, putative; protein id:
  misc_feature (22)..(167): Homolog of NCBI NO: 15220621 NR Description: hypothetical protein; protein id: At1g29960.1
  misc_feature (22)..(154): Homolog of NCBI NO: 8778577 NR Description: F28C11.10 [Arabidopsis thaliana]
  misc_feature (26)..(169): Homolog of NCBI NO: 4680499 NR Description: hypothetical protein [Oryza sativa]
  misc_feature (29)..(170): Homolog of NCBI NO: 19113018 NR Description: putative mitochondrial membrane protease subunit [Schizosaccharomyces pombe] >gi|7522507|pir||T40110 probable
FPRHPPPPPCRASLSVSRGIPWRSIARQGLSRVFLVAKAYCLIHVVNDHLCSVTLVRGASMLPSLNLAGDAVAVDRVSVRLGRVAPGDIVLMISPEDPRKSVVKRVVGMQGDSVTYLVDPGKSDSSRTVVVPQDHVWVQGDNIFASNDSRQFGAVPYGLITGKIFCRVWPPESFGAIDDATKQS

SEQ ID NO: 12458 - protein, 140 aa, Zea mays subsp. mays
  peptide (1)..(140): Ceres Seq. ID no. 12414363
VPSPSAAAAMPGFAQRLAGHPVAEHREARPLPRVPGGEGLLLDPRRQRPPLLGDLSAGRQHAAVPEPGGRRGGGGQGQREARPGRAGGHRADDLPRGPAQVGRQARRRDAGGLRHLPCRPRQKRLLQNRRGTARSCLGAG

SEQ ID NO: 12459 - protein, 131 aa, Zea mays subsp. mays
  peptide (1)..(131): Ceres Seq. ID no. 12414364
MPGFAQRLAGHPVAEHREARPLPRVPGGEGLLLDPRRQRPPLLGDLSAGRQHAAVPEPGGRRGGGGQGQREARPGRAGGHRADDLPRGPAQVGRQARRRDAGGLRHLPCRPRQKRLLQNRRGTARSCLGAG

SEQ ID NO: 12460 - DNA, 1408 bp, Zea mays subsp. mays
  misc_feature (1)..(1408): Ceres Seq. ID no. 12414737
  misc_feature: MA Experiment ID: 108504 Result: Down-regulated in Transcription
  misc_feature: MA Experiment 108504 PARAMETER Experiment Name: Zm_Drought_P Parameter: Age (day) Value: 8
  misc_feature: MA Experiment 108504 PARAMETER Experiment Name: Zm_Drought_P Parameter: Organism Value: Zea mays
  misc_feature: MA Experiment 108504 PARAMETER Experiment Name: Zm_Drought_P Parameter: Plant Line Value: 35A19
  misc_feature: MA Experiment 108504 PARAMETER Experiment Name: Zm_Drought_P Parameter: Timepoint (hr) Value: 12
  misc_feature: MA Experiment 108504 PARAMETER Experiment Name: Zm_Drought_P Parameter: Tissue Value: Aerial
  misc_feature: MA Experiment 108504 PARAMETER Experiment Name: Zm_Drought_P Parameter: Treatment Value: Drought vs. No Drought
  misc_feature: MA Experiment ID: 108526 Result: Down-regulated in Transcription
  misc_feature: MA Experiment 108526 PARAMETER Experiment Name: Zm_5mM_NO_P Parameter: Age (day) Value: 8
  misc_feature: MA Experiment 108526 PARAMETER Experiment Name: Zm_5mM_NO_P Parameter: Organism Value: Zea mays
  misc_feature: MA Experiment 108526 PARAMETER Experiment Name: Zm_5mM_NO_P Parameter: Plant Line Value: 35A19
  misc_feature: MA Experiment 108526 PARAMETER Experiment Name: Zm_5mM_NO_P Parameter: Timepoint (hr) Value: 1
  misc_feature: MA Experiment 108526 PARAMETER Experiment Name: Zm_5mM_NO_P Parameter: Tissue Value: Aerial
  misc_feature: MA Experiment 108526 PARAMETER Experiment Name: Zm_5mM_NO_P Parameter: Treatment Value: 5mM NO vs. No Treatment
  misc_feature: MA Experiment ID: 108527 Result: Down-regulated in Transcription
  misc_feature: MA Experiment 108527 PARAMETER Experiment Name: Zm_5mM_NO_P Parameter: Age (day) Value: 8
  misc_feature: MA Experiment 108527 PARAMETER Experiment Name: Zm_5mM_NO_P Parameter: Organism Value: Zea mays
  misc_feature: MA Experiment 108527 PARAMETER Experiment Name: Zm_5mM_NO_P Parameter: Plant Line Value: 35A19
  misc_feature: MA Experiment 108527 PARAMETER Experiment Name: Zm_5mM_NO_P Parameter: Timepoint (hr) Value: 6
  misc_feature: MA Experiment 108527 PARAMETER Experiment Name: Zm_5mM_NO_P Parameter: Tissue Value: Aerial
  misc_feature: MA Experiment 108527 PARAMETER Experiment Name: Zm_5mM_NO_P Parameter: Treatment Value: 5mM NO vs. No Treatment
  misc_feature: MA Experiment ID: 108536 Result: Down-regulated in Transcription
  misc_feature: MA Experiment 108536 PARAMETER Experiment Name: Zm_Meristem_P Parameter: Age (day) Value: 8
  misc_feature: MA Experiment 108536 PARAMETER Experiment Name: Zm_Meristem_P Parameter: Organism Value: Zea mays
  misc_feature: MA Experiment 108536 PARAMETER Experiment Name: Zm_Meristem_P Parameter: Plant Line Value: 35A19
  misc_feature: MA Experiment 108536 PARAMETER Experiment Name: Zm_Meristem_P Parameter: Tissue Value: Shoot Meristem vs. Above Shoot Meristem
  misc_feature: MA Experiment ID: 108542 Result: Down-regulated in Transcription
  misc_feature: MA Experiment 108542 PARAMETER Experiment Name: Zm_150mM_NaCl_P Parameter: Age (day) Value: 8
  misc_feature: MA Experiment 108542 PARAMETER Experiment Name: Zm_150mM_NaCl_P Parameter: Organism Value: Zea mays
  misc_feature: MA Experiment 108542 PARAMETER Experiment Name: Zm_150mM_NaCl_P Parameter: Plant Line Value: 35A19
  misc_feature: MA Experiment 108542 PARAMETER Experiment Name: Zm_150mM_NaCl_P Parameter: Timepoint (hr) Value: 6
  misc_feature: MA Experiment 108542 PARAMETER Experiment Name: Zm_150mM_NaCl_P Parameter: Tissue Value: Aerial
  misc_feature: MA Experiment 108542 PARAMETER Experiment Name: Zm_150mM_NaCl_P Parameter: Treatment Value: 150mM NaCl vs. No Treatment
  misc_feature: MA Experiment ID: 108543 Result: Up-regulated in Transcription
  misc_feature: MA Experiment ID: 108545 Result: Down-regulated in Transcription
  misc_feature: MA Experiment 108545 PARAMETER Experiment Name: Zm_Imbibed_Seeds_P Parameter: Age (day) Value: 3 vs. 2
  misc_feature: MA Experiment 108545 PARAMETER Experiment Name: Zm_Imbibed_Seeds_P Parameter: Organism Value: Zea mays
  misc_feature: MA Experiment 108545 PARAMETER Experiment Name: Zm_Imbibed_Seeds_P Parameter: Plant Line Value: 35A19
  misc_feature: MA Experiment 108545 PARAMETER Experiment Name: Zm_Imbibed_Seeds_P Parameter: Tissue Value: Aerial vs. Embryo
  misc_feature: MA Experiment ID: 108556 Result: Down-regulated in Transcription
  misc_feature: MA Experiment 108556 PARAMETER Experiment Name: Zm_Drought_P Parameter: Age (day) Value: 9
  misc_feature: MA Experiment 108556 PARAMETER Experiment Name: Zm_Drought_P Parameter: Organism Value: Zea mays
  misc_feature: MA Experiment 108556 PARAMETER Experiment Name: Zm_Drought_P Parameter: Plant Line Value: 35A19
  misc_feature: MA Experiment 108556 PARAMETER Experiment Name: Zm_Drought_P Parameter: Timepoint (hr) Value: 24
  misc_feature: MA Experiment 108556 PARAMETER Experiment Name: Zm_Drought_P Parameter: Tissue Value: Aerial
  misc_feature: MA Experiment 108556 PARAMETER Experiment Name: Zm_Drought_P Parameter: Treatment Value: Drought vs. No Drought
  misc_feature: MA Experiment ID: 108559 Result: Down-regulated in Transcription
  misc_feature: MA Experiment 108559 PARAMETER Experiment Name: Zm_5mM_NO_P Parameter: Age (day) Value: 8
  misc_feature: MA Experiment 108559 PARAMETER Experiment Name: Zm_5mM_NO_P Parameter: Organism Value: Zea mays
  misc_feature: MA Experiment 108559 PARAMETER Experiment Name: Zm_5mM_NO_P Parameter: Plant Line Value: 35A19
  misc_feature: MA Experiment 108559 PARAMETER Experiment Name: Zm_5mM_NO_P Parameter: Timepoint (hr) Value: 12
  misc_feature: MA Experiment 108559 PARAMETER Experiment Name: Zm_5mM_NO_P Parameter: Tissue Value: Aerial
  misc_feature: MA Experiment 108559 PARAMETER Experiment Name: Zm_5mM_NO_P Parameter: Treatment Value: 5mM NO vs. No Treatment
  misc_feature: MA Experiment ID: 108687 Result: Down-regulated in Transcription
  misc_feature: MA Experiment 108687 PARAMETER Experiment Name: Zm_Embryos-Flowers__P Parameter: Tissue Value: Embryo vs. Aerial+
  misc_feature: MA Experiment ID: 20000480 Result: Down-regulated in Transcription
  misc_feature: MA Experiment 20000480 PARAMETER Experiment Name: Zm_Drought_P Parameter: Age (day) Value: 11
  misc_feature: MA Experiment 20000480 PARAMETER Experiment Name: Zm_Drought_P Parameter: Organism Value: Zea mays
  misc_feature: MA Experiment 20000480 PARAMETER Experiment Name: Zm_Drought_P Parameter: Plant Line Value: 35A19
  misc_feature: MA Experiment 20000480 PARAMETER Experiment Name: Zm_Drought_P Parameter: Timepoint (hr) Value: 72
  misc_feature: MA Experiment 20000480 PARAMETER Experiment Name: Zm_Drought_P Parameter: Tissue Value: Aerial
  misc_feature: MA Experiment 20000480 PARAMETER Experiment Name: Zm_Drought_P Parameter: Treatment Value: Drought vs. No Drought
  misc_feature: MA Experiment ID: 20000535 Result: Down-regulated in Transcription
  misc_feature: MA Experiment 20000535 PARAMETER Experiment Name: Zm_Hybrid_Seed_Dev_P Parameter: DAP Value: 30 vs. 12
  misc_feature: MA Experiment 20000535 PARAMETER Experiment Name: Zm_Hybrid_Seed_Dev_P Parameter: Organism Value: Zea mays
  misc_feature: MA Experiment 20000535 PARAMETER Experiment Name: Zm_Hybrid_Seed_Dev_P Parameter: Plant Line Value: 35A19
  misc_feature: MA Experiment 20000535 PARAMETER Experiment Name: Zm_Hybrid_Seed_Dev_P Parameter: Tissue Value: Embryo vs. Unfert Floret
  misc_feature: MA Experiment ID: 20000626 Result: Up-regulated in Transcription
  misc_feature: MA Experiment 20000626 PARAMETER Experiment Name: Zm_Herbicide-Treatments_P Parameter: Timepoint (hr) Value: 12
  misc_feature: MA Experiment 20000626 PARAMETER Experiment Name: Zm_Herbicide-Treatments_P Parameter: Tissue Value: Aerial
  misc_feature: MA Experiment 20000626 PARAMETER Experiment Name: Zm_Herbicide-Treatments_P Parameter: Treatment Value: Roundup vs. No Treatment
  misc_feature: MA Experiment ID: 20000629 Result: Up-regulated in Transcription
  misc_feature: MA Experiment 20000629 PARAMETER Experiment Name: Zm_Herbicide-Treatments_P Parameter: Timepoint (hr) Value: 12
  misc_feature: MA Experiment 20000629 PARAMETER Experiment Name: Zm_Herbicide-Treatments_P Parameter: Tissue Value: Aerial
  misc_feature: MA Experiment 20000629 PARAMETER Experiment Name: Zm_Herbicide-Treatments_P Parameter: Treatment Value: Trimec vs. No Treatment
aacgacctgcctgccttgctcttgccctgtgagcagcggcgtgcgatcgatcgaggcagtcgtagtaataagccaacaaacaaaccggccggaacgccatgctggaggagtacaaaccgtgtgcggccatggtggtgacgcagtgcatctacgccgctctagcgctcttgtccaaggcggcgttcaccggcggcatgagccccctggtgttcgtcgtctacaggcaggccgtcgccaccattgtactcgtccccgtcgtcatcgcggccaacaggaagaagatgaaggagatgacgacgggccttggactgacgggcttctcgctggtcttcgtcgcctcccttgtcgggggcaacggtgaaccagtgcatgtactaccaaggggtgaatctgggctcgtcgtcgatggcaacggccatgaccaacttgatccccgccatcaccttcgtcatggcggcatcagtcggcctagagagggtggaggccaggaggccgaggagcctggccaagatcttcggcacggccgtctgcgtgagcggcgccatggccatggctttcttcaagggcccgaagctgctcggcgacggcccgaacgctctccagctcctcctccacgcgggcggcggcggcaggtgggtggccggcgcgctcttcctcgtgggcagcagctcctgctggtcgctctggctcatcctgcaggtgcccatctgcaagtcgtacgtggagccgctggctctgtcggcgtggatgtgcgtcctgtccacgctccagtccgcgctgctcgtctccttcctcctgccggaccccagcgcctggaggatccactcgctcttcgagctctcctgctgcgtcttctcgggcgtgttcgggtccggcgtcacgttctacctgcagtcgtggtgcatctccgtgaggggcccgctctactccgccatgttcaacccgctctgcaccgtgatcaccaccgtgttcgccgccgccgtcctccgcgaagagctgcacgtcggcagcttgctgggcgcgatcgccgtcatcgcggggctgtacgtggtgctgtggggcaaagcgggcgacgccaacaagggcggggtggagccagagcaccactcggacgatctggagaagacgtcatcagcgcggtcggatcccaattcgacggccggcgtcggcagtggcatcgccgagcccctcctggcgggcggcgatccaacggagaagtagatgggattttgctgctcttcaagtgttctgtgcgtgcgcgcgcggtgttttcagggtcggtatgctagtgctactgtaacagtgccgtcccagttttgtcatgtacactagtggcagcttcaaatgactccgtgctgccgatgtgtattatccgcacaattttgttaagcaacgcggcgtccccgtc

SEQ ID NO: 12461 - protein, 396 aa, Zea mays subsp. mays
  peptide (1)..(396): Ceres Seq. ID no. 12414738
  misc_feature (10)..(84): Homolog of NCBI NO: 15234742 NR Description: nodulin-like protein; protein id: At4g30420.1
  misc_feature (2)..(84): Homolog of NCBI NO: 15234371 NR Description: Medicago nodulin N21-like protein; protein id: supported by cDNA: gi_13899060, supported by cDNA: gi_20148374 thaliana] >gi|7486954|pir||T02905 hypothetical protein
  misc_feature (1)..(90): Homolog of NCBI NO: 28932880 NR Description: nodulin-like protein [Gossypium hirsutum]
  misc_feature (1)..(90): Homolog of NCBI NO: 28932732 NR Description: putative nodulin protein [Gossypium hirsutum]
  misc_feature (1)..(86): Homolog of NCBI NO: 30680708 NR Description: nodulin MtN21 family protein [Arabidopsis
  misc_feature (2)..(86): Homolog of NCBI NO: 7486870 NR Description: hypothetical protein T12G13.140 - Arabidopsis
  misc_feature (2)..(81): Homolog of NCBI NO: 34894436 NR Description: putative CAA303720.1 protein [Oryza sativa
  misc_feature (10)..(79): Homolog of NCBI NO: 18410867 NR Description: nodulin-like protein; protein id: At1g75500.1, by cDNA: gi_15028078, supported by cDNA: gi_20259306 [Arabidopsis >gi|15028079|gb|AAK76570.1| putative nodulin protein nodulin
  misc_feature (1)..(69): Homolog of NCBI NO: 15219448 NR Description: nodulin protein, putative; protein id: supported by cDNA: 149985., supported by cDNA: gi_15146329
  misc_feature (1)..(82): Homolog of NCBI NO: 34894456 NR Description: putative MtN21 [Oryza sativa (japonica
MLEEYKPCAAMVVTQCIYAALALLSKAAFTGGMSPLVFVVYRQAVATIVLVPVVIAANRKKMKEMTTGLGLTGFSLVFVASLVGGNGEPVHVLPRGESGLVVDGNGHDQLDPRHHLRHGGISRPREGGGQEAEEPGQDLRHGRLRERRHGHGFLQGPEAARRRPERSPAPPPRGRRRQVGGRRALPRGQQLLLVALAHPAGAHLQVVRGAAGSVGVDVRPVHAPVRAARLLPPAGPQRLEDPLALRALLLRLLGRVRVRRHVLPAVVVHLREGPALLRHVQPALHRDHHRVRRRRPPRRAARRQLAGRDRRHRGAVRGAVGQSGRRQQGRGGARAPLGRSGEDVISAVGSQFDGRRRQWHRRAPPGGRRSNGEVDGILLLFKCSVRARAVFSGSVC

SEQ ID NO: 12462 - protein, 386 aa, Zea mays subsp. mays
  peptide (1)..(386): Ceres Seq. ID no. 12414739
  misc_feature (1)..(74): Homolog of NCBI NO: 15234742 NR Description: nodulin-like protein; protein id: At4g30420.1
  misc_feature (1)..(74): Homolog of NCBI NO: 15234371 NR Description: Medicago nodulin N21-like protein; protein id: supported by cDNA: gi_13899060, supported by cDNA: gi_20148374 thaliana] >gi|7486954|pir||T02905 hypothetical protein
  misc_feature (1)..(80): Homolog of NCBI NO: 28932880 NR Description: nodulin-like protein [Gossypium hirsutum]
  misc_feature (1)..(80): Homolog of NCBI NO: 28932732 NR Description: putative nodulin protein [Gossypium hirsutum]
  misc_feature (1)..(76): Homolog of NCBI NO: 30680708 NR Description: nodulin MtN21 family protein [Arabidopsis
  misc_feature (1)..(76): Homolog of NCBI NO: 7486870 NR Description: hypothetical protein T12G13.140 - Arabidopsis
  misc_feature (1)..(71): Homolog of NCBI NO: 34894436 NR Description: putative CAA303720.1 protein [Oryza sativa
  misc_feature (1)..(69): Homolog of NCBI NO: 18410867 NR Description: nodulin-like protein; protein id: At1g75500.1, by cDNA: gi_15028078, supported by cDNA: gi_20259306 [Arabidopsis >gi|15028079|gb|AAK76570.1| putative nodulin protein nodulin
  misc_feature (1)..(59): Homolog of NCBI NO: 15219448 NR Description: nodulin protein, putative; protein id: supported by cDNA: 149985., supported by cDNA: gi_15146329
  misc_feature (1)..(72): Homolog of NCBI NO: 34894456 NR Description: putative MtN21 [Oryza sativa (japonica
MVVTQCIYAALALLSKAAFTGGMSPLVFVVYRQAVATIVLVPVVIAANRKKMKEMTTGLGLTGFSLVFVASLVGGNGEPVHVLPRGESGLVVDGNGHDQLDPRHHLRHGGISRPREGGGQEAEEPGQDLRHGRLRERRHGHGFLQGPEAARRRPERSPAPPPRGRRRQVGGRRALPRGQQLLLVALAHPAGAHLQVVRGAAGSVGVDVRPVHAPVRAARLLPPAGPQRLEDPLALRALLLRLLGRVRVRRHVLPAVVVHLREGPALLRHVQPALHRDHHRVRRRRPPRRAARRQLAGRDRRHRGAVRGAVGQSGRRQQGRGGARAPLGRSGEDVISAVGSQFDGRRRQWHRRAPPGGRRSNGEVDGILLLFKCSVRARAVFSGSVC

SEQ ID NO: 12463 - protein, 364 aa, Zea mays subsp. mays
  peptide (1)..(364): Ceres Seq. ID no. 12414740
  misc_feature (1)..(52): Homolog of NCBI NO: 15234742 NR Description: nodulin-like protein; protein id: At4g30420.1
  misc_feature (1)..(52): Homolog of NCBI NO: 15234371 NR Description: Medicago nodulin N21-like protein; protein id: supported by cDNA: gi_13899060, supported by cDNA: gi_20148374 thaliana] >gi|7486954|pir||T02905 hypothetical protein
  misc_feature (1)..(58): Homolog of NCBI NO: 28932880 NR Description: nodulin-like protein [Gossypium hirsutum]
  misc_feature (1)..(58): Homolog of NCBI NO: 28932732 NR Description: putative nodulin protein [Gossypium hirsutum]
  misc_feature (1)..(54): Homolog of NCBI NO: 30680708 NR Description: nodulin MtN21 family protein [Arabidopsis
  misc_feature (1)..(54): Homolog of NCBI NO: 7486870 NR Description: hypothetical protein T12G13.140 - Arabidopsis
  misc_feature (1)..(49): Homolog of NCBI NO: 34894436 NR Description: putative CAA303720.1 protein [Oryza sativa
  misc_feature (1)..(47): Homolog of NCBI NO: 18410867 NR Description: nodulin-like protein; protein id: At1g75500.1, by cDNA: gi_15028078, supported by cDNA: gi_20259306 [Arabidopsis >gi|15028079|gb|AAK76570.1| putative nodulin protein nodulin
  misc_feature (1)..(37): Homolog of NCBI NO: 15219448 NR Description: nodulin protein, putative; protein id: supported by cDNA: 149985., supported by cDNA: gi_15146329
  misc_feature (1)..(50): Homolog of NCBI NO: 34894456 NR Description: putative MtN21 [Oryza sativa (japonica
MSPLVFVVYRQAVATIVLVPVVIAANRKKMKEMTTGLGLTGFSLVFVASLVGGNGEPVHVLPRGESGLVVDGNGHDQLDPRHHLRHGGISRPREGGGQEAEEPGQDLRHGRLRERRHGHGFLQGPEAARRRPERSPAPPPRGRRRQVGGRRALPRGQQLLLVALAHPAGAHLQVVRGAAGSVGVDVRPVHAPVRAARLLPPAGPQRLEDPLALRALLLRLLGRVRVRRHVLPAVVVHLREGPALLRHVQPALHRDHHRVRRRRPPRRAARRQLAGRDRRHRGAVRGAVGQSGRRQQGRGGARAPLGRSGEDVISAVGSQFDGRRRQWHRRAPPGGRRSNGEVDGILLLFKCSVRARAVFSGSVC

SEQ ID NO: 12464 - protein, 283 aa, Zea mays subsp. mays
  peptide (1)..(283): Ceres Seq. ID no. 12414741
  misc_feature (102)..(230): Pfam Name: Integral membrane protein DUF6 Pfam Description: Integral membrane protein DUF6
  misc_feature (1)..(283): Homolog of NCBI NO: 15234742 NR Description: nodulin-like protein; protein id: At4g30420.1
  misc_feature (1)..(275): Homolog of NCBI NO: 15234371 NR Description: Medicago nodulin N21-like protein; protein id: supported by cDNA: gi_13899060, supported by cDNA: gi_20148374 thaliana] >gi|7486954|pir||T02905 hypothetical protein
  misc_feature (1)..(232): Homolog of NCBI NO: 28932880 NR Description: nodulin-like protein [Gossypium hirsutum]
  misc_feature (1)..(232): Homolog of NCBI NO: 28932732 NR Description: putative nodulin protein [Gossypium hirsutum]
  misc_feature (1)..(235): Homolog of NCBI NO: 30680708 NR Description: nodulin MtN21 family protein [Arabidopsis
  misc_feature (1)..(235): Homolog of NCBI NO: 7486870 NR Description: hypothetical protein T12G13.140 - Arabidopsis
  misc_feature (1)..(241): Homolog of NCBI NO: 34894436 NR Description: putative CAA303720.1 protein [Oryza sativa
  misc_feature (1)..(275): Homolog of NCBI NO: 18410867 NR Description: nodulin-like protein; protein id: At1g75500.1, by cDNA: gi_15028078, supported by cDNA: gi_20259306 [Arabidopsis >gi|15028079|gb|AAK76570.1| putative nodulin protein nodulin
  misc_feature (1)..(235): Homolog of NCBI NO: 15219448 NR Description: nodulin protein, putative; protein id: supported by cDNA: 149985., supported by cDNA: gi_15146329
  misc_feature (1)..(233): Homolog of NCBI NO: 34894456 NR Description: putative MtN21 [Oryza sativa (japonica
MYYQGVNLGSSSMATAMTNLIPAITFVMAASVGLERVEARRPRSLAKIFGTAVCVSGAMAMAFFKGPKLLGDGPNALQLLLHAGGGGRWVAGALFLVGSSSCWSLWLILQVPICKSYVEPLALSAWMCVLSTLQSALLVSFLLPDPSAWRIHSLFELSCCVFSGVFGSGVTFYLQSWCISVRGPLYSAMFNPLCTVITTVFAAAVLREELHVGSLLGAIAVIAGLYVVLWGKAGDANKGGVEPEHHSDDLEKTSSARSDPNSTAGVGSGIAEPLLAGGDPTEK

SEQ ID NO: 12465 - DNA, 472 bp, Zea mays subsp. mays
  misc_feature (1)..(472): Ceres Seq. ID no. 12403917
  misc_feature: MA Experiment ID: 108515 Result: Down-regulated in Transcription
  misc_feature: MA Experiment 108515 PARAMETER Experiment Name: Zm_2mM_SA_P Parameter: Age (day) Value: 8
  misc_feature: MA Experiment 108515 PARAMETER Experiment Name: Zm_2mM_SA_P Parameter: Organism Value: Zea mays
  misc_feature: MA Experiment 108515 PARAMETER Experiment Name: Zm_2mM_SA_P Parameter: Plant Line Value: 35A19
  misc_feature: MA Experiment 108515 PARAMETER Experiment Name: Zm_2mM_SA_P Parameter: Timepoint (hr) Value: 12
  misc_feature: MA Experiment 108515 PARAMETER Experiment Name: Zm_2mM_SA_P Parameter: Tissue Value: Aerial
  misc_feature: MA Experiment 108515 PARAMETER Experiment Name: Zm_2mM_SA_P Parameter: Treatment Value: 2mM SA vs. No Treatment
  misc_feature: MA Experiment ID: 108532 Result: Up-regulated in Transcription
  misc_feature: MA Experiment 108532 PARAMETER Experiment Name: Zm_20uM_KNO3_H-to-L_P Parameter: Age (day) Value: 11
  misc_feature: MA Experiment 108532 PARAMETER Experiment Name: Zm_20uM_KNO3_H-to-L_P Parameter: Organism Value: Zea mays
  misc_feature: MA Experiment 108532 PARAMETER Experiment Name: Zm_20uM_KNO3_H-to-L_P Parameter: Plant Line Value: 35A19
  misc_feature: MA Experiment 108532 PARAMETER Experiment Name: Zm_20uM_KNO3_H-to-L_P Parameter: Timepoint (hr) Value: 16
  misc_feature: MA Experiment 108532 PARAMETER Experiment Name: Zm_20uM_KNO3_H-to-L_P Parameter: Tissue Value: Roots
  misc_feature: MA Experiment 108532 PARAMETER Experiment Name: Zm_20uM_KNO3_H-to-L_P Parameter: Treatment Value: 20uM KNO3 vs. 60mM KNO3
  misc_feature: MA Experiment ID: 108535 Result: Down-regulated in Transcription
  misc_feature: MA Experiment 108535 PARAMETER Experiment Name: Zm_Meristem_P Parameter: Age (day) Value: 8
  misc_feature: MA Experiment 108535 PARAMETER Experiment Name: Zm_Meristem_P Parameter: Organism Value: Zea mays
  misc_feature: MA Experiment 108535 PARAMETER Experiment Name: Zm_Meristem_P Parameter: Plant Line Value: 35A19
  misc_feature: MA Experiment 108535 PARAMETER Experiment Name: Zm_Meristem_P Parameter: Tissue Value: Root Meristem vs. Above Root Meristem
  misc_feature: MA Experiment ID: 108536 Result: Up-regulated in Transcription
  misc_feature: MA Experiment 108536 PARAMETER Experiment Name: Zm_Meristem_P Parameter: Age (day) Value: 8
  misc_feature: MA Experiment 108536 PARAMETER Experiment Name: Zm_Meristem_P Parameter: Organism Value: Zea mays
  misc_feature: MA Experiment 108536 PARAMETER Experiment Name: Zm_Meristem_P Parameter: Plant Line Value: 35A19
  misc_feature: MA Experiment 108536 PARAMETER Experiment Name: Zm_Meristem_P Parameter: Tissue Value: Shoot Meristem vs. Above Shoot Meristem
  misc_feature: MA Experiment ID: 108543 Result: Up-regulated in Transcription
  misc_feature: MA Experiment ID: 108544 Result: Up-regulated in Transcription
  misc_feature: MA Experiment ID: 108545 Result: Down-regulated in Transcription
  misc_feature: MA Experiment 108545 PARAMETER Experiment Name: Zm_Imbibed_Seeds_P Parameter: Age (day) Value: 3 vs. 2
  misc_feature: MA Experiment 108545 PARAMETER Experiment Name: Zm_Imbibed_Seeds_P Parameter: Organism Value: Zea mays
  misc_feature: MA Experiment 108545 PARAMETER Experiment Name: Zm_Imbibed_Seeds_P Parameter: Plant Line Value: 35A19
  misc_feature: MA Experiment 108545 PARAMETER Experiment Name: Zm_Imbibed_Seeds_P Parameter: Tissue Value: Aerial vs. Embryo
  misc_feature: MA Experiment ID: 20000108 Result: Down-regulated in Transcription
  misc_feature: MA Experiment 20000108 PARAMETER Experiment Name: Zm_Root-Tips_P Parameter: Age (day) Value: 12
  misc_feature: MA Experiment 20000108 PARAMETER Experiment Name: Zm_Root-Tips_P Parameter: Organism Value: Zea mays
  misc_feature: MA Experiment 20000108 PARAMETER Experiment Name: Zm_Root-Tips_P Parameter: Tissue Value: Root tips vs. Root mid region    35
  misc_feature: MA Experiment 20000108 PARAMETER Experiment Name: Zm_Root-Tips_P Parameter: Tissue Value: Root tips vs. Root mid region   Sequence Listing-Misc Features (4)
  misc_feature: MA Experiment ID: 20000480 Result: Up-regulated in Transcription
  misc_feature: MA Experiment 20000480 PARAMETER Experiment Name: Zm_Drought_P Parameter: Age (day) Value: 11
  misc_feature: MA Experiment 20000480 PARAMETER Experiment Name: Zm_Drought_P Parameter: Organism Value: Zea mays
  misc_feature: MA Experiment 20000480 PARAMETER Experiment Name: Zm_Drought_P Parameter: Plant Line Value: 35A19
  misc_feature: MA Experiment 20000480 PARAMETER Experiment Name: Zm_Drought_P Parameter: Timepoint (hr) Value: 72
  misc_feature: MA Experiment 20000480 PARAMETER Experiment Name: Zm_Drought_P Parameter: Tissue Value: Aerial
  misc_feature: MA Experiment 20000480 PARAMETER Experiment Name: Zm_Drought_P Parameter: Treatment Value: Drought vs. No Drought
  misc_feature: MA Experiment ID: 20000535 Result: Down-regulated in Transcription
  misc_feature: MA Experiment 20000535 PARAMETER Experiment Name: Zm_Hybrid_Seed_Dev_P Parameter: DAP Value: 30 vs. 12
  misc_feature: MA Experiment 20000535 PARAMETER Experiment Name: Zm_Hybrid_Seed_Dev_P Parameter: Organism Value: Zea mays
  misc_feature: MA Experiment 20000535 PARAMETER Experiment Name: Zm_Hybrid_Seed_Dev_P Parameter: Plant Line Value: 35A19
  misc_feature: MA Experiment 20000535 PARAMETER Experiment Name: Zm_Hybrid_Seed_Dev_P Parameter: Tissue Value: Embryo vs. Unfert Floret
aaacccatcgcagggcattctcgagcatagcttctctgcctctctctcccctcctctcctctcgtccactcctttgtccaaagcttcgagatggctcagcagcagaaggtggtggtcagggttccaaccatgacagatgacaagatcaagcagaaggccatcgaagctgttgcggacatttacggtattgactccatagcagcggatctgaaggagaacaagatgaccatcataggcgagatggatgcagtagcgattgccaagaagttaaagaagattggaaagattgacattgtgtctgttggacctgcaaaagaagaaaagaaggaagaaaagaaagaggagaaaaaggaggaaaagaaagaagagaagaaagaggagaagaaagaagagaagaaagaagagaagaaagaagaaaagaagtgataaacctataaaacatatatatcatcgcatggcctcacttatctcc

SEQ ID NO: 12466 - protein, 111 aa, Zea mays subsp. mays
  peptide (1)..(111): Ceres Seq. ID no. 12403918
  misc_feature (1)..(111): Pfam Name: Ubiquitin carboxyl-terminal hydrolase Pfam Description: Ubiquitin carboxyl-terminal hydrolase
  misc_feature (5)..(111): Homolog of NCBI NO: 13543783 NR Description: Unknown (protein for MGC:7642) [Mus musculus]
  misc_feature (1)..(107): Homolog of NCBI NO: 37535864 NR Description: hypothetical protein [Oryza sativa (japonica group)] >gi|22758342|gb|AAN05546.1| hypothetical protein [Oryza
  misc_feature (5)..(107): Homolog of NCBI NO: 21554550 NR Description: unknown [Arabidopsis thaliana]
  misc_feature (5)..(107): Homolog of NCBI NO: 26452654 NR Description: unknown protein [Arabidopsis thaliana]
  misc_feature (5)..(107): Homolog of NCBI NO: 18420713 NR Description: expressed protein; protein id: At5g23760.1,
  misc_feature (40)..(107): Homolog of NCBI NO: 10176843 NR Description: gene_id:MRO11.20~unknown protein [Arabidopsis
MAQQQKVVVRVPTMTDDKIKQKAIEAVADIYGIDSIAADLKENKMTIIGEMDAVAIAKKLKKIGKIDIVSVGPAKEEKKEEKKEEKKEEKKEEKKEEKKEEKKEEKKEEKK

SEQ ID NO: 12467 - protein, 98 aa, Zea mays subsp. mays
  peptide (1)..(98): Ceres Seq. ID no. 12403919
  misc_feature (1)..(98): Pfam Name: Ubiquitin carboxyl-terminal hydrolase Pfam Description: Ubiquitin carboxyl-terminal hydrolase
  misc_feature (1)..(94): Homolog of NCBI NO: 37535864 NR Description: hypothetical protein [Oryza sativa (japonica group)] >gi|22758342|gb|AAN05546.1| hypothetical protein [Oryza
  misc_feature (1)..(94): Homolog of NCBI NO: 18420713 NR Description: expressed protein; protein id: At5g23760.1,
  misc_feature (1)..(94): Homolog of NCBI NO: 21554550 NR Description: unknown [Arabidopsis thaliana]
  misc_feature (1)..(94): Homolog of NCBI NO: 26452654 NR Description: unknown protein [Arabidopsis thaliana]
  misc_feature (1)..(98): Homolog of NCBI NO: 13543783 NR Description: Unknown (protein for MGC:7642) [Mus musculus]
  misc_feature (27)..(94): Homolog of NCBI NO: 10176843 NR Description: gene_id:MRO11.20~unknown protein [Arabidopsis
MTDDKIKQKAIEAVADIYGIDSIAADLKENKMTIIGEMDAVAIAKKLKKIGKIDIVSVGPAKEEKKEEKKEEKKEEKKEEKKEEKKEEKKEEKKEEKK

SEQ ID NO: 12468 - protein, 67 aa, Zea mays subsp. mays
  peptide (1)..(67): Ceres Seq. ID no. 12403920
  misc_feature (1)..(67): Pfam Name: Ubiquitin carboxyl-terminal hydrolase Pfam Description: Ubiquitin carboxyl-terminal hydrolase
  misc_feature (1)..(63): Homolog of NCBI NO: 37535864 NR Description: hypothetical protein [Oryza sativa (japonica group)] >gi|22758342|gb|AAN05546.1| hypothetical protein [Oryza
  misc_feature (1)..(63): Homolog of NCBI NO: 18420713 NR Description: expressed protein; protein id: At5g23760.1,
  misc_feature (1)..(63): Homolog of NCBI NO: 21554550 NR Description: unknown [Arabidopsis thaliana]
  misc_feature (1)..(63): Homolog of NCBI NO: 26452654 NR Description: unknown protein [Arabidopsis thaliana]
  misc_feature (1)..(67): Homolog of NCBI NO: 13543783 NR Description: Unknown (protein for MGC:7642) [Mus musculus]
  misc_feature (1)..(63): Homolog of NCBI NO: 10176843 NR Description: gene_id:MRO11.20~unknown protein [Arabidopsis
MTIIGEMDAVAIAKKLKKIGKIDIVSVGPAKEEKKEEKKEEKKEEKKEEKKEEKKEEKKEEKKEEKK

SEQ ID NO: 12469 - DNA, 729 bp, Zea mays subsp. mays
  misc_feature (1)..(729): Ceres Seq. ID no. 12404622
  misc_feature: MA Experiment ID: 108528 Result: Up-regulated in Transcription
  misc_feature: MA Experiment 108528 PARAMETER Experiment Name: Zm_Imbibed_Seeds_P Parameter: Age (day) Value: 5 vs. 2
  misc_feature: MA Experiment 108528 PARAMETER Experiment Name: Zm_Imbibed_Seeds_P Parameter: Organism Value: Zea mays
  misc_feature: MA Experiment 108528 PARAMETER Experiment Name: Zm_Imbibed_Seeds_P Parameter: Plant Line Value: 35A19
  misc_feature: MA Experiment 108528 PARAMETER Experiment Name: Zm_Imbibed_Seeds_P Parameter: Tissue Value: Aerial vs. Embryo
  misc_feature: MA Experiment ID: 108529 Result: Down-regulated in Transcription
  misc_feature: MA Experiment 108529 PARAMETER Experiment Name: Zm_Imbibed_Seeds_P Parameter: Age (day) Value: 5 vs. 2
  misc_feature: MA Experiment 108529 PARAMETER Experiment Name: Zm_Imbibed_Seeds_P Parameter: Organism Value: Zea mays
  misc_feature: MA Experiment 108529 PARAMETER Experiment Name: Zm_Imbibed_Seeds_P Parameter: Plant Line Value: 35A19
  misc_feature: MA Experiment 108529 PARAMETER Experiment Name: Zm_Imbibed_Seeds_P Parameter: Tissue Value: Roots vs. Embryo
  misc_feature: MA Experiment ID: 108530 Result: Up-regulated in Transcription
  misc_feature: MA Experiment 108530 PARAMETER Experiment Name: Zm_Imbibed_Seeds_P Parameter: Age (day) Value: 6 vs. 2
  misc_feature: MA Experiment 108530 PARAMETER Experiment Name: Zm_Imbibed_Seeds_P Parameter: Organism Value: Zea mays
  misc_feature: MA Experiment 108530 PARAMETER Experiment Name: Zm_Imbibed_Seeds_P Parameter: Plant Line Value: 35A19
  misc_feature: MA Experiment 108530 PARAMETER Experiment Name: Zm_Imbibed_Seeds_P Parameter: Tissue Value: Aerial vs. Embryo
  misc_feature: MA Experiment ID: 108535 Result: Down-regulated in Transcription
  misc_feature: MA Experiment 108535 PARAMETER Experiment Name: Zm_Meristem_P Parameter: Age (day) Value: 8
  misc_feature: MA Experiment 108535 PARAMETER Experiment Name: Zm_Meristem_P Parameter: Organism Value: Zea mays
  misc_feature: MA Experiment 108535 PARAMETER Experiment Name: Zm_Meristem_P Parameter: Plant Line Value: 35A19
  misc_feature: MA Experiment 108535 PARAMETER Experiment Name: Zm_Meristem_P Parameter: Tissue Value: Root Meristem vs. Above Root Meristem
  misc_feature: MA Experiment ID: 108536 Result: Down-regulated in Transcription
  misc_feature: MA Experiment 108536 PARAMETER Experiment Name: Zm_Meristem_P Parameter: Age (day) Value: 8
  misc_feature: MA Experiment 108536 PARAMETER Experiment Name: Zm_Meristem_P Parameter: Organism Value: Zea mays
  misc_feature: MA Experiment 108536 PARAMETER Experiment Name: Zm_Meristem_P Parameter: Plant Line Value: 35A19
  misc_feature: MA Experiment 108536 PARAMETER Experiment Name: Zm_Meristem_P Parameter: Tissue Value: Shoot Meristem vs. Above Shoot Meristem
  misc_feature: MA Experiment ID: 108543 Result: Up-regulated in Transcription
  misc_feature: MA Experiment ID: 108545 Result: Up-regulated in Transcription
  misc_feature: MA Experiment 108545 PARAMETER Experiment Name: Zm_Imbibed_Seeds_P Parameter: Age (day) Value: 3 vs. 2
  misc_feature: MA Experiment 108545 PARAMETER Experiment Name: Zm_Imbibed_Seeds_P Parameter: Organism Value: Zea mays
  misc_feature: MA Experiment 108545 PARAMETER Experiment Name: Zm_Imbibed_Seeds_P Parameter: Plant Line Value: 35A19
  misc_feature: MA Experiment 108545 PARAMETER Experiment Name: Zm_Imbibed_Seeds_P Parameter: Tissue Value: Aerial vs. Embryo
  misc_feature: MA Experiment ID: 108547 Result: Up-regulated in Transcription
  misc_feature: MA Experiment 108547 PARAMETER Experiment Name: Zm_Imbibed_Seeds_P Parameter: Age (day) Value: 4 vs. 2
  misc_feature: MA Experiment 108547 PARAMETER Experiment Name: Zm_Imbibed_Seeds_P Parameter: Organism Value: Zea mays
  misc_feature: MA Experiment 108547 PARAMETER Experiment Name: Zm_Imbibed_Seeds_P Parameter: Plant Line Value: 35A19
  misc_feature: MA Experiment 108547 PARAMETER Experiment Name: Zm_Imbibed_Seeds_P Parameter: Tissue Value: Aerial vs. Embryo
  misc_feature: MA Experiment ID: 108556 Result: Down-regulated in Transcription
  misc_feature: MA Experiment 108556 PARAMETER Experiment Name: Zm_Drought_P Parameter: Age (day) Value: 9
  misc_feature: MA Experiment 108556 PARAMETER Experiment Name: Zm_Drought_P Parameter: Organism Value: Zea mays
  misc_feature: MA Experiment 108556 PARAMETER Experiment Name: Zm_Drought_P Parameter: Plant Line Value: 35A19
  misc_feature: MA Experiment 108556 PARAMETER Experiment Name: Zm_Drought_P Parameter: Timepoint (hr) Value: 24
  misc_feature: MA Experiment 108556 PARAMETER Experiment Name: Zm_Drought_P Parameter: Tissue Value: Aerial
  misc_feature: MA Experiment 108556 PARAMETER Experiment Name: Zm_Drought_P Parameter: Treatment Value: Drought vs. No Drought
  misc_feature: MA Experiment ID: 108687 Result: Down-regulated in Transcription
  misc_feature: MA Experiment 108687 PARAMETER Experiment Name: Zm_Embryos-Flowers__P Parameter: Tissue Value: Embryo vs. Aerial+
  misc_feature: MA Experiment ID: 108689 Result: Down-regulated in Transcription
  misc_feature: MA Experiment 108689 PARAMETER Experiment Name: Zm_Drought_Roots_P Parameter: Age (day) Value: 9
  misc_feature: MA Experiment 108689 PARAMETER Experiment Name: Zm_Drought_Roots_P Parameter: Organism Value: Zea mays
  misc_feature: MA Experiment 108689 PARAMETER Experiment Name: Zm_Drought_Roots_P Parameter: Plant Line Value: 35A19
  misc_feature: MA Experiment 108689 PARAMETER Experiment Name: Zm_Drought_Roots_P Parameter: Timepoint (hr) Value: 24
  misc_feature: MA Experiment 108689 PARAMETER Experiment Name: Zm_Drought_Roots_P Parameter: Tissue Value: Roots
  misc_feature: MA Experiment 108689 PARAMETER Experiment Name: Zm_Drought_Roots_P Parameter: Treatment Value: Drought vs. No Drought
atcaacaacagccctacaacttactgcttgctctagctagctagctgctcccggcccatatctactacacaagtaggctagcagcagcagcagcaatggcctcggtgacgaggttcccggccgtggccctcgtcctgctgctcgccgccagcgccttcctggccagcgaggtggcggcgtgcggcggctgcccgaaaccaactcctcctccatcgccaccaccgccgtcgcccaccagcacgccgtgccctccgccgccgtccagctccggcggcaagtgccccaagaacgcgctgaaactgggcgtgtgcgccaacgtgctgggcctcgtcaaggtgtccatcggcaaggtgcccaccgactcgtgctgcccactgctggacgggctcgccgacctggaggccgccgtctgcctctgcaccgcgctcaaggccaacgtgctcggcgtcaacctcgacgtccccgtcaagctcaccctgctcctcaactactgcgggaagagcgtccctcagggcttcctgtgcgcctaatatatatactagtggctagttcgtcactagcttcagttgccatgcatatttgtgattcttcttctttccttctagttcaccactgtatgtacgagcctcctccggatgttttctttggtattgccttctcttctactcttctcctaacttgcttgcattatacattgcgtgagcatgataatatataaatcattgggtg

SEQ ID NO: 12470 - protein, 144 aa, Zea mays subsp. mays
  peptide (1)..(144): Ceres Seq. ID no. 12404623
  misc_feature (62)..(143): Pfam Name: Protease inhibitor/seed storage/LTP family Pfam Description: Protease inhibitor/seed storage/LTP family
  misc_feature (13)..(144): Homolog of NCBI NO: 4240033 NR Description: ZmGR1a [Zea mays]
  misc_feature (13)..(144): Homolog of NCBI NO: 4240035 NR Description: ZmGR1b [Zea mays]
  misc_feature (11)..(143): Homolog of NCBI NO: 1084461 NR Description: root-specific protein RCc3 - rice
  misc_feature (11)..(144): Homolog of NCBI NO: 481236 NR Description: hypothetical protein - Madagascar periwinkle
  misc_feature (11)..(144): Homolog of NCBI NO: 7484770 NR Description: extensin like protein - black poplar extensin like protein [Populus nigra] >gi|1199774|dbj|BAA11855.1|
  misc_feature (11)..(144): Homolog of NCBI NO: 4454097 NR Description: hybrid proline-rich protein [Catharanthus roseus]
  misc_feature (11)..(143): Homolog of NCBI NO: 38345485 NR Description: OSJNBa0010H02.23 [Oryza sativa (japonica
  misc_feature (1)..(143): Homolog of NCBI NO: 15221484 NR Description: similar to 14KD proline-rich protein DC2.15 (sp|P14009); similar to ESTs emb|Z17709 and emb|Z47685; protein
  misc_feature (11)..(143): Homolog of NCBI NO: 38345484 NR Description: OSJNBa0010H02.22 [Oryza sativa (japonica
  misc_feature (1)..(143): Homolog of NCBI NO: 629597 NR Description: proline-rich protein - rape
MASVTRFPAVALVLLLAASAFLASEVAACGGCPKPTPPPSPPPPSPTSTPCPPPPSSSGGKCPKNALKLGVCANVLGLVKVSIGKVPTDSCCPLLDGLADLEAAVCLCTALKANVLGVNLDVPVKLTLLLNYCGKSVPQGFLCA

SEQ ID NO: 12471 - DNA, 1250 bp, Zea mays subsp. mays
  misc_feature (1)..(1250): Ceres Seq. ID no. 12414528
  misc_feature: MA Experiment ID: 20000534 Result: Down-regulated in Transcription
  misc_feature: MA Experiment 20000534 PARAMETER Experiment Name: Zm_Hybrid_Pollen_P Parameter: Age (day) Value: 8
  misc_feature: MA Experiment 20000534 PARAMETER Experiment Name: Zm_Hybrid_Pollen_P Parameter: Organism Value: Zea mays
  misc_feature: MA Experiment 20000534 PARAMETER Experiment Name: Zm_Hybrid_Pollen_P Parameter: Plant Line Value: 35A19
  misc_feature: MA Experiment 20000534 PARAMETER Experiment Name: Zm_Hybrid_Pollen_P Parameter: Tissue Value: Pollen vs. Aerial
gtccatccatcgtctcgtccccgcctgccattcgcgagcatccaaagctgtagttgctgcaaagctctcgcaaaatcctactcccaccgccgactcgaacagtcgaacctcggctcccctcctccccaatccgtcatcttccttctacacttgtttctgcgggagcgggagagaaggcaccagggaggccgcccccgtcacccatagccaaagtcacgcgccaccaaactttgttctctcacccagtcgctttcgcgttcagcgcgagccgagcccagccggtgggtcggtcgctgaaggcggagccataaaggcgtcggcgacggcaggatgatgagcggcagatcgggcggcagggacggcgaggcggccggccccgtcatcaggatcagggtttcccacggagccaccttccgcgaggtcgtcgtgccggcgcaggctaccttcggtgagttgaagaggatccttgttcagactactggcttggagcctgagaggcagaggctcttcttccgtgggaaggagaagagtgacagagagttcctgcacgcggcaggtgttaaggatggcgcgaagttgcttctgcttgagaagcctgcccctgccaacatagagcagaaggttgagcctgtgattatggatgagagcgtgatgaaggcatgtgaggctgttgctcgtgttagagctgaagttgataggctgtctgctaaggtgtgtgacttggagaagaatgtgcttgcagggagaaaagttgatgataaagaatttgtcgtcttgacggaactgcttatgatacagctgctgaaactcgatggcatagaagctgaaggagaagcaagggcacagaggaaggctgaggtccgccgagttcagtcccttgtggagaccttggataagctgaaggcaagaaatgcgaaccctttcagcgatcataacaacgctgtttcagtgacgacgcagtgggagacgtttgagaacggtatgggcagcttgagcgctcccccgccccacgttccttcggagcaagttaacactaactgggagcagcagttcgactaggctcagctgaagctgttgatgtatcgtgagatcggtatgggcattccttttcccaggcagcgaggtgttttgtgtatatgcaccgcgtttggtgcctttggtgtcctaactgcctgtgaatgttaccagatcatcataccatactaccatgtggattgcattgcaccgctcattgagggccatgtttcgct

SEQ ID NO: 12472 - protein, 242 aa, Zea mays subsp. mays
  peptide (1)..(242): Ceres Seq. ID no. 12414529
  misc_feature (110)..(191): Pfam Name: BAG domain Pfam Description: BAG domain
  misc_feature (40)..(242): Homolog of NCBI NO: 34907972 NR Description: P0446G04.18 [Oryza sativa (japonica
  misc_feature (1)..(40): Homolog of NCBI NO: 34907972 NR Description: P0446G04.18 [Oryza sativa (japonica
  misc_feature (13)..(242): Homolog of NCBI NO: 15231035 NR Description: putative protein; protein id: At3g51780.1, by cDNA: 21630., supported by cDNA: gi_19699282 [Arabidopsis
  misc_feature (13)..(242): Homolog of NCBI NO: 19699283 NR Description: At3g51780/ORF3 [Arabidopsis thaliana]
  misc_feature (13)..(242): Homolog of NCBI NO: 21554254 NR Description: unknown [Arabidopsis thaliana]
  misc_feature (1)..(195): Homolog of NCBI NO: 25553557 NR Description: OSJNBa0038F22.4 [Oryza sativa (japonica
  misc_feature (1)..(195): Homolog of NCBI NO: 34898024 NR Description: ESTs AU082174(S13676),AU032395(R3986) correspond a region of the predicted gene.~Similar to Arabidopsis thaliana
  misc_feature (1)..(215): Homolog of NCBI NO: 6624711 NR Description: hypothetical protein [Oryza sativa (indica
  misc_feature (1)..(195): Homolog of NCBI NO: 15242267 NR Description: putative protein; protein id: At5g52060.1 thaliana] >gi|10177741|dbj|BAB11054.1| contains similarity to
  misc_feature (1)..(215): Homolog of NCBI NO: 38344334 NR Description: OSJNBa0058K23.16 [Oryza sativa (japonica
MMSGRSGGRDGEAAGPVIRIRVSHGATFREVVVPAQATFGELKRILVQTTGLEPERQRLFFRGKEKSDREFLHAAGVKDGAKLLLLEKPAPANIEQKVEPVIMDESVMKACEAVARVRAEVDRLSAKVCDLEKNVLAGRKVDDKEFVVLTELLMIQLLKLDGIEAEGEARAQRKAEVRRVQSLVETLDKLKARNANPFSDHNNAVSVTTQWETFENGMGSLSAPPPHVPSEQVNTNWEQQFD

SEQ ID NO: 12473 - protein, 241 aa, Zea mays subsp. mays
  peptide (1)..(241): Ceres Seq. ID no. 12414530
  misc_feature (109)..(190): Pfam Name: BAG domain Pfam Description: BAG domain
  misc_feature (39)..(241): Homolog of NCBI NO: 34907972 NR Description: P0446G04.18 [Oryza sativa (japonica
  misc_feature (1)..(39): Homolog of NCBI NO: 34907972 NR Description: P0446G04.18 [Oryza sativa (japonica
  misc_feature (12)..(241): Homolog of NCBI NO: 15231035 NR Description: putative protein; protein id: At3g51780.1, by cDNA: 21630., supported by cDNA: gi_19699282 [Arabidopsis
  misc_feature (12)..(241): Homolog of NCBI NO: 21554254 NR Description: unknown [Arabidopsis thaliana]
  misc_feature (12)..(241): Homolog of NCBI NO: 19699283 NR Description: At3g51780/ORF3 [Arabidopsis thaliana]
  misc_feature (1)..(194): Homolog of NCBI NO: 25553557 NR Description: OSJNBa0038F22.4 [Oryza sativa (japonica
  misc_feature (1)..(194): Homolog of NCBI NO: 34898024 NR Description: ESTs AU082174(S13676),AU032395(R3986) correspond a region of the predicted gene.~Similar to Arabidopsis thaliana
  misc_feature (1)..(214): Homolog of NCBI NO: 6624711 NR Description: hypothetical protein [Oryza sativa (indica
  misc_feature (1)..(194): Homolog of NCBI NO: 15242267 NR Description: putative protein; protein id: At5g52060.1 thaliana] >gi|10177741|dbj|BAB11054.1| contains similarity to
  misc_feature (1)..(214): Homolog of NCBI NO: 38344334 NR Description: OSJNBa0058K23.16 [Oryza sativa (japonica
MSGRSGGRDGEAAGPVIRIRVSHGATFREVVVPAQATFGELKRILVQTTGLEPERQRLFFRGKEKSDREFLHAAGVKDGAKLLLLEKPAPANIEQKVEPVIMDESVMKACEAVARVRAEVDRLSAKVCDLEKNVLAGRKVDDKEFVVLTELLMIQLLKLDGIEAEGEARAQRKAEVRRVQSLVETLDKLKARNANPFSDHNNAVSVTTQWETFENGMGSLSAPPPHVPSEQVNTNWEQQFD

SEQ ID NO: 12474 - protein, 140 aa, Zea mays subsp. mays
  peptide (1)..(140): Ceres Seq. ID no. 12414531
  misc_feature (8)..(89): Pfam Name: BAG domain Pfam Description: BAG domain
  misc_feature (1)..(140): Homolog of NCBI NO: 34907972 NR Description: P0446G04.18 [Oryza sativa (japonica
  misc_feature (1)..(140): Homolog of NCBI NO: 15231035 NR Description: putative protein; protein id: At3g51780.1, by cDNA: 21630., supported by cDNA: gi_19699282 [Arabidopsis
  misc_feature (1)..(140): Homolog of NCBI NO: 19699283 NR Description: At3g51780/ORF3 [Arabidopsis thaliana]
  misc_feature (1)..(140): Homolog of NCBI NO: 21554254 NR Description: unknown [Arabidopsis thaliana]
  misc_feature (1)..(93): Homolog of NCBI NO: 25553557 NR Description: OSJNBa0038F22.4 [Oryza sativa (japonica
  misc_feature (1)..(93): Homolog of NCBI NO: 34898024 NR Description: ESTs AU082174(S13676),AU032395(R3986) correspond a region of the predicted gene.~Similar to Arabidopsis thaliana
  misc_feature (1)..(113): Homolog of NCBI NO: 6624711 NR Description: hypothetical protein [Oryza sativa (indica
  misc_feature (1)..(93): Homolog of NCBI NO: 15242267 NR Description: putative protein; protein id: At5g52060.1 thaliana] >gi|10177741|dbj|BAB11054.1| contains similarity to
  misc_feature (1)..(113): Homolog of NCBI NO: 38344334 NR Description: OSJNBa0058K23.16 [Oryza sativa (japonica
  misc_feature (1)..(113): Homolog of NCBI NO: 21537107 NR Description: unknown [Arabidopsis thaliana]
MDESVMKACEAVARVRAEVDRLSAKVCDLEKNVLAGRKVDDKEFVVLTELLMIQLLKLDGIEAEGEARAQRKAEVRRVQSLVETLDKLKARNANPFSDHNNAVSVTTQWETFENGMGSLSAPPPHVPSEQVNTNWEQQFD

SEQ ID NO: 12475 - DNA, 627 bp, Zea mays subsp. mays
  misc_feature (1)..(627): Ceres Seq. ID no. 12336893
  misc_feature: MA Experiment ID: 108535 Result: Up-regulated in Transcription
  misc_feature: MA Experiment 108535 PARAMETER Experiment Name: Zm_Meristem_P Parameter: Age (day) Value: 8
  misc_feature: MA Experiment 108535 PARAMETER Experiment Name: Zm_Meristem_P Parameter: Organism Value: Zea mays
  misc_feature: MA Experiment 108535 PARAMETER Experiment Name: Zm_Meristem_P Parameter: Plant Line Value: 35A19
  misc_feature: MA Experiment 108535 PARAMETER Experiment Name: Zm_Meristem_P Parameter: Tissue Value: Root Meristem vs. Above Root Meristem
  misc_feature: MA Experiment ID: 20000488 Result: Up-regulated in Transcription
  misc_feature: MA Experiment 20000488 PARAMETER Experiment Name: Zm_50mM_NH4NO3_L_to_H_P Parameter: Organism Value: Zea mays
  misc_feature: MA Experiment 20000488 PARAMETER Experiment Name: Zm_50mM_NH4NO3_L_to_H_P Parameter: Timepoint (hr) Value: 8
  misc_feature: MA Experiment 20000488 PARAMETER Experiment Name: Zm_50mM_NH4NO3_L_to_H_P Parameter: Tissue Value: Leaves
  misc_feature: MA Experiment 20000488 PARAMETER Experiment Name: Zm_50mM_NH4NO3_L_to_H_P Parameter: Treatment Value: 50mM NH4NO3 vs. 100mM Mannitol
  misc_feature: MA Experiment ID: 20001606 Result: Up-regulated in Transcription
  misc_feature: MA Experiment 20001606 PARAMETER Experiment Name: Zm_50ppm_KNO3_L-to-H_P Parameter: Age (day) Value: 19
  misc_feature: MA Experiment 20001606 PARAMETER Experiment Name: Zm_50ppm_KNO3_L-to-H_P Parameter: Organism Value: Zea mays
  misc_feature: MA Experiment 20001606 PARAMETER Experiment Name: Zm_50ppm_KNO3_L-to-H_P Parameter: Plant Line Value: 35A19
  misc_feature: MA Experiment 20001606 PARAMETER Experiment Name: Zm_50ppm_KNO3_L-to-H_P Parameter: Timepoint (hr) Value: 8
  misc_feature: MA Experiment 20001606 PARAMETER Experiment Name: Zm_50ppm_KNO3_L-to-H_P Parameter: Tissue Value: Shoots
  misc_feature: MA Experiment 20001606 PARAMETER Experiment Name: Zm_50ppm_KNO3_L-to-H_P Parameter: Treatment Value: 50ppm KNO3 vs. 50ppm KCl
agaaaaaccctacagttcatccctctcgacgcgccgccgccgtctcgccgctgcccacccagattgacggctccaattggcgcccatggcggaagaaaccaacataaaaaaggaggaagaggagttcagcaccggtcctctctcggtgctcatgatgagcgtcaagaataatacccaggttcttatcaactgccggaacaacaagaagttgcttggtcgcgtgcgagccttcgatcggcactgcaacatggttcttgagaatgttcgtgagatgtggaccgaggtaccgaagaccggtaaaggcaagaagaaggctctcccggtgaacaaggacaggttcataagcaagatgttcctccgcggggattcggtcatcatcgtcctcaggaacccgaaatgagtaccctgtacacgtagagagtctgtttgctagcagtacgttgtgctattgggtgtaaggtgtatgccaaatgctcaaagcatgggagtgtaagtcgcggcagaattcgctatgtgtgttgatggtgggggattcagcttaaggcaggatgctagggctggattttgcttcttgtagcagacttgaacaggatgcttctttgatgtatcgacagaccccactgcttg

SEQ ID NO: 12476 - protein, 104 aa, Zea mays subsp. mays
  peptide (1)..(104): Ceres Seq. ID no. 12336894
  misc_feature (22)..(101): Pfam Name: LSM domain Pfam Description: LSM domain
  misc_feature (1)..(104): Homolog of NCBI NO: 30690747 NR Description: small nuclear ribonucleo protein D2 -related
  misc_feature (1)..(104): Homolog of NCBI NO: 18407411 NR Description: putative small nuclear ribonucleoprotein D2;
  misc_feature (1)..(104): Homolog of NCBI NO: 21554692 NR Description: small nuclear ribonucleoprotein-like protein
  misc_feature (1)..(103): Homolog of NCBI NO: 4759158 NR Description: small nuclear ribonucleoprotein polypeptide D2; core protein D2 [Homo sapiens] >gi|20821553|ref|XP_133225.1| nuclear ribonucleoprotein D2 [Mus musculus]
  misc_feature (1)..(104): Homolog of NCBI NO: 31230450 NR Description: ENSANGP00000002741 [Anopheles gambiae]
  misc_feature (1)..(103): Homolog of NCBI NO: 26337731 NR Description: unnamed protein product [Mus musculus]
  misc_feature (1)..(103): Homolog of NCBI NO: 21357623 NR Description: CG1249-PA [Drosophila melanogaster]
  misc_feature (1)..(103): Homolog of NCBI NO: 22203734 NR Description: small nuclear ribonucleoprotein D2-like protein
  misc_feature (1)..(103): Homolog of NCBI NO: 27677236 NR Description: similar to Small nuclear ribonucleoprotein Sm D2
  misc_feature (1)..(103): Homolog of NCBI NO: 34881247 NR Description: similar to SNF2/RAD54 family protein [Rattus
MAEETNIKKEEEEFSTGPLSVLMMSVKNNTQVLINCRNNKKLLGRVRAFDRHCNMVLENVREMWTEVPKTGKGKKKALPVNKDRFISKMFLRGDSVIIVLRNPK

SEQ ID NO: 12477 - protein, 82 aa, Zea mays subsp. mays
  peptide (1)..(82): Ceres Seq. ID no. 12336895
  misc_feature (1)..(79): Pfam Name: LSM domain Pfam Description: LSM domain
  misc_feature (1)..(82): Homolog of NCBI NO: 30690747 NR Description: small nuclear ribonucleo protein D2 -related
  misc_feature (1)..(82): Homolog of NCBI NO: 18407411 NR Description: putative small nuclear ribonucleoprotein D2;
  misc_feature (1)..(82): Homolog of NCBI NO: 21554692 NR Description: small nuclear ribonucleoprotein-like protein
  misc_feature (1)..(81): Homolog of NCBI NO: 4759158 NR Description: small nuclear ribonucleoprotein polypeptide D2; core protein D2 [Homo sapiens] >gi|20821553|ref|XP_133225.1| nuclear ribonucleoprotein D2 [Mus musculus]
  misc_feature (1)..(82): Homolog of NCBI NO: 31230450 NR Description: ENSANGP00000002741 [Anopheles gambiae]
  misc_feature (1)..(81): Homolog of NCBI NO: 26337731 NR Description: unnamed protein product [Mus musculus]
  misc_feature (1)..(81): Homolog of NCBI NO: 21357623 NR Description: CG1249-PA [Drosophila melanogaster]
  misc_feature (1)..(81): Homolog of NCBI NO: 22203734 NR Description: small nuclear ribonucleoprotein D2-like protein
  misc_feature (1)..(81): Homolog of NCBI NO: 27677236 NR Description: similar to Small nuclear ribonucleoprotein Sm D2
  misc_feature (1)..(81): Homolog of NCBI NO: 34881247 NR Description: similar to SNF2/RAD54 family protein [Rattus
MMSVKNNTQVLINCRNNKKLLGRVRAFDRHCNMVLENVREMWTEVPKTGKGKKKALPVNKDRFISKMFLRGDSVIIVLRNPK

SEQ ID NO: 12478 - protein, 81 aa, Zea mays subsp. mays
  peptide (1)..(81): Ceres Seq. ID no. 12336896
  misc_feature (1)..(78): Pfam Name: LSM domain Pfam Description: LSM domain
  misc_feature (1)..(81): Homolog of NCBI NO: 30690747 NR Description: small nuclear ribonucleo protein D2 -related
  misc_feature (1)..(81): Homolog of NCBI NO: 18407411 NR Description: putative small nuclear ribonucleoprotein D2;
  misc_feature (1)..(81): Homolog of NCBI NO: 21554692 NR Description: small nuclear ribonucleoprotein-like protein
  misc_feature (1)..(80): Homolog of NCBI NO: 4759158 NR Description: small nuclear ribonucleoprotein polypeptide D2; core protein D2 [Homo sapiens] >gi|20821553|ref|XP_133225.1| nuclear ribonucleoprotein D2 [Mus musculus]
  misc_feature (1)..(81): Homolog of NCBI NO: 31230450 NR Description: ENSANGP00000002741 [Anopheles gambiae]
  misc_feature (1)..(80): Homolog of NCBI NO: 26337731 NR Description: unnamed protein product [Mus musculus]
  misc_feature (1)..(80): Homolog of NCBI NO: 21357623 NR Description: CG1249-PA [Drosophila melanogaster]
  misc_feature (1)..(80): Homolog of NCBI NO: 22203734 NR Description: small nuclear ribonucleoprotein D2-like protein
  misc_feature (1)..(80): Homolog of NCBI NO: 27677236 NR Description: similar to Small nuclear ribonucleoprotein Sm D2
  misc_feature (1)..(80): Homolog of NCBI NO: 34881247 NR Description: similar to SNF2/RAD54 family protein [Rattus
MSVKNNTQVLINCRNNKKLLGRVRAFDRHCNMVLENVREMWTEVPKTGKGKKKALPVNKDRFISKMFLRGDSVIIVLRNPK

SEQ ID NO: 12479 - DNA, 1224 bp, Zea mays subsp. mays
  misc_feature (1)..(1224): Ceres Seq. ID no. 12365098
  misc_feature: MA Experiment ID: 108523 Result: Down-regulated in Transcription
  misc_feature: MA Experiment 108523 PARAMETER Experiment Name: Zm_42deg_Heat_P Parameter: Age (day) Value: 8
  misc_feature: MA Experiment 108523 PARAMETER Experiment Name: Zm_42deg_Heat_P Parameter: Organism Value: Zea mays
  misc_feature: MA Experiment 108523 PARAMETER Experiment Name: Zm_42deg_Heat_P Parameter: Plant Line Value: 35A19
  misc_feature: MA Experiment 108523 PARAMETER Experiment Name: Zm_42deg_Heat_P Parameter: Temperature (deg C) Value: 42 vs. 22
  misc_feature: MA Experiment 108523 PARAMETER Experiment Name: Zm_42deg_Heat_P Parameter: Timepoint (hr) Value: 6
  misc_feature: MA Experiment 108523 PARAMETER Experiment Name: Zm_42deg_Heat_P Parameter: Tissue Value: Aerial
  misc_feature: MA Experiment ID: 108544 Result: Down-regulated in Transcription
ccccaaagtttcgaacaaaagtccacaaatccccttcgccgtctccggcgagccccgcccctcatcgccgccgcgccaaagagacagtgagaggggggatggatcagtccatcagaaccgcatgcgagttcctctcgtcggtgctaaaccacgctgagtcctcgtcccgcgagctcgccgacgccgtctcccaacgccccgtccacctcgagatggcgaggacctcgttcctgcagaagctggagcacagggtggaggcgtcggccgccgacttgcagcacatcgagtccatcgccctcgacaccgtctccttcgaggagctcctcggccactgcggcgaggcgctcaaagtctacgcgcgccacgccgacgccctccagtcgcacctcgcttcctttggctacgagcccccggacgcacaacaccccgagatcgatgtggatgtggaagatggagatgtcgggaaggttggggaccctggagatagatgcctcagcgtgtcgcgttcagtgctcaggtcgggtaagcggcggtttgatagccacagcgatgcgatatttgaagagtcactgaaggatcttgggttttcagatgcttgtctagccactctttcttctgaaggcgcacattatggtgagagcccaaagaagctttacaagaatgctgaaagtactgatgatggcgaaaagatcatgaatgaagctgaaattatgactcccctaaatgaaagaaatggtcaaggtaattcttttgaaggagtgataagggcatcaaaggaggattatgagcaactccctccttatatgaagagtctagcatcatgggaggagttgcaggagggaatatccaaactaaattcatacttgggtggtgacaagttgcaggggagtgttgctttgaaccaggaccgtgttgcagagataggattggggcgcaaaggaagagcctgtttgctgatgctgttgcgactcaatcagctaactatggagacagttgatggctctaccttttacaccctgtgcaagaacaacgtgtagcctgatactgctactgctacagcgtgtcatgcttaagttttcctttttcttttcgtatgtcgagtctggctagaatattgtatcatgttgatgtagcactcgatctcagctcaaaatattgtttttttctgagcagttctggtcatgtgatcttcattccaaccatgaaataaagtgtgtttgaggc

SEQ ID NO: 12480 - protein, 344 aa, Zea mays subsp. mays
  peptide (1)..(344): Ceres Seq. ID no. 12365099
  misc_feature (33)..(337): Homolog of NCBI NO: 30681522 NR Description: expressed protein [Arabidopsis thaliana] unknown protein [Arabidopsis thaliana]
  misc_feature (258)..(337): Homolog of NCBI NO: 10178115 NR Description: gene_id:F15M7.12~unknown protein [Arabidopsis
PKFRTKVHKSPSPSPASPAPHRRRAKETVRGGMDQSIRTACEFLSSVLNHAESSSRELADAVSQRPVHLEMARTSFLQKLEHRVEASAADLQHIESIALDTVSFEELLGHCGEALKVYARHADALQSHLASFGYEPPDAQHPEIDVDVEDGDVGKVGDPGDRCLSVSRSVLRSGKRRFDSHSDAIFEESLKDLGFSDACLATLSSEGAHYGESPKKLYKNAESTDDGEKIMNEAEIMTPLNERNGQGNSFEGVIRASKEDYEQLPPYMKSLASWEELQEGISKLNSYLGGDKLQGSVALNQDRVAEIGLGRKGRACLLMLLRLNQLTMETVDGSTFYTLCKNNV

SEQ ID NO: 12481 - protein, 312 aa, Zea mays subsp. mays
  peptide (1)..(312): Ceres Seq. ID no. 12365100
  misc_feature (1)..(305): Homolog of NCBI NO: 30681522 NR Description: expressed protein [Arabidopsis thaliana] unknown protein [Arabidopsis thaliana]
  misc_feature (226)..(305): Homolog of NCBI NO: 10178115 NR Description: gene_id:F15M7.12~unknown protein [Arabidopsis
MDQSIRTACEFLSSVLNHAESSSRELADAVSQRPVHLEMARTSFLQKLEHRVEASAADLQHIESIALDTVSFEELLGHCGEALKVYARHADALQSHLASFGYEPPDAQHPEIDVDVEDGDVGKVGDPGDRCLSVSRSVLRSGKRRFDSHSDAIFEESLKDLGFSDACLATLSSEGAHYGESPKKLYKNAESTDDGEKIMNEAEIMTPLNERNGQGNSFEGVIRASKEDYEQLPPYMKSLASWEELQEGISKLNSYLGGDKLQGSVALNQDRVAEIGLGRKGRACLLMLLRLNQLTMETVDGSTFYTLCKNNV

SEQ ID NO: 12482 - protein, 274 aa, Zea mays subsp. mays
  peptide (1)..(274): Ceres Seq. ID no. 12365101
  misc_feature (1)..(267): Homolog of NCBI NO: 30681522 NR Description: expressed protein [Arabidopsis thaliana] unknown protein [Arabidopsis thaliana]
  misc_feature (188)..(267): Homolog of NCBI NO: 10178115 NR Description: gene_id:F15M7.12~unknown protein [Arabidopsis
MARTSFLQKLEHRVEASAADLQHIESIALDTVSFEELLGHCGEALKVYARHADALQSHLASFGYEPPDAQHPEIDVDVEDGDVGKVGDPGDRCLSVSRSVLRSGKRRFDSHSDAIFEESLKDLGFSDACLATLSSEGAHYGESPKKLYKNAESTDDGEKIMNEAEIMTPLNERNGQGNSFEGVIRASKEDYEQLPPYMKSLASWEELQEGISKLNSYLGGDKLQGSVALNQDRVAEIGLGRKGRACLLMLLRLNQLTMETVDGSTFYTLCKNNV

SEQ ID NO: 12483 - DNA, 1423 bp, Zea mays subsp. mays
  misc_feature (1)..(1423): Ceres Seq. ID no. 12343924
  misc_feature: MA Experiment ID: 108556 Result: Up-regulated in Transcription
  misc_feature: MA Experiment 108556 PARAMETER Experiment Name: Zm_Drought_P Parameter: Age (day) Value: 9
  misc_feature: MA Experiment 108556 PARAMETER Experiment Name: Zm_Drought_P Parameter: Organism Value: Zea mays
  misc_feature: MA Experiment 108556 PARAMETER Experiment Name: Zm_Drought_P Parameter: Plant Line Value: 35A19
  misc_feature: MA Experiment 108556 PARAMETER Experiment Name: Zm_Drought_P Parameter: Timepoint (hr) Value: 24
  misc_feature: MA Experiment 108556 PARAMETER Experiment Name: Zm_Drought_P Parameter: Tissue Value: Aerial
  misc_feature: MA Experiment 108556 PARAMETER Experiment Name: Zm_Drought_P Parameter: Treatment Value: Drought vs. No Drought
  misc_feature: MA Experiment ID: 20000480 Result: Up-regulated in Transcription
  misc_feature: MA Experiment 20000480 PARAMETER Experiment Name: Zm_Drought_P Parameter: Age (day) Value: 11
  misc_feature: MA Experiment 20000480 PARAMETER Experiment Name: Zm_Drought_P Parameter: Organism Value: Zea mays
  misc_feature: MA Experiment 20000480 PARAMETER Experiment Name: Zm_Drought_P Parameter: Plant Line Value: 35A19
  misc_feature: MA Experiment 20000480 PARAMETER Experiment Name: Zm_Drought_P Parameter: Timepoint (hr) Value: 72
  misc_feature: MA Experiment 20000480 PARAMETER Experiment Name: Zm_Drought_P Parameter: Tissue Value: Aerial
  misc_feature: MA Experiment 20000480 PARAMETER Experiment Name: Zm_Drought_P Parameter: Treatment Value: Drought vs. No Drought
aaaggcccatcaaccgagagccttcgtcttccttctctcatcctttgctcctcttcaaacgctcgagaaagagagagagactaaatcctccctcgaaaccctagcatagccactgccttcccgcacgctaggaaggggaagatatgggcgccgaggaggacgccgctgcacgccgcgagcgtctccgcgccctccgtgccgccaaggacctcctctccaccctacggcgccccaaccccttccaccgacggagaacaccaaaatggcaaccatgatatggcagaagagccagaattaccaggtcatcaggatgcacctggtgaggctgctaaagaggatggtagccccactgaggaggccgaagaggttgaagatgatggtgagcttccagccatgaagttcagaaactaccttccccatgatgaacaacttcgaggaggcaagctggctccagtgtctcttcccaagtttgaagacccaattagtgccgaaactgcagagccaaaggaagtggagaacctttttggaaacatagcaccaaagaatccaaattgggatctgaaacgtgatgtgcagaagagaattgataaactggaaaggcgcacgcagaaagcgttggctgagattgcattggaacagcagagggagaaggaagccttggaggaatctcaagattgaccgacctgtataagtgaccagtgactcatgctggttggtccctcgagcagacgtcattatcttatttagataatgtaatgtactttgggatgctctgtgtatctaccatcttgggatgtactgaattgagtttgggacgtgtatctacctaccatcttgtattgtcagctcaaggatgtagcaaactagtagcaacttcaaaaaatgagatgtagcagtcctgttctgttagacggacctggtcaaacttgcaggttacatccatgggccgccaattcacgccatccgccatatatgcctaggatctgttcataacccttcatttgttcgtatattgtaatcaaaagttacccgccgtgtgtctacaacgtgtcgtcgcaatggacgcagcaggtgcctgcctattcattcattcataccgttttggtcgtcgagaggtgcgttcaataagttactagtccagtgtccgttataggggagtccggtagtgtccgttataggggagtccggtattattattattattgtttcatcttcttcttcgccctttctctgggtaataattgggttacttggaaactgttgatcagtgggtcagttagaatgtgaactggttgttgctgggtaagtatgtggtttgttggtatattgagtctggggacagagagtgaggtcctgatctgcttgtaacagtacctgctttggttttgtgattgctatatactgaaacccaaatccctctgtt

SEQ ID NO: 12484 - protein, 133 aa, Zea mays subsp. mays
  peptide (1)..(133): Ceres Seq. ID no. 12343925
  misc_feature (19)..(129): Homolog of NCBI NO: 18397111 NR Description: expressed protein; protein id: At3g05070.1, by cDNA: 142966. [Arabidopsis thaliana] unknown protein [Arabidopsis thaliana]
  misc_feature (1)..(133): Homolog of NCBI NO: 21389497 NR Description: hypothetical protein MGC23918 [Homo sapiens]
  misc_feature (1)..(133): Homolog of NCBI NO: 21756313 NR Description: unnamed protein product [Homo sapiens]
  misc_feature (1)..(133): Homolog of NCBI NO: 20072383 NR Description: Similar to RIKEN cDNA 2700094L05 gene [Mus
  misc_feature (1)..(126): Homolog of NCBI NO: 34866382 NR Description: similar to hypothetical protein MGC23918 [Rattus
  misc_feature (11)..(133): Homolog of NCBI NO: 20874062 NR Description: similar to hypothetical protein MGC23918 [Homo
  misc_feature (1)..(133): Homolog of NCBI NO: 33469009 NR Description: RIKEN cDNA 2700094L05 [Mus musculus]
  misc_feature (26)..(132): Homolog of NCBI NO: 24651238 NR Description: CG15525-PA [Drosophila melanogaster]
  misc_feature (29)..(132): Homolog of NCBI NO: 21430888 NR Description: SD23244p [Drosophila melanogaster]
  misc_feature (26)..(124): Homolog of NCBI NO: 39581407 NR Description: Hypothetical protein CBG22501 [Caenorhabditis
MAEEPELPGHQDAPGEAAKEDGSPTEEAEEVEDDGELPAMKFRNYLPHDEQLRGGKLAPVSLPKFEDPISAETAEPKEVENLFGNIAPKNPNWDLKRDVQKRIDKLERRTQKALAEIALEQQREKEALEESQD

SEQ ID NO: 12485 - protein, 94 aa, Zea mays subsp. mays
  peptide (1)..(94): Ceres Seq. ID no. 12343926
  misc_feature (1)..(90): Homolog of NCBI NO: 18397111 NR Description: expressed protein; protein id: At3g05070.1, by cDNA: 142966. [Arabidopsis thaliana] unknown protein [Arabidopsis thaliana]
  misc_feature (1)..(94): Homolog of NCBI NO: 21389497 NR Description: hypothetical protein MGC23918 [Homo sapiens]
  misc_feature (1)..(94): Homolog of NCBI NO: 21756313 NR Description: unnamed protein product [Homo sapiens]
  misc_feature (1)..(94): Homolog of NCBI NO: 20072383 NR Description: Similar to RIKEN cDNA 2700094L05 gene [Mus
  misc_feature (1)..(87): Homolog of NCBI NO: 34866382 NR Description: similar to hypothetical protein MGC23918 [Rattus
  misc_feature (1)..(94): Homolog of NCBI NO: 20874062 NR Description: similar to hypothetical protein MGC23918 [Homo
  misc_feature (1)..(94): Homolog of NCBI NO: 33469009 NR Description: RIKEN cDNA 2700094L05 [Mus musculus]
  misc_feature (1)..(93): Homolog of NCBI NO: 24651238 NR Description: CG15525-PA [Drosophila melanogaster]
  misc_feature (1)..(93): Homolog of NCBI NO: 21430888 NR Description: SD23244p [Drosophila melanogaster]
  misc_feature (1)..(85): Homolog of NCBI NO: 39581407 NR Description: Hypothetical protein CBG22501 [Caenorhabditis
MKFRNYLPHDEQLRGGKLAPVSLPKFEDPISAETAEPKEVENLFGNIAPKNPNWDLKRDVQKRIDKLERRTQKALAEIALEQQREKEALEESQD

SEQ ID NO: 12486 - DNA, 795 bp, Zea mays subsp. mays
  misc_feature (1)..(795): Ceres Seq. ID no. 12350319
  misc_feature: MA Experiment ID: 108689 Result: Up-regulated in Transcription
  misc_feature: MA Experiment 108689 PARAMETER Experiment Name: Zm_Drought_Roots_P Parameter: Age (day) Value: 9
  misc_feature: MA Experiment 108689 PARAMETER Experiment Name: Zm_Drought_Roots_P Parameter: Organism Value: Zea mays
  misc_feature: MA Experiment 108689 PARAMETER Experiment Name: Zm_Drought_Roots_P Parameter: Plant Line Value: 35A19
  misc_feature: MA Experiment 108689 PARAMETER Experiment Name: Zm_Drought_Roots_P Parameter: Timepoint (hr) Value: 24
  misc_feature: MA Experiment 108689 PARAMETER Experiment Name: Zm_Drought_Roots_P Parameter: Tissue Value: Roots
  misc_feature: MA Experiment 108689 PARAMETER Experiment Name: Zm_Drought_Roots_P Parameter: Treatment Value: Drought vs. No Drought
aacgtccagattgggaattccatcacgcctcgtcctctccgtcccgaccagaatcatcgcttcttcctgctccggcgatatccgccgccgcctgcggtccggcagagatgggaagcacttcctctatgctcacccaatacgatatcgaggaggtccaggaccattgtaaccacgcattctcgcagcaggagatcgtatcgctgtaccaccgcttctgccagctcgaccgtaacggtggtggcttcgtctccgctgacgagttcatgtcggtccctgagttcgccgtaaatcccctctcccagaggctcctgaggatgctggatgggctcaacttcaaggagtttgtagcatttttgtcagcttttagcccccgcacaagcctgcagcaaaagattgaatttattttcagggtttatgatactgactgcaacgggaaggttgcttttgatgacatcttgagcatcttgcgagatctgacaggttcatttatgacagagcaacagagacagaaagtcttgattcatgtgttagaagaagctggatacacaaaagattcacattttacactcccagactttatgaagattattggcaattctgagctcaagatggaggttgaagttcctattgactaaaaacctaacaagcatcatctagttgcttcaggcctgtatcttcatttgtgttaaattaagtagatggtatatttatatccttgcaactcaaatcatgatcagagatgtaattaaggaaacatatgtacctgctatttggaggtttagttggctcgcactc

SEQ ID NO: 12487 - protein, 210 aa, Zea mays subsp. mays
  peptide (1)..(210): Ceres Seq. ID no. 12350320
  misc_feature (66)..(94): Pfam Name: EF hand Pfam Description: EF hand
  misc_feature (109)..(207): Homolog of NCBI NO: 17566934 NR Description: Calcium binding protein P22 like family member, N- myristoylated (22.7 kD) [Caenorhabditis elegans]
  misc_feature (36)..(123): Homolog of NCBI NO: 17566934 NR Description: Calcium binding protein P22 like family member, N- myristoylated (22.7 kD) [Caenorhabditis elegans]
  misc_feature (109)..(207): Homolog of NCBI NO: 39593284 NR Description: Hypothetical protein CBG09544 [Caenorhabditis
  misc_feature (36)..(210): Homolog of NCBI NO: 18401887 NR Description: expressed protein; protein id: At3g18430.1, by cDNA: 32274., supported by cDNA: gi_17380817, supported by gi_20259020 [Arabidopsis thaliana] >gi|11994106|dbj|BAB01109.1|
  misc_feature (36)..(207): Homolog of NCBI NO: 1168750 NR Description: Calcineurin B subunit (Protein phosphatase 2B subunit) (Calcineurin regulatory subunit)
  misc_feature (36)..(200): Homolog of NCBI NO: 13445166 NR Description: calcineurin B [Dictyostelium discoideum]
  misc_feature (36)..(210): Homolog of NCBI NO: 21592761 NR Description: calcineurin-like protein [Arabidopsis thaliana]
  misc_feature (36)..(210): Homolog of NCBI NO: 16550928 NR Description: calcineurin-like protein [Eucalyptus grandis]
  misc_feature (36)..(123): Homolog of NCBI NO: 39593284 NR Description: Hypothetical protein CBG09544 [Caenorhabditis
  misc_feature (36)..(205): Homolog of NCBI NO: 3929338 NR Description: Calcineurin B subunit (Protein phosphatase 2B subunit) (Calcineurin regulatory subunit)
RPDWEFHHASSSPSRPESSLLPAPAISAAACGPAEMGSTSSMLTQYDIEEVQDHCNHAFSQQEIVSLYHRFCQLDRNGGGFVSADEFMSVPEFAVNPLSQRLLRMLDGLNFKEFVAFLSAFSPRTSLQQKIEFIFRVYDTDCNGKVAFDDILSILRDLTGSFMTEQQRQKVLIHVLEEAGYTKDSHFTLPDFMKIIGNSELKMEVEVPID

SEQ ID NO: 12488 - protein, 175 aa, Zea mays subsp. mays
  peptide (1)..(175): Ceres Seq. ID no. 12350321
  misc_feature (31)..(59): Pfam Name: EF hand Pfam Description: EF hand
  misc_feature (1)..(175): Homolog of NCBI NO: 16550928 NR Description: calcineurin-like protein [Eucalyptus grandis]
  misc_feature (1)..(175): Homolog of NCBI NO: 18401887 NR Description: expressed protein; protein id: At3g18430.1, by cDNA: 32274., supported by cDNA: gi_17380817, supported by gi_20259020 [Arabidopsis thaliana] >gi|11994106|dbj|BAB01109.1|
  misc_feature (1)..(175): Homolog of NCBI NO: 21592761 NR Description: calcineurin-like protein [Arabidopsis thaliana]
  misc_feature (1)..(172): Homolog of NCBI NO: 1168750 NR Description: Calcineurin B subunit (Protein phosphatase 2B subunit) (Calcineurin regulatory subunit)
  misc_feature (1)..(165): Homolog of NCBI NO: 13445166 NR Description: calcineurin B [Dictyostelium discoideum]
  misc_feature (74)..(172): Homolog of NCBI NO: 17566934 NR Description: Calcium binding protein P22 like family member, N- myristoylated (22.7 kD) [Caenorhabditis elegans]
  misc_feature (1)..(88): Homolog of NCBI NO: 17566934 NR Description: Calcium binding protein P22 like family member, N- myristoylated (22.7 kD) [Caenorhabditis elegans]
  misc_feature (74)..(172): Homolog of NCBI NO: 39593284 NR Description: Hypothetical protein CBG09544 [Caenorhabditis
  misc_feature (1)..(88): Homolog of NCBI NO: 39593284 NR Description: Hypothetical protein CBG09544 [Caenorhabditis
  misc_feature (1)..(170): Homolog of NCBI NO: 3929338 NR Description: Calcineurin B subunit (Protein phosphatase 2B subunit) (Calcineurin regulatory subunit)
MGSTSSMLTQYDIEEVQDHCNHAFSQQEIVSLYHRFCQLDRNGGGFVSADEFMSVPEFAVNPLSQRLLRMLDGLNFKEFVAFLSAFSPRTSLQQKIEFIFRVYDTDCNGKVAFDDILSILRDLTGSFMTEQQRQKVLIHVLEEAGYTKDSHFTLPDFMKIIGNSELKMEVEVPID

SEQ ID NO: 12489 - protein, 169 aa, Zea mays subsp. mays
  peptide (1)..(169): Ceres Seq. ID no. 12350322
  misc_feature (25)..(53): Pfam Name: EF hand Pfam Description: EF hand
  misc_feature (1)..(169): Homolog of NCBI NO: 16550928 NR Description: calcineurin-like protein [Eucalyptus grandis]
  misc_feature (1)..(169): Homolog of NCBI NO: 18401887 NR Description: expressed protein; protein id: At3g18430.1, by cDNA: 32274., supported by cDNA: gi_17380817, supported by gi_20259020 [Arabidopsis thaliana] >gi|11994106|dbj|BAB01109.1|
  misc_feature (1)..(169): Homolog of NCBI NO: 21592761 NR Description: calcineurin-like protein [Arabidopsis thaliana]
  misc_feature (1)..(166): Homolog of NCBI NO: 1168750 NR Description: Calcineurin B subunit (Protein phosphatase 2B subunit) (Calcineurin regulatory subunit)
  misc_feature (1)..(159): Homolog of NCBI NO: 13445166 NR Description: calcineurin B [Dictyostelium discoideum]
  misc_feature (68)..(166): Homolog of NCBI NO: 17566934 NR Description: Calcium binding protein P22 like family member, N- myristoylated (22.7 kD) [Caenorhabditis elegans]
  misc_feature (1)..(82): Homolog of NCBI NO: 17566934 NR Description: Calcium binding protein P22 like family member, N- myristoylated (22.7 kD) [Caenorhabditis elegans]
  misc_feature (68)..(166): Homolog of NCBI NO: 39593284 NR Description: Hypothetical protein CBG09544 [Caenorhabditis
  misc_feature (1)..(82): Homolog of NCBI NO: 39593284 NR Description: Hypothetical protein CBG09544 [Caenorhabditis
  misc_feature (1)..(164): Homolog of NCBI NO: 3929338 NR Description: Calcineurin B subunit (Protein phosphatase 2B subunit) (Calcineurin regulatory subunit)
MLTQYDIEEVQDHCNHAFSQQEIVSLYHRFCQLDRNGGGFVSADEFMSVPEFAVNPLSQRLLRMLDGLNFKEFVAFLSAFSPRTSLQQKIEFIFRVYDTDCNGKVAFDDILSILRDLTGSFMTEQQRQKVLIHVLEEAGYTKDSHFTLPDFMKIIGNSELKMEVEVPID

SEQ ID NO: 12490 - DNA, 743 bp, Zea mays subsp. mays
  misc_feature (1)..(743): Ceres Seq. ID no. 12404618
  misc_feature: MA Experiment ID: 108504 Result: Down-regulated in Transcription
  misc_feature: MA Experiment 108504 PARAMETER Experiment Name: Zm_Drought_P Parameter: Age (day) Value: 8
  misc_feature: MA Experiment 108504 PARAMETER Experiment Name: Zm_Drought_P Parameter: Organism Value: Zea mays
  misc_feature: MA Experiment 108504 PARAMETER Experiment Name: Zm_Drought_P Parameter: Plant Line Value: 35A19
  misc_feature: MA Experiment 108504 PARAMETER Experiment Name: Zm_Drought_P Parameter: Timepoint (hr) Value: 12
  misc_feature: MA Experiment 108504 PARAMETER Experiment Name: Zm_Drought_P Parameter: Tissue Value: Aerial
  misc_feature: MA Experiment 108504 PARAMETER Experiment Name: Zm_Drought_P Parameter: Treatment Value: Drought vs. No Drought
  misc_feature: MA Experiment ID: 108523 Result: Down-regulated in Transcription
  misc_feature: MA Experiment 108523 PARAMETER Experiment Name: Zm_42deg_Heat_P Parameter: Age (day) Value: 8
  misc_feature: MA Experiment 108523 PARAMETER Experiment Name: Zm_42deg_Heat_P Parameter: Organism Value: Zea mays
  misc_feature: MA Experiment 108523 PARAMETER Experiment Name: Zm_42deg_Heat_P Parameter: Plant Line Value: 35A19
  misc_feature: MA Experiment 108523 PARAMETER Experiment Name: Zm_42deg_Heat_P Parameter: Temperature (deg C) Value: 42 vs. 22
  misc_feature: MA Experiment 108523 PARAMETER Experiment Name: Zm_42deg_Heat_P Parameter: Timepoint (hr) Value: 6
  misc_feature: MA Experiment 108523 PARAMETER Experiment Name: Zm_42deg_Heat_P Parameter: Tissue Value: Aerial
  misc_feature: MA Experiment ID: 108528 Result: Up-regulated in Transcription
  misc_feature: MA Experiment 108528 PARAMETER Experiment Name: Zm_Imbibed_Seeds_P Parameter: Age (day) Value: 5 vs. 2
  misc_feature: MA Experiment 108528 PARAMETER Experiment Name: Zm_Imbibed_Seeds_P Parameter: Organism Value: Zea mays
  misc_feature: MA Experiment 108528 PARAMETER Experiment Name: Zm_Imbibed_Seeds_P Parameter: Plant Line Value: 35A19
  misc_feature: MA Experiment 108528 PARAMETER Experiment Name: Zm_Imbibed_Seeds_P Parameter: Tissue Value: Aerial vs. Embryo
  misc_feature: MA Experiment ID: 108529 Result: Down-regulated in Transcription
  misc_feature: MA Experiment 108529 PARAMETER Experiment Name: Zm_Imbibed_Seeds_P Parameter: Age (day) Value: 5 vs. 2
  misc_feature: MA Experiment 108529 PARAMETER Experiment Name: Zm_Imbibed_Seeds_P Parameter: Organism Value: Zea mays
  misc_feature: MA Experiment 108529 PARAMETER Experiment Name: Zm_Imbibed_Seeds_P Parameter: Plant Line Value: 35A19
  misc_feature: MA Experiment 108529 PARAMETER Experiment Name: Zm_Imbibed_Seeds_P Parameter: Tissue Value: Roots vs. Embryo
  misc_feature: MA Experiment ID: 108530 Result: Up-regulated in Transcription
  misc_feature: MA Experiment 108530 PARAMETER Experiment Name: Zm_Imbibed_Seeds_P Parameter: Age (day) Value: 6 vs. 2
  misc_feature: MA Experiment 108530 PARAMETER Experiment Name: Zm_Imbibed_Seeds_P Parameter: Organism Value: Zea mays
  misc_feature: MA Experiment 108530 PARAMETER Experiment Name: Zm_Imbibed_Seeds_P Parameter: Plant Line Value: 35A19
  misc_feature: MA Experiment 108530 PARAMETER Experiment Name: Zm_Imbibed_Seeds_P Parameter: Tissue Value: Aerial vs. Embryo
  misc_feature: MA Experiment ID: 108536 Result: Down-regulated in Transcription
  misc_feature: MA Experiment 108536 PARAMETER Experiment Name: Zm_Meristem_P Parameter: Age (day) Value: 8
  misc_feature: MA Experiment 108536 PARAMETER Experiment Name: Zm_Meristem_P Parameter: Organism Value: Zea mays
  misc_feature: MA Experiment 108536 PARAMETER Experiment Name: Zm_Meristem_P Parameter: Plant Line Value: 35A19
  misc_feature: MA Experiment 108536 PARAMETER Experiment Name: Zm_Meristem_P Parameter: Tissue Value: Shoot Meristem vs. Above Shoot Meristem
  misc_feature: MA Experiment ID: 108543 Result: Up-regulated in Transcription
  misc_feature: MA Experiment ID: 108545 Result: Up-regulated in Transcription
  misc_feature: MA Experiment 108545 PARAMETER Experiment Name: Zm_Imbibed_Seeds_P Parameter: Age (day) Value: 3 vs. 2
  misc_feature: MA Experiment 108545 PARAMETER Experiment Name: Zm_Imbibed_Seeds_P Parameter: Organism Value: Zea mays
  misc_feature: MA Experiment 108545 PARAMETER Experiment Name: Zm_Imbibed_Seeds_P Parameter: Plant Line Value: 35A19
  misc_feature: MA Experiment 108545 PARAMETER Experiment Name: Zm_Imbibed_Seeds_P Parameter: Tissue Value: Aerial vs. Embryo
  misc_feature: MA Experiment ID: 108546 Result: Down-regulated in Transcription
  misc_feature: MA Experiment 108546 PARAMETER Experiment Name: Zm_Imbibed_Seeds_P Parameter: Age (day) Value: 3 vs. 2
  misc_feature: MA Experiment 108546 PARAMETER Experiment Name: Zm_Imbibed_Seeds_P Parameter: Organism Value: Zea mays
  misc_feature: MA Experiment 108546 PARAMETER Experiment Name: Zm_Imbibed_Seeds_P Parameter: Plant Line Value: 35A19
  misc_feature: MA Experiment 108546 PARAMETER Experiment Name: Zm_Imbibed_Seeds_P Parameter: Tissue Value: Roots vs. Embryo
  misc_feature: MA Experiment ID: 108547 Result: Up-regulated in Transcription
  misc_feature: MA Experiment 108547 PARAMETER Experiment Name: Zm_Imbibed_Seeds_P Parameter: Age (day) Value: 4 vs. 2
  misc_feature: MA Experiment 108547 PARAMETER Experiment Name: Zm_Imbibed_Seeds_P Parameter: Organism Value: Zea mays
  misc_feature: MA Experiment 108547 PARAMETER Experiment Name: Zm_Imbibed_Seeds_P Parameter: Plant Line Value: 35A19
  misc_feature: MA Experiment 108547 PARAMETER Experiment Name: Zm_Imbibed_Seeds_P Parameter: Tissue Value: Aerial vs. Embryo
  misc_feature: MA Experiment ID: 108556 Result: Down-regulated in Transcription
  misc_feature: MA Experiment 108556 PARAMETER Experiment Name: Zm_Drought_P Parameter: Age (day) Value: 9
  misc_feature: MA Experiment 108556 PARAMETER Experiment Name: Zm_Drought_P Parameter: Organism Value: Zea mays
  misc_feature: MA Experiment 108556 PARAMETER Experiment Name: Zm_Drought_P Parameter: Plant Line Value: 35A19
  misc_feature: MA Experiment 108556 PARAMETER Experiment Name: Zm_Drought_P Parameter: Timepoint (hr) Value: 24
  misc_feature: MA Experiment 108556 PARAMETER Experiment Name: Zm_Drought_P Parameter: Tissue Value: Aerial
  misc_feature: MA Experiment 108556 PARAMETER Experiment Name: Zm_Drought_P Parameter: Treatment Value: Drought vs. No Drought
  misc_feature: MA Experiment ID: 108559 Result: Down-regulated in Transcription
  misc_feature: MA Experiment 108559 PARAMETER Experiment Name: Zm_5mM_NO_P Parameter: Age (day) Value: 8
  misc_feature: MA Experiment 108559 PARAMETER Experiment Name: Zm_5mM_NO_P Parameter: Organism Value: Zea mays
  misc_feature: MA Experiment 108559 PARAMETER Experiment Name: Zm_5mM_NO_P Parameter: Plant Line Value: 35A19
  misc_feature: MA Experiment 108559 PARAMETER Experiment Name: Zm_5mM_NO_P Parameter: Timepoint (hr) Value: 12
  misc_feature: MA Experiment 108559 PARAMETER Experiment Name: Zm_5mM_NO_P Parameter: Tissue Value: Aerial
  misc_feature: MA Experiment 108559 PARAMETER Experiment Name: Zm_5mM_NO_P Parameter: Treatment Value: 5mM NO vs. No Treatment
  misc_feature: MA Experiment ID: 20000478 Result: Down-regulated in Transcription
  misc_feature: MA Experiment 20000478 PARAMETER Experiment Name: Zm_5mM_SA_P Parameter: Age (day) Value: 11
  misc_feature: MA Experiment 20000478 PARAMETER Experiment Name: Zm_5mM_SA_P Parameter: Organism Value: Zea mays
  misc_feature: MA Experiment 20000478 PARAMETER Experiment Name: Zm_5mM_SA_P Parameter: Plant Line Value: 35A19
  misc_feature: MA Experiment 20000478 PARAMETER Experiment Name: Zm_5mM_SA_P Parameter: Timepoint (hr) Value: 72
  misc_feature: MA Experiment 20000478 PARAMETER Experiment Name: Zm_5mM_SA_P Parameter: Tissue Value: Aerial
  misc_feature: MA Experiment 20000478 PARAMETER Experiment Name: Zm_5mM_SA_P Parameter: Treatment Value: 5mM SA vs. No Treatment
  misc_feature: MA Experiment ID: 20000626 Result: Down-regulated in Transcription
  misc_feature: MA Experiment 20000626 PARAMETER Experiment Name: Zm_Herbicide-Treatments_P Parameter: Timepoint (hr) Value: 12
  misc_feature: MA Experiment 20000626 PARAMETER Experiment Name: Zm_Herbicide-Treatments_P Parameter: Tissue Value: Aerial
  misc_feature: MA Experiment 20000626 PARAMETER Experiment Name: Zm_Herbicide-Treatments_P Parameter: Treatment Value: Roundup vs. No Treatment
  misc_feature: MA Experiment ID: 20001608 Result: Up-regulated in Transcription
  misc_feature: MA Experiment 20001608 PARAMETER Experiment Name: Zm_50ppm_KNO3_L-to-H_P Parameter: Age (day) Value: 21
  misc_feature: MA Experiment 20001608 PARAMETER Experiment Name: Zm_50ppm_KNO3_L-to-H_P Parameter: Organism Value: Zea mays
  misc_feature: MA Experiment 20001608 PARAMETER Experiment Name: Zm_50ppm_KNO3_L-to-H_P Parameter: Plant Line Value: 35A19
  misc_feature: MA Experiment 20001608 PARAMETER Experiment Name: Zm_50ppm_KNO3_L-to-H_P Parameter: Timepoint (hr) Value: 48
  misc_feature: MA Experiment 20001608 PARAMETER Experiment Name: Zm_50ppm_KNO3_L-to-H_P Parameter: Tissue Value: Shoots
  misc_feature: MA Experiment 20001608 PARAMETER Experiment Name: Zm_50ppm_KNO3_L-to-H_P Parameter: Treatment Value: 50ppm KNO3 vs. 50ppm KCl
atttttcttccgcacgcatccctcgccgcctcgcgcctgcaccggagaatcggtcccattgcccgcgaacctgcgtgtgtgaggtatcgaacaccccaagatggcaactttcgcctcaccactcctctgcaacttcatggccatcgaacagaagaacgcgcctcagctgaccaacagcagaaagccgtccctgcgcctgagcttcccaacgacaaggagcatgccaacattgccgttgccgtgcttcagagcgaggccagactggcgcgtcgccgccgtctacaaggtgaagctcatcggccccgaaggacaggagagcgtgatccaagtgccagaggacagctacatcctggacgcggccgaggaggccggtatagacctgccctactcctgccgcgctggtgcgtgctccacgtgcgccggcaaggtgctggagggctccgtcgaccaggcggaccagtcgttcctggacgacgcgcaggtcggtgccgggtatgcgctcacctgcgtcgcgtacccgacgtctgactgcgtcatccagacgcacagggaggccgacctgtactaggcagcccagtcccacgcgtaaccggatcaacgactgtgcacttccatagctcccattcggattcgatcttgagttcttgacactgattcgcacttgtgcttttgtccttgcaggtagctggaactagtagtgcattctttaatcgttattgttcaagtgtaggttgctttggttt

SEQ ID NO: 12491 - protein, 175 aa, Zea mays subsp. mays
  peptide (1)..(175): Ceres Seq. ID no. 12404619
IFLPHASLAASRLHRRIGPIAREPACVRYRTPQDGNFRLTTPLQLHGHRTEERASADQQQKAVPAPELPNDKEHANIAVAVLQSEARLARRRRLQGEAHRPRRTGERDPSARGQLHPGRGRGGRYRPALLLPRWCVLHVRRQGAGGLRRPGGPVVPGRRAGRCRVCAHLRRVPDV

SEQ ID NO: 12492 - protein, 155 aa, Zea mays subsp. mays
  peptide (1)..(155): Ceres Seq. ID no. 12404620
  misc_feature (63)..(142): Pfam Name: 2Fe-2S iron-sulfur cluster binding domain Pfam Description: 2Fe-2S iron-sulfur cluster binding domain
  misc_feature (13)..(155): Homolog of NCBI NO: 38346336 NR Description: OSJNBa0073L04.7 [Oryza sativa (japonica
  misc_feature (2)..(155): Homolog of NCBI NO: 119958 NR Description: Ferredoxin III, chloroplast precursor (Fd III)
  misc_feature (1)..(155): Homolog of NCBI NO: 40714664 NR Description: putative ferredoxin [Oryza sativa (japonica
  misc_feature (34)..(154): Homolog of NCBI NO: 2129915 NR Description: ferredoxin [2Fe-2S] fd1 precursor,
  misc_feature (59)..(155): Homolog of NCBI NO: 65771 NR Description: ferredoxin [2Fe-2S] - Fischerella sp
  misc_feature (59)..(155): Homolog of NCBI NO: 3334451 NR Description: Ferredoxin >gi|2623659|gb|AAC04840.1| ferredoxin
  misc_feature (22)..(155): Homolog of NCBI NO: 15225888 NR Description: putative ferredoxin; protein id: At2g27510.1, by cDNA: 26333. [Arabidopsis thaliana] >gi|25282678|pir||G84673
  misc_feature (59)..(155): Homolog of NCBI NO: 11467348 NR Description: ferredoxin [Cyanophora paradoxa]
  misc_feature (59)..(155): Homolog of NCBI NO: 1421549 NR Description: Iron-Sulfur Protein Mol_id: 1; Molecule:
  misc_feature (59)..(155): Homolog of NCBI NO: 16331399 NR Description: ferredoxin [Synechocystis sp. PCC 6803]
MATFASPLLCNFMAIEQKNAPQLTNSRKPSLRLSFPTTRSMPTLPLPCFRARPDWRVAAVYKVKLIGPEGQESVIQVPEDSYILDAAEEAGIDLPYSCRAGACSTCAGKVLEGSVDQADQSFLDDAQVGAGYALTCVAYPTSDCVIQTHREADLY

SEQ ID NO: 12493 - protein, 143 aa, Zea mays subsp. mays
  peptide (1)..(143): Ceres Seq. ID no. 12404621
  misc_feature (51)..(130): Pfam Name: 2Fe-2S iron-sulfur cluster binding domain Pfam Description: 2Fe-2S iron-sulfur cluster binding domain
  misc_feature (1)..(143): Homolog of NCBI NO: 38346336 NR Description: OSJNBa0073L04.7 [Oryza sativa (japonica
  misc_feature (1)..(143): Homolog of NCBI NO: 119958 NR Description: Ferredoxin III, chloroplast precursor (Fd III)
  misc_feature (1)..(143): Homolog of NCBI NO: 40714664 NR Description: putative ferredoxin [Oryza sativa (japonica
  misc_feature (22)..(142): Homolog of NCBI NO: 2129915 NR Description: ferredoxin [2Fe-2S] fd1 precursor,
  misc_feature (47)..(143): Homolog of NCBI NO: 65771 NR Description: ferredoxin [2Fe-2S] - Fischerella sp
  misc_feature (47)..(143): Homolog of NCBI NO: 3334451 NR Description: Ferredoxin >gi|2623659|gb|AAC04840.1| ferredoxin
  misc_feature (10)..(143): Homolog of NCBI NO: 15225888 NR Description: putative ferredoxin; protein id: At2g27510.1, by cDNA: 26333. [Arabidopsis thaliana] >gi|25282678|pir||G84673
  misc_feature (47)..(143): Homolog of NCBI NO: 11467348 NR Description: ferredoxin [Cyanophora paradoxa]
  misc_feature (47)..(143): Homolog of NCBI NO: 1421549 NR Description: Iron-Sulfur Protein Mol_id: 1; Molecule:
  misc_feature (47)..(143): Homolog of NCBI NO: 16331399 NR Description: ferredoxin [Synechocystis sp. PCC 6803]
MAIEQKNAPQLTNSRKPSLRLSFPTTRSMPTLPLPCFRARPDWRVAAVYKVKLIGPEGQESVIQVPEDSYILDAAEEAGIDLPYSCRAGACSTCAGKVLEGSVDQADQSFLDDAQVGAGYALTCVAYPTSDCVIQTHREADLY

SEQ ID NO: 12494 - DNA, 910 bp, Zea mays subsp. mays
  misc_feature (1)..(910): Ceres Seq. ID no. 12368950
  misc_feature: MA Experiment ID: 108515 Result: Up-regulated in Transcription
  misc_feature: MA Experiment 108515 PARAMETER Experiment Name: Zm_2mM_SA_P Parameter: Age (day) Value: 8
  misc_feature: MA Experiment 108515 PARAMETER Experiment Name: Zm_2mM_SA_P Parameter: Organism Value: Zea mays
  misc_feature: MA Experiment 108515 PARAMETER Experiment Name: Zm_2mM_SA_P Parameter: Plant Line Value: 35A19
  misc_feature: MA Experiment 108515 PARAMETER Experiment Name: Zm_2mM_SA_P Parameter: Timepoint (hr) Value: 12
  misc_feature: MA Experiment 108515 PARAMETER Experiment Name: Zm_2mM_SA_P Parameter: Tissue Value: Aerial
  misc_feature: MA Experiment 108515 PARAMETER Experiment Name: Zm_2mM_SA_P Parameter: Treatment Value: 2mM SA vs. No Treatment
  misc_feature: MA Experiment ID: 108527 Result: Up-regulated in Transcription
  misc_feature: MA Experiment 108527 PARAMETER Experiment Name: Zm_5mM_NO_P Parameter: Age (day) Value: 8
  misc_feature: MA Experiment 108527 PARAMETER Experiment Name: Zm_5mM_NO_P Parameter: Organism Value: Zea mays
  misc_feature: MA Experiment 108527 PARAMETER Experiment Name: Zm_5mM_NO_P Parameter: Plant Line Value: 35A19
  misc_feature: MA Experiment 108527 PARAMETER Experiment Name: Zm_5mM_NO_P Parameter: Timepoint (hr) Value: 6
  misc_feature: MA Experiment 108527 PARAMETER Experiment Name: Zm_5mM_NO_P Parameter: Tissue Value: Aerial
  misc_feature: MA Experiment 108527 PARAMETER Experiment Name: Zm_5mM_NO_P Parameter: Treatment Value: 5mM NO vs. No Treatment
  misc_feature: MA Experiment ID: 108535 Result: Down-regulated in Transcription
  misc_feature: MA Experiment 108535 PARAMETER Experiment Name: Zm_Meristem_P Parameter: Age (day) Value: 8
  misc_feature: MA Experiment 108535 PARAMETER Experiment Name: Zm_Meristem_P Parameter: Organism Value: Zea mays
  misc_feature: MA Experiment 108535 PARAMETER Experiment Name: Zm_Meristem_P Parameter: Plant Line Value: 35A19
  misc_feature: MA Experiment 108535 PARAMETER Experiment Name: Zm_Meristem_P Parameter: Tissue Value: Root Meristem vs. Above Root Meristem
  misc_feature: MA Experiment ID: 108545 Result: Down-regulated in Transcription
  misc_feature: MA Experiment 108545 PARAMETER Experiment Name: Zm_Imbibed_Seeds_P Parameter: Age (day) Value: 3 vs. 2
  misc_feature: MA Experiment 108545 PARAMETER Experiment Name: Zm_Imbibed_Seeds_P Parameter: Organism Value: Zea mays
  misc_feature: MA Experiment 108545 PARAMETER Experiment Name: Zm_Imbibed_Seeds_P Parameter: Plant Line Value: 35A19
  misc_feature: MA Experiment 108545 PARAMETER Experiment Name: Zm_Imbibed_Seeds_P Parameter: Tissue Value: Aerial vs. Embryo
  misc_feature: MA Experiment ID: 108547 Result: Down-regulated in Transcription
  misc_feature: MA Experiment 108547 PARAMETER Experiment Name: Zm_Imbibed_Seeds_P Parameter: Age (day) Value: 4 vs. 2
  misc_feature: MA Experiment 108547 PARAMETER Experiment Name: Zm_Imbibed_Seeds_P Parameter: Organism Value: Zea mays
  misc_feature: MA Experiment 108547 PARAMETER Experiment Name: Zm_Imbibed_Seeds_P Parameter: Plant Line Value: 35A19
  misc_feature: MA Experiment 108547 PARAMETER Experiment Name: Zm_Imbibed_Seeds_P Parameter: Tissue Value: Aerial vs. Embryo
  misc_feature: MA Experiment ID: 108559 Result: Up-regulated in Transcription
  misc_feature: MA Experiment 108559 PARAMETER Experiment Name: Zm_5mM_NO_P Parameter: Age (day) Value: 8
  misc_feature: MA Experiment 108559 PARAMETER Experiment Name: Zm_5mM_NO_P Parameter: Organism Value: Zea mays
  misc_feature: MA Experiment 108559 PARAMETER Experiment Name: Zm_5mM_NO_P Parameter: Plant Line Value: 35A19
  misc_feature: MA Experiment 108559 PARAMETER Experiment Name: Zm_5mM_NO_P Parameter: Timepoint (hr) Value: 12
  misc_feature: MA Experiment 108559 PARAMETER Experiment Name: Zm_5mM_NO_P Parameter: Tissue Value: Aerial
  misc_feature: MA Experiment 108559 PARAMETER Experiment Name: Zm_5mM_NO_P Parameter: Treatment Value: 5mM NO vs. No Treatment
  misc_feature: MA Experiment ID: 20000477 Result: Up-regulated in Transcription
  misc_feature: MA Experiment 20000477 PARAMETER Experiment Name: Zm_5mM_SA_P Parameter: Age (day) Value: 10
  misc_feature: MA Experiment 20000477 PARAMETER Experiment Name: Zm_5mM_SA_P Parameter: Organism Value: Zea mays
  misc_feature: MA Experiment 20000477 PARAMETER Experiment Name: Zm_5mM_SA_P Parameter: Plant Line Value: 35A19
  misc_feature: MA Experiment 20000477 PARAMETER Experiment Name: Zm_5mM_SA_P Parameter: Timepoint (hr) Value: 48
  misc_feature: MA Experiment 20000477 PARAMETER Experiment Name: Zm_5mM_SA_P Parameter: Tissue Value: Aerial
  misc_feature: MA Experiment 20000477 PARAMETER Experiment Name: Zm_5mM_SA_P Parameter: Treatment Value: 5mM SA vs. No Treatment
  misc_feature: MA Experiment ID: 20000478 Result: Up-regulated in Transcription
  misc_feature: MA Experiment 20000478 PARAMETER Experiment Name: Zm_5mM_SA_P Parameter: Age (day) Value: 11
  misc_feature: MA Experiment 20000478 PARAMETER Experiment Name: Zm_5mM_SA_P Parameter: Organism Value: Zea mays
  misc_feature: MA Experiment 20000478 PARAMETER Experiment Name: Zm_5mM_SA_P Parameter: Plant Line Value: 35A19
  misc_feature: MA Experiment 20000478 PARAMETER Experiment Name: Zm_5mM_SA_P Parameter: Timepoint (hr) Value: 72
  misc_feature: MA Experiment 20000478 PARAMETER Experiment Name: Zm_5mM_SA_P Parameter: Tissue Value: Aerial
  misc_feature: MA Experiment 20000478 PARAMETER Experiment Name: Zm_5mM_SA_P Parameter: Treatment Value: 5mM SA vs. No Treatment
  misc_feature: MA Experiment ID: 20001608 Result: Down-regulated in Transcription
  misc_feature: MA Experiment 20001608 PARAMETER Experiment Name: Zm_50ppm_KNO3_L-to-H_P Parameter: Age (day) Value: 21
  misc_feature: MA Experiment 20001608 PARAMETER Experiment Name: Zm_50ppm_KNO3_L-to-H_P Parameter: Organism Value: Zea mays
  misc_feature: MA Experiment 20001608 PARAMETER Experiment Name: Zm_50ppm_KNO3_L-to-H_P Parameter: Plant Line Value: 35A19
  misc_feature: MA Experiment 20001608 PARAMETER Experiment Name: Zm_50ppm_KNO3_L-to-H_P Parameter: Timepoint (hr) Value: 48
  misc_feature: MA Experiment 20001608 PARAMETER Experiment Name: Zm_50ppm_KNO3_L-to-H_P Parameter: Tissue Value: Shoots
  misc_feature: MA Experiment 20001608 PARAMETER Experiment Name: Zm_50ppm_KNO3_L-to-H_P Parameter: Treatment Value: 50ppm KNO3 vs. 50ppm KCl
aacacgctaccgtctcacagccgtaaacgcccctcccggatcccgctagttcgccaccgccgcccgcccgcccgccgttcgcctcatcatggccgcctcgtcgaccgccacctccgtccacgacttcatcgtcaaggatgcgagcggcaaagacgttgacctcagcacctacaaggggaaggttcttctcattgttaacgtcgcatcccagtgtggcttaaccaactccaactacactgagctggcccagctctatgagaagtacaaggaccaaggctttgaaatcctggctttcccatgcaaccagtttggtgggcaggagcctggtaccaatgaggagattgtccagtttgcctgcacacgcttcaaggctgagtaccccatcttcgacaaggttgatgtcaacggtagcaatgctgcgcccatctacaagttcttgaaatctagcaaaggtggccttttcggcgacagcatcaagtggaacttttccaagttcttggttgacaaggagggacgtgttgtggatcgctatgctccaaccacttcacccctgagcattgagaaggatatcaagaagctgcttgggagctcttaatcagtatctgggtgcaaagctgtagaaaaacatgtatcaacaatgccctgagcgataaaatatatgataagttgtattaataaagtattgtcgtacttgagaggttgcagtatctgctctatttcccttgcatacactccgtacttgtatatccccttcggagctgatttggtgacccgggatcccaggaggatcggaggggattgagaaggaaattagttgatttcccccttaatccccttcaatcctcccgggatccccttgtcaccaaatcagccctcgaatgaattccaatgctgtatcagtttgctaccc

SEQ ID NO: 12495 - protein, 168 aa, Zea mays subsp. mays
  peptide (1)..(168): Ceres Seq. ID no. 12368951
  misc_feature (9)..(118): Pfam Name: Glutathione peroxidase Pfam Description: Glutathione peroxidase
  misc_feature (1)..(167): Homolog of NCBI NO: 22268405 NR Description: putative glutathione peroxidase [Zea mays]
  misc_feature (1)..(168): Homolog of NCBI NO: 21360380 NR Description: glutathione peroxidase 1 [Oryza sativa]
  misc_feature (1)..(168): Homolog of NCBI NO: 34334012 NR Description: cytosolic glutathione peroxidase [Triticum
  misc_feature (2)..(168): Homolog of NCBI NO: 27544804 NR Description: phospholipid hydroperoxide glutathione
  misc_feature (2)..(168): Homolog of NCBI NO: 6179600 NR Description: GPX12Hv, glutathione peroxidase-like protein
  misc_feature (1)..(168): Homolog of NCBI NO: 38345591 NR Description: OSJNBb0012E24.9 [Oryza sativa (japonica
  misc_feature (1)..(165): Homolog of NCBI NO: 6179604 NR Description: glutathione peroxidase-like protein GPX54Hv
  misc_feature (1)..(166): Homolog of NCBI NO: 20138157 NR Description: Probable phospholipid hydroperoxide glutathione
  misc_feature (1)..(166): Homolog of NCBI NO: 30681827 NR Description: glutathione peroxidase, putative [Arabidopsis >gi|14532478|gb|AAK63967.1| AT4g11600/T5C23_30 [Arabidopsis >gi|18655355|gb|AAL76133.1| AT4g11600/T5C23_30 [Arabidopsis
  misc_feature (3)..(165): Homolog of NCBI NO: 544437 NR Description: Probable phospholipid hydroperoxide glutathione
MAASSTATSVHDFIVKDASGKDVDLSTYKGKVLLIVNVASQCGLTNSNYTELAQLYEKYKDQGFEILAFPCNQFGGQEPGTNEEIVQFACTRFKAEYPIFDKVDVNGSNAAPIYKFLKSSKGGLFGDSIKWNFSKFLVDKEGRVVDRYAPTTSPLSIEKDIKKLLGSS

SEQ ID NO: 12496 - DNA, 1202 bp, Zea mays subsp. mays
  misc_feature (1)..(1202): Ceres Seq. ID no. 12350843
  misc_feature: MA Experiment ID: 108529 Result: Up-regulated in Transcription
  misc_feature: MA Experiment 108529 PARAMETER Experiment Name: Zm_Imbibed_Seeds_P Parameter: Age (day) Value: 5 vs. 2
  misc_feature: MA Experiment 108529 PARAMETER Experiment Name: Zm_Imbibed_Seeds_P Parameter: Organism Value: Zea mays
  misc_feature: MA Experiment 108529 PARAMETER Experiment Name: Zm_Imbibed_Seeds_P Parameter: Plant Line Value: 35A19
  misc_feature: MA Experiment 108529 PARAMETER Experiment Name: Zm_Imbibed_Seeds_P Parameter: Tissue Value: Roots vs. Embryo
  misc_feature: MA Experiment ID: 108535 Result: Down-regulated in Transcription
  misc_feature: MA Experiment 108535 PARAMETER Experiment Name: Zm_Meristem_P Parameter: Age (day) Value: 8
  misc_feature: MA Experiment 108535 PARAMETER Experiment Name: Zm_Meristem_P Parameter: Organism Value: Zea mays
  misc_feature: MA Experiment 108535 PARAMETER Experiment Name: Zm_Meristem_P Parameter: Plant Line Value: 35A19
  misc_feature: MA Experiment 108535 PARAMETER Experiment Name: Zm_Meristem_P Parameter: Tissue Value: Root Meristem vs. Above Root Meristem
  misc_feature: MA Experiment ID: 108543 Result: Up-regulated in Transcription
  misc_feature: MA Experiment ID: 108546 Result: Up-regulated in Transcription
  misc_feature: MA Experiment 108546 PARAMETER Experiment Name: Zm_Imbibed_Seeds_P Parameter: Age (day) Value: 3 vs. 2
  misc_feature: MA Experiment 108546 PARAMETER Experiment Name: Zm_Imbibed_Seeds_P Parameter: Organism Value: Zea mays
  misc_feature: MA Experiment 108546 PARAMETER Experiment Name: Zm_Imbibed_Seeds_P Parameter: Plant Line Value: 35A19
  misc_feature: MA Experiment 108546 PARAMETER Experiment Name: Zm_Imbibed_Seeds_P Parameter: Tissue Value: Roots vs. Embryo
  misc_feature: MA Experiment ID: 20000478 Result: Up-regulated in Transcription
  misc_feature: MA Experiment 20000478 PARAMETER Experiment Name: Zm_5mM_SA_P Parameter: Age (day) Value: 11
  misc_feature: MA Experiment 20000478 PARAMETER Experiment Name: Zm_5mM_SA_P Parameter: Organism Value: Zea mays
  misc_feature: MA Experiment 20000478 PARAMETER Experiment Name: Zm_5mM_SA_P Parameter: Plant Line Value: 35A19
  misc_feature: MA Experiment 20000478 PARAMETER Experiment Name: Zm_5mM_SA_P Parameter: Timepoint (hr) Value: 72
  misc_feature: MA Experiment 20000478 PARAMETER Experiment Name: Zm_5mM_SA_P Parameter: Tissue Value: Aerial
  misc_feature: MA Experiment 20000478 PARAMETER Experiment Name: Zm_5mM_SA_P Parameter: Treatment Value: 5mM SA vs. No Treatment
ttagcaaagcgtacatccctccaacaaaccttgagttgagagaggagagaggagagaggagacagcaagcgacacaacacagaggtaaccggctcacgcctgtctcggtggccgtgggcaatcatggccactgtgggacagtccggggccctgaggagggtcaccgtgcactacgccaactcgcccacaggcagcacggtggcagaggtgagctttgacgaccttgacgacgagctgctcctgtttgtgctcgccgatcttcttcctggccaggaaggtttacaccagtcgatcttggaaggaacatacaacaaccaggagaaccacatgagaggtgcagcacccagtgcaccatatggttattcacggccagaggaataccgtgcagagagcagcactgctgcagcagcagcaactggttctaggaattcaggcatggatgaacagatcgcctcggacttcgagtacgccaagcagctgcagcaggagatggaggacctcagcgtcaaagacgaagacgacaacgatatcagctgcgtgccgtctccatctgactctgacgatgagcacgagcatcatgacgaagaggaagaggctgacaggcaggaggacggtgatggtgatgatggtccagacaacatgacttatgagcaaggacaggcacttgtagaatctgtggggactgagtacagaggtctatccgatgagctcatctcctacctgcagtcatggaagtacaagtcttcagggctcttctcccggaaaacaaaccatgaagactgcccgatctgcctgtccactttcagaaaccgggaaaccatgataacgttgccgtgcaggcatcactaccacgcagcttgtgtcaccagatggctcaaggtcaacaagacatgccctgtatgcaaatacgaactgtttggaccttcctaggatccgaccacgtcgacgatggagctgagaagataatgatgatgacgacgacaacgacagatggttgtgtcatctgctctctttttttagcgccaagaaaactggaaatgaaaaagggaaatcaatccgaaaggagaatagaaattaggaagtataggtagaatatctctcttgccagtgactatgtatttgttgtgcgatgaattaagcatacctcgtgctatttatgatgtattggatttttttatatataagaacttccccgtggaatc

SEQ ID NO: 12497 - protein, 268 aa, Zea mays subsp. mays
  peptide (1)..(268): Ceres Seq. ID no. 12350844
  misc_feature (220)..(260): Pfam Name: Zinc finger, C3HC4 type (RING finger) Pfam Description: Zinc finger, C3HC4 type (RING finger)
  misc_feature (1)..(268): Homolog of NCBI NO: 34898016 NR Description: ESTs C26000(C11448),AU082130(C11448) correspond
  misc_feature (11)..(266): Homolog of NCBI NO: 38567912 NR Description: OSJNBa0088I22.8 [Oryza sativa (japonica
  misc_feature (126)..(268): Homolog of NCBI NO: 22331928 NR Description: putative protein; protein id: At3g63530.1 thaliana] >gi|21104275|emb|CAD32249.1| putative protein
  misc_feature (102)..(264): Homolog of NCBI NO: 21536693 NR Description: unknown [Arabidopsis thaliana]
  misc_feature (102)..(264): Homolog of NCBI NO: 18402411 NR Description: expressed protein; protein id: At3g19910.1, by cDNA: 108568., supported by cDNA: gi_15010577, supported by gi_15028362, supported by cDNA: gi_19310706 [Arabidopsis
  misc_feature (84)..(268): Homolog of NCBI NO: 10334499 NR Description: hypothetical protein [Cicer arietinum]
  misc_feature (88)..(260): Homolog of NCBI NO: 15232746 NR Description: zinc-finger protein-like protein; protein id:
  misc_feature (171)..(261): Homolog of NCBI NO: 11358785 NR Description: RING-H2 finger protein RHG1a [imported] -
MATVGQSGALRRVTVHYANSPTGSTVAEVSFDDLDDELLLFVLADLLPGQEGLHQSILEGTYNNQENHMRGAAPSAPYGYSRPEEYRAESSTAAAAATGSRNSGMDEQIASDFEYAKQLQQEMEDLSVKDEDDNDISCVPSPSDSDDEHEHHDEEEEADRQEDGDGDDGPDNMTYEQGQALVESVGTEYRGLSDELISYLQSWKYKSSGLFSRKTNHEDCPICLSTFRNRETMITLPCRHHYHAACVTRWLKVNKTCPVCKYELFGPS

SEQ ID NO: 12498 - protein, 200 aa, Zea mays subsp. mays
  peptide (1)..(200): Ceres Seq. ID no. 12350845
  misc_feature (152)..(192): Pfam Name: Zinc finger, C3HC4 type (RING finger) Pfam Description: Zinc finger, C3HC4 type (RING finger)
  misc_feature (1)..(200): Homolog of NCBI NO: 34898016 NR Description: ESTs C26000(C11448),AU082130(C11448) correspond
  misc_feature (1)..(198): Homolog of NCBI NO: 38567912 NR Description: OSJNBa0088I22.8 [Oryza sativa (japonica
  misc_feature (58)..(200): Homolog of NCBI NO: 22331928 NR Description: putative protein; protein id: At3g63530.1 thaliana] >gi|21104275|emb|CAD32249.1| putative protein
  misc_feature (34)..(196): Homolog of NCBI NO: 21536693 NR Description: unknown [Arabidopsis thaliana]
  misc_feature (34)..(196): Homolog of NCBI NO: 18402411 NR Description: expressed protein; protein id: At3g19910.1, by cDNA: 108568., supported by cDNA: gi_15010577, supported by gi_15028362, supported by cDNA: gi_19310706 [Arabidopsis
  misc_feature (16)..(200): Homolog of NCBI NO: 10334499 NR Description: hypothetical protein [Cicer arietinum]
  misc_feature (20)..(192): Homolog of NCBI NO: 15232746 NR Description: zinc-finger protein-like protein; protein id:
  misc_feature (103)..(193): Homolog of NCBI NO: 11358785 NR Description: RING-H2 finger protein RHG1a [imported] -
MRGAAPSAPYGYSRPEEYRAESSTAAAAATGSRNSGMDEQIASDFEYAKQLQQEMEDLSVKDEDDNDISCVPSPSDSDDEHEHHDEEEEADRQEDGDGDDGPDNMTYEQGQALVESVGTEYRGLSDELISYLQSWKYKSSGLFSRKTNHEDCPICLSTFRNRETMITLPCRHHYHAACVTRWLKVNKTCPVCKYELFGPS

SEQ ID NO: 12499 - protein, 164 aa, Zea mays subsp. mays
  peptide (1)..(164): Ceres Seq. ID no. 12350846
  misc_feature (116)..(156): Pfam Name: Zinc finger, C3HC4 type (RING finger) Pfam Description: Zinc finger, C3HC4 type (RING finger)
  misc_feature (1)..(164): Homolog of NCBI NO: 34898016 NR Description: ESTs C26000(C11448),AU082130(C11448) correspond
  misc_feature (1)..(162): Homolog of NCBI NO: 38567912 NR Description: OSJNBa0088I22.8 [Oryza sativa (japonica
  misc_feature (22)..(164): Homolog of NCBI NO: 22331928 NR Description: putative protein; protein id: At3g63530.1 thaliana] >gi|21104275|emb|CAD32249.1| putative protein
  misc_feature (1)..(160): Homolog of NCBI NO: 21536693 NR Description: unknown [Arabidopsis thaliana]
  misc_feature (1)..(160): Homolog of NCBI NO: 18402411 NR Description: expressed protein; protein id: At3g19910.1, by cDNA: 108568., supported by cDNA: gi_15010577, supported by gi_15028362, supported by cDNA: gi_19310706 [Arabidopsis
  misc_feature (1)..(164): Homolog of NCBI NO: 10334499 NR Description: hypothetical protein [Cicer arietinum]
  misc_feature (1)..(156): Homolog of NCBI NO: 15232746 NR Description: zinc-finger protein-like protein; protein id:
  misc_feature (67)..(157): Homolog of NCBI NO: 11358785 NR Description: RING-H2 finger protein RHG1a [imported] -
MDEQIASDFEYAKQLQQEMEDLSVKDEDDNDISCVPSPSDSDDEHEHHDEEEEADRQEDGDGDDGPDNMTYEQGQALVESVGTEYRGLSDELISYLQSWKYKSSGLFSRKTNHEDCPICLSTFRNRETMITLPCRHHYHAACVTRWLKVNKTCPVCKYELFGPS

SEQ ID NO: 12500 - DNA, 1795 bp, Zea mays subsp. mays
  misc_feature (1)..(1795): Ceres Seq. ID no. 12411527
  misc_feature: MA Experiment ID: 108534 Result: Up-regulated in Transcription
  misc_feature: MA Experiment 108534 PARAMETER Experiment Name: Zm_4deg_Cold_P Parameter: Age (hr) Value: 8
  misc_feature: MA Experiment 108534 PARAMETER Experiment Name: Zm_4deg_Cold_P Parameter: Organism Value: Zea mays
  misc_feature: MA Experiment 108534 PARAMETER Experiment Name: Zm_4deg_Cold_P Parameter: Plant Line Value: 35A19
  misc_feature: MA Experiment 108534 PARAMETER Experiment Name: Zm_4deg_Cold_P Parameter: Temperature (deg C) Value: 4 vs. 22
  misc_feature: MA Experiment 108534 PARAMETER Experiment Name: Zm_4deg_Cold_P Parameter: Timepoint (hr) Value: 6
  misc_feature: MA Experiment 108534 PARAMETER Experiment Name: Zm_4deg_Cold_P Parameter: Tissue Value: Aerial
acagaacagggagggaggtagagaggactagaggagtcggagcctcggaggagggagagggcgaagagtagggggaaccaaatcttggaggggaaacgtagagttctttcgtggaggaagcgggtgcaactggaggagggtagaggtagctcaatagatctactgctgtcgggggagttaatgcaaagctgagttgctgcacgttggctttcttcagagatggcttcagctggtgtagccccatctgggtacaaaaacagcagcagcactagcattggtgccgagaagttgcaagatcagatgaacgagctaaagattagagatgataaggaagttgaagcaaccataattaatgggaaagggactgaaactgggcacataattgtcaccactactggtggcaagaatggtcaaccaaaacagacagtgagctacatggctgagcgcattgtaggtcaaggttcttttgggattgtcttccaggctaagtgtttggagacgggtgagactgttgccataaagaaggttcttcaggataagcgttacaagaaccgtgagttgcagaccatgcgccttcttgaccaccctaatgttgttgctttgaagcattgcttcttttcaactactgagaaggatgagctttatctgaacttggtccttgagtatgtgccggagacagttcatcgagttgtgaagcatcacaacaagatgaaccaacgcatgccacttatttatgtgaagctgtatatgtaccagatatgtagggcattggcttacattcatggcactattggtgtctgccacagagatattaagccacaaaaccttctggtgaacccacacacccaccagcttaaactatgtgactttggcagtgcaaaagttctggtcaagggggaaccaaacatatcgtacatctgctcccgatactatagggctccagagctcatatttggtgccactgagtataccacagcgattgacatttggtctgctggatgtgttcttgctgagcttatgctagggcagcctttgtttccgggtgaaagtggtgtggaccaacttgtcgaaatcatcaaggtcctcggtacgccaacaagggaagaaattaaatgcatgaacccaaattacacagagtttaagttcccacaaatcaaagcacacccatggcacaaggtattccacaaaaggatgccgccagaagctgttgatctggtctctcggctactccagtactccccaaatctgagatgcactgctatggaggcacttgttcacccattctttgatgagcttcgagatcctaatactcgccttccaaatggtcgctttttgccaccactattcaatttcaagcctcacgaacttaaaggagtcccatcagacattgtcgcgaaattgattccagaacatgcaaagaagcaatgctcctatgttggattgtgaaatgaccgcgccttgagactggaacctgtggttgcaactgtgcatttcccctgggatgtttgacgatctgaggcatgcgagcctgttgttgaagatgcaaggttacgtacttgtacgacaatgtgacctgtgtagctgagtagtctatgtcgcagtgacatgtaacggcaccccccttcctactaactgacgcttactcgagattgccatagttgatcttgtaatttgttatagagcagtatgaatgtatttatggtagcttgaatctatgtatggattcacttcgtttttccatgttcccttgtctccagacccagattgctaccgtattgtttcagaattcctagcc

SEQ ID NO: 12501 - protein, 408 aa, Zea mays subsp. mays
  peptide (1)..(408): Ceres Seq. ID no. 12411528
  misc_feature (72)..(356): Pfam Name: Protein kinase domain Pfam Description: Protein kinase domain
  misc_feature (1)..(407): Homolog of NCBI NO: 481018 NR Description: protein kinase MSK-3 (EC 2.7.1.-) [similarity] -
  misc_feature (1)..(407): Homolog of NCBI NO: 11182434 NR Description: GLYCOGEN SYNTHASE KINASE-3 HOMOLOG MSK-3
  misc_feature (1)..(408): Homolog of NCBI NO: 18421039 NR Description: shaggy-like kinase alpha; protein id: supported by cDNA: gi_15028148, supported by cDNA: gi_16226767
  misc_feature (1)..(408): Homolog of NCBI NO: 11133532 NR Description: Shaggy-related protein kinase NtK-1
  misc_feature (1)..(408): Homolog of NCBI NO: 15230058 NR Description: shaggy related protein kinase, ASK-GAMMA; protein At3g05840.1, supported by cDNA: 17739., supported by cDNA:
  misc_feature (1)..(408): Homolog of NCBI NO: 541901 NR Description: protein kinase ASK-alpha (EC 2.7.1.-) - Arabidopsis thaliana >gi|460832|emb|CAA53181.1| shaggy related [Arabidopsis thaliana] >gi|1769889|emb|CAA48538.1| serine
  misc_feature (1)..(408): Homolog of NCBI NO: 21553877 NR Description: shaggy related protein kinase ASK-GAMMA
  misc_feature (1)..(408): Homolog of NCBI NO: 2398519 NR Description: shaggy-like kinase alpha [Arabidopsis thaliana]
  misc_feature (1)..(408): Homolog of NCBI NO: 22326813 NR Description: protein kinase MSK-3 - like; protein id: supported by cDNA: gi_18086449 [Arabidopsis thaliana]
  misc_feature (1)..(408): Homolog of NCBI NO: 24637171 NR Description: GSK-3-like protein MsK4 [Medicago sativa]
MASAGVAPSGYKNSSSTSIGAEKLQDQMNELKIRDDKEVEATIINGKGTETGHIIVTTTGGKNGQPKQTVSYMAERIVGQGSFGIVFQAKCLETGETVAIKKVLQDKRYKNRELQTMRLLDHPNVVALKHCFFSTTEKDELYLNLVLEYVPETVHRVVKHHNKMNQRMPLIYVKLYMYQICRALAYIHGTIGVCHRDIKPQNLLVNPHTHQLKLCDFGSAKVLVKGEPNISYICSRYYRAPELIFGATEYTTAIDIWSAGCVLAELMLGQPLFPGESGVDQLVEIIKVLGTPTREEIKCMNPNYTEFKFPQIKAHPWHKVFHKRMPPEAVDLVSRLLQYSPNLRCTAMEALVHPFFDELRDPNTRLPNGRFLPPLFNFKPHELKGVPSDIVAKLIPEHAKKQCSYVGL

SEQ ID NO: 12502 - protein, 381 aa, Zea mays subsp. mays
  peptide (1)..(381): Ceres Seq. ID no. 12411529
  misc_feature (45)..(329): Pfam Name: Protein kinase domain Pfam Description: Protein kinase domain
  misc_feature (1)..(380): Homolog of NCBI NO: 481018 NR Description: protein kinase MSK-3 (EC 2.7.1.-) [similarity] -
  misc_feature (1)..(380): Homolog of NCBI NO: 11182434 NR Description: GLYCOGEN SYNTHASE KINASE-3 HOMOLOG MSK-3
  misc_feature (1)..(381): Homolog of NCBI NO: 18421039 NR Description: shaggy-like kinase alpha; protein id: supported by cDNA: gi_15028148, supported by cDNA: gi_16226767
  misc_feature (1)..(381): Homolog of NCBI NO: 11133532 NR Description: Shaggy-related protein kinase NtK-1
  misc_feature (1)..(381): Homolog of NCBI NO: 15230058 NR Description: shaggy related protein kinase, ASK-GAMMA; protein At3g05840.1, supported by cDNA: 17739., supported by cDNA:
  misc_feature (1)..(381): Homolog of NCBI NO: 541901 NR Description: protein kinase ASK-alpha (EC 2.7.1.-) - Arabidopsis thaliana >gi|460832|emb|CAA53181.1| shaggy related [Arabidopsis thaliana] >gi|1769889|emb|CAA48538.1| serine
  misc_feature (1)..(381): Homolog of NCBI NO: 21553877 NR Description: shaggy related protein kinase ASK-GAMMA
  misc_feature (1)..(381): Homolog of NCBI NO: 2398519 NR Description: shaggy-like kinase alpha [Arabidopsis thaliana]
  misc_feature (1)..(381): Homolog of NCBI NO: 22326813 NR Description: protein kinase MSK-3 - like; protein id: supported by cDNA: gi_18086449 [Arabidopsis thaliana]
  misc_feature (1)..(381): Homolog of NCBI NO: 24637171 NR Description: GSK-3-like protein MsK4 [Medicago sativa]
MNELKIRDDKEVEATIINGKGTETGHIIVTTTGGKNGQPKQTVSYMAERIVGQGSFGIVFQAKCLETGETVAIKKVLQDKRYKNRELQTMRLLDHPNVVALKHCFFSTTEKDELYLNLVLEYVPETVHRVVKHHNKMNQRMPLIYVKLYMYQICRALAYIHGTIGVCHRDIKPQNLLVNPHTHQLKLCDFGSAKVLVKGEPNISYICSRYYRAPELIFGATEYTTAIDIWSAGCVLAELMLGQPLFPGESGVDQLVEIIKVLGTPTREEIKCMNPNYTEFKFPQIKAHPWHKVFHKRMPPEAVDLVSRLLQYSPNLRCTAMEALVHPFFDELRDPNTRLPNGRFLPPLFNFKPHELKGVPSDIVAKLIPEHAKKQCSYVGL
